United States Patent Application Publication US 2014/0057251 A1 - sequence listing, part 11

SEQ ID NO: 15653 - DNA, 8041 bp, Cannabis sativa
taattattaaattaactaattacgggaatttcagtgttcccgccattttgttccacgatactagcattcgaagaaatccagtgccgtgtgcatgttaaggacactacgcacttcgctcaacttagcacctctaagggtaactcatatataagctgcgttcgtagtaccggggcagtctaaaagttttttctcggagcttgttgtaaacaatggaagacgacggaggagagaaatcaagcttcgtgatcggtcttatcgagaacagagccaaagaggtgctgtatcttcttctatctcgatcatcacaactttgcttttagtttctcgcactttgtatcgctttggtttggaccagtgttttgattactatcatattcggtgattttatgatgaacaattatctgattctgattcgccttgtaaatgacgatatcactggaaattgaagtttaggaatattttgttctcaagttgtttaagggaaaaaaatggaaggtttggatattgaactttaatttatatgattctgagaagtttttagcatttggtgatttgaagattaccttgagagagttgcttcactttatgataattgttctatcatcgaagaatgtatattggttgtcaaatggaaattaggaagatgattctttgcgcctaaaaaatatgttcatttatgtctgtgagtaatttatccactttatgatatcctaaaagaatcacattcacactatctgtgaggcagcagtttttaaaatttcggtggatttaggtttgtgctgtcacctttctgatactaactactatgggggtttttattgatatataatggagcgtaaataattctaagcaacctaagtcattgctacttagtttattgtattagtcgaagctgtggttagtatttaatcatgttttacatagtttacctctcaactttaggtaagattaaaatcaggcagagcatgaaagattcgtaaatgtttggattgagtactgctgaagtgacatcatagcatacagtaaagagagactgagaaaaaattcaacgggaatagctcgtgtatccaaagacttctgaagtacttcaccgagatagaagagtctgattattgttgagacttgagagttgctattgctaagtgaagctgaatttagtgagtaaaagcaagtaaatatgatttgagcggttttgaaatcatgctatatagtgagttgagctagaaagaagattttcagatattttttatgtatttcagaagtttatatgctgctccttttctgctttccttctctccttcccgatctatcttttctattgtaaagagactggtatatcatttgtagagaggtaaattagtacgtaaatgttgcaaatgtaagctaataataactttcaatagctacttccagctaaagtctggttgctgttgagctgtgaaattattgtgcacaaactaacaatgttcatcctgacaggttggagtagctgcttttgacttaaggtcagcgtcgttgcatctttctcaatatattgagactagcagttcatatcagaatacaaaaacgctgctgcatttttatgatccaatggtgatcattgttcccccaaacaagctggcacctgagggcatggttggagtttctgaattggtagatagattttatgcttctgtcaggaaggtgatgttttgtccattactagaattccatgctctctctacaattagctctgctttgtctgtggtttcttgcaatgttacatatgtgaggaaataaagtataggagtcatttttgcaggttgtaatgggccgcagttgctttgatgacactaaggtgctggatactgctttctcttactaattataaatttagatgctaaaaattgtatcattgtgtcctgagatctaatttgtttgtgtacttttcagggtgctgtgctgattaaaaatctagctgctaaggaaccttcagcacttggtttagatacttattacaagcaatattatctgtgcttggctgctggtgctgctactatcaagtggtattttcctgatgtttagcttttcagaatataatgtcattaaagtttccttccccggttatataatggaaattcagtatatttggcatattaatgctaaactgagaagttaaaatttacaataatatggcaataaatacaaatagagcatattctttaaaaaagtgctgattgttactttttaaaaataaataaaaaatagtgattaattgactgcataatccacaggattgaagttgagaaaggactcatcgtcacaaatcactcattattggtacgtctaatggtgtatcttccatttcaaatttgctttttgtatttgatttcttattttgttttcgtgggaatagaaacgaaactttgtattaatcaatgagaaaaaagtacaaagtaaaaggaatatgctaatctcatagatgataacttgaacctgaaagcagcaaaacgacaaacaaaatgcaggtaagaaaacagcagagttgcaagagattagaccattctctacttctaagttaataatccctcaaatcctttgaatttgtaaacccaagctgccacccagaaatttgactttccccatttttttttcttctgtcataattctgctatttgtttccaaccacacagcccaaaagagggccattattgttgttgttcacaatgatgaggcacggctatcccctttcagcttccatgccaacaactggatacaaagttgtggcataaactaggatgtgctaagttccttgagtagcttagctcacagttttaaccctagagaacattccatgaataaataagtattaagtattgatttagcattccaggaaagtaatgctgaatctttctttcttctactttatttatttttgttgagaattctaacatttgttctcatctgcaactgggactttctaggtcactttcaatggatcttttgatcatatgaatattgatgctactaggtggtctttcttcactcgtagaaatttattgtaaaaagttatattcattccatgaagtttgaaaatgttaaaattactttttatctgacgttaaattttaaaattgtttttttttgttacattaaacattaatttgatggcagcgtccaaaatttggagatcattgagccattccattcttcattgttgggcacaagcaataagaaaagaagtttgttccacatgcttaagactacaaaaacaattggagggtacttatatatgatgtttgatacatgtcttaacattgttttcctaatattgtttcttagctcctggcattacatcagattttgagcaagggatatgtgatcaaattggggttttggtttttccgccttgacagaaattggcattttgtattttgtattgaagttatagttcattatgtagagcatgcttagcattggtactaatttttcttcaggactagactacttcgtgccaaccttttgcagcctttaaaagatattgaaactatcaacgcacgtctagattgcctggttagtgttgaatatggcatttgaaaattctcctattgtgctacaaaaggtcacagatgagttaaataaaaactcttgttagtccatctcttatgaacttattactttctagaaaagtagtattttaagatgatcaagataatagagtagattgcaattagttcaatttctgtagctacaaaagacttgcaagttgcaactagtcttcaagaagtctgaactatctactagaatataaaatgtagtatttgtccatttcttcctgacattaactttttaggaaaatagttttttaagaggaaaacaatatgtttccaagttcaatcgctgtaactgcataagtcttattataaatccaggtgtaggctctaaataaggttttaaaagctggcaattgtccacttaagtcataatattgcaccttaagtttaatctagcaattccttcaaaaaaaaaataataatctagcacggtgttttaacaattttgctggttttcttaaaagttgaagtttggtggagaagatgaggcacatttacttaaaaaagggtccaagaatggaactgtaggatacaacatgcacatcctcacttttgcccatgctattttcttttaaactgctgatgatggctttttcatgacacaataaacaggatgaaacctacgaaagcttgtttttaaatcataacagctgttttcaatatatgatgtaggatgaactgacaagcaacgaacagcttttctttggactctctcaggttctacgtaaattcccaaaagagactggtaagacacaggatgtatgtaactgttttgaaagtttgccttcttttcacatatctataggtaacttttttaagttcatctttcagataaggtactttgtcacttctgcttcaagccaaagaaagttacaaacgaagtctcaggtgttgatttttcaagaaagagccaaattttaatatcaagtgtaattcttctgaaaactgctctggatgccttgcctttgctctcgaaggtaagtattaaattaatatttctacactcgttcacacacagatccaaaaatcccaagactaaaagatgttaagaactattagtttcttcttaactttttaggtacttaaggatgccaagagttttcttctcgcaaatatctacaagtctgtctgtgaaaatgagaaatacgctctgatcagaaagaggtagattcactgagctgctgttgttgagtcctttaattttgtgctcatacaatgttctactaattgggacttcatatgtgtttctttattatttcacttctacggtgaaaattataggcctgaatattcttggtgtagtgtgaggacagtaacagaacttgctcattcaaatgtagaaggattcagtgtagtttagctaattttagctctaacgatcagccgcgctcccctcttttactacataaatgttttataatatatatgcacattaaacacttctttttgccaatataaactttccgaaaatatgttaaactcaattgtcgtcgttttcttttcttcctttaactgttatcctcttacgaggacatatatttaacaagcattatgttcgggtaaacagaagctcatttgtgatgtgaaacattttcctgatgagagagttaatcagcaagctgtttaaacatttttcttcaattttcaataccattacttgatttaatatttgatgcttcggctagcctcaaatattagccaaccacctgggtgcatggatcaaatttgcattatgatttgatgagcacacagaacccatgaggcccaacactatattttaactcaattgtcgttaattacagttgtgttctttagaagaaatttgctaacttccagttctgtatctaaataagttttgcatttgatgtccccttagaccagtcttatctgtttcagactatgaacatcactgattaaccagagaagcttttctgtttcaggatcggagaggtgatcgatgaagatgtgttgcatgcacgggttccttttgtagctcgcacgcagcaatgttttgcagtcaaggctggaattgatggatttttggatattgccaggagatcattttgtgatactagtgaaggttctttgacatgtttgatcttgaccattattttctttttcttttatctgctttcagttttcttataccctggatgatgttaatccaaattaaagctagttgataataaattgacagctattcataaccttgctaacaagtaccgtcaagatttcaaattgcccaatttaaaactcccatttaacagtagacatgggttctactttagcattccacagaaagatattcaaggaaaacttcccagccaattcattcaggttacaacaaattttctcacctactatattaattaatatctcatgagtaatttattgctaatgttttggtcggctttttaaacattatctctcaggttgtgaaacatgggaataatatacgttgctcaactctagagcttgcttctgtaagtatctaattggagctttcctagcagtagtcatttatgaatttattgtcagcgtatcaatcaaatctaatgcttttttctaatcaatgagccttaataaaaccatttaacaaaaatggagtggaggaccttaatagctgtcacagcctacaagaaaaatttagtcaaatcatttacagggttaactaactaattcgaatgaacagcactggtgaatttgatctgtagcctgattctgtgaagtccctcttttcatttttgtgaagccttggatcaccattctctatgttattccatctctgcaaaatgaagaatcgatcttatgaaacaaacatttagttatggtaacatttttacaatggtttggttttcagtgtttctcgataagttcacttcaacagtagatctctctcttattctctataaacaaaaataagaataactgtttggtgtttagttgtgactttcagacattatatggtattcctgatgtgttacaaggtccattgttcttttatgtatttttaagagcatgatgtatattaaccaacaaaacactacacatattttatatttcagtcatctttttctcatgaaacttgcagcttaatgttagaaacaagtcagcggcttcagaatgctatacaagaacagaaatttgccttgaaggtaaggcatttaatgagcacggcaattgatgaaataatacttttggacaaagtagtgcatgagtttaatttttctcacgcctggccaattgattctagtttttcgtatgcttttaacagttctgatgcttctataaattaataagtttgatggtaatatgacatatgcagcactagtagatgccataagagaggatatttctgtgctcacactgcttgcagaggtcctatgcctattagatatgattgtcaattcctttgctcatgcaatttctaccaagcctgtttatcgttatactagaccagaattcacaggcaagttacttgctgttctatagcaatgagtctcatttatttttagagtggggctggaatagttcttctttttatttttatttttttgaatgggggactggaataattcttaactcaatcatacttgctgatagatgatggcccaatggcaattgatgctggaagacacccaatactagaaagcatacacaatgactttgttgtacgtaatattttttctccaatgattttacttattttctagttttactgaagtagatggcattactattatatgctctctatctttttcgtttacttttcaaaatagggaaataaccatatccttttttaatttatttttttatcaagaaagaagctttactaaataattatattctcttcatggaaaaattttataagattattaagttcgcattttgcagcccaataacaccttcttatcggaggcatcaaatgtggtgatagtcatgggcccaaacacgtaacacgtgctctaagttatttcagatttttctctttctgctacagagtacaaactaataagttgttctcaatcgacatatgttgaaaatacaattaatacatatttacactcacacacacacacacacacacaccaactatgcaacatttacattttgtattaatgttattgtgggtacatgagtctaattgtcatggatgaactgggaagggctacatcttcaattgatggatttgcaattgcatggagctgctgcgagtatctcttgtcactgaaagcgtaatgccataaaactctattatatttcttatagcccgtgagttttaagttattaggctttgaataatattatagttcttaaggtggtcgcttgaaaatctccaaagtattggtttactgtatttttcaaaatagaatttgaaataaaaatcatatttttataaaaaaaaaatgtggttcagtaagagtattacaaactactctatagagatt

SEQ ID NO: 15654 - DNA, 7925 bp, Cannabis sativa
  modified_base (336)..(345): a, c, t, g, unknown or other
aatgtagatttaagtaaacataacattttttttaatttaatctataactgtttttcaaaatagttttatatttttattaaatttttaattaattttctttatctagtatgagtttataaatataaataagtttgtttttttcttcaaaaaattttagttcatttaaattatttattagattctcaataattttggtttgattttttaagatatgaaaaataagataaactttgaaaatatttttttaagtaaaattaatattttttttaattaatttaatatttttatcaaaatttttaataatttttattattttttgaattaatagaatattannnnnnnnnnaattaatttttttaataaaatggggcaaaattttgtattggtcaaagttaagagggtaaaactactaatttttaagagtaaaagaaacagacggaacacaaagagcataattatgtaactgttatattttaaggagaatttttaacaagccctatattttatgagacaaaattaggtagtgtcgaaaaaagcaaaaatactaattattctaatatatattaattcgtatgtctagtttatttttggaaaaatataattagatagaaagagagaaaaaatttaaagtaattaataattatgtgttgtgttagcctaatatataattataaatttggcgtttttattgaggcaggatattgaggcattgtcaaagaaactgaagtttatacctaacttggtattcaaaacggatgttccgtacgtggaattcttggaccgagtccacacatccgagttgaaactcaggtcccagggattgtgggacgtaccccacccttggatcaacctttttgtccccaagtcaaagatttctgactttgataaggttgtgttcaaaagaattttgggtaaaaacaccagtgggcccattcttatctaccccatgaacaaacacaagtaagttatgcactttcctttttcctttttctctctgtatgtatagtatatttaacccattatatacatgctttctgaatataacagcttcattcttttacactctgcatgcaacacaaccaattatacataaattgtattaatttatagaccaataaaaatcatctgtctccaacttcctatttcatgtcccaacacatgtgtccattttatttattttatcttaactcaaaaagcttcgttaggtttagaacggttagtcataaaacattaattatcattacattggaaattgacatcaattcatctttcttttttttttttttaatttgcattcatgtaatacaatatagttataacataacattttctatagtgataattattgcttttggactaacagttccaaaattaacagaacttttgtggttaacctgaaatgtcaatcttttattgttgcgacagaagtagatagggagtttgggaaaggtgatttttatgcttttcttttatcattgttattacttattaattagtatttataataattactacaaaacaaaacattggtaactagttatagtaatttttaataatacaaaagctaataagcttcgattttcaacttctttttttgccccggctgtttgggtagaataagccaacaaaagggaagatcctcgtgtcataataaaatctttatgtggggaccggagtagtactaattagttattttattcttctaatttggttatattgaaattactagctatatataaatatatatatagctaattaactatatggtgtggttgaattgatgtatggagatggaacgaaaggagctcggtggttacaccagatgaggaggtgttttacgtggtgggattgttaagatcggcagcatcatcaggctcagccaataatgatagtattaatgatgatattgatgagacacaaagtgtggagtacttgagccaacagaatgatgatatagtgaaatactgtggtgaagctgggatcatggtcaagaaatacctaccccacttcgaaactcaggaggagtggatggaccactacggacaaaagtgggatcactttctcaaactcaagaacaagttcgaccctcgtcgcgtattagccactggccagcgtatattcaccactaatatgaacaagaaaacaaaaaaatattaaataactatgctctactcgatctacctagataattaaggccgtagctaattatataaattaaagctaggttagcctaaatatataatttcttgggaattaagggtcttttaattatgtatggtgtgtgcttattaatattattattatggtatgtgtgggtagaaagaactgaaggttaatgtacttttgcatgaagtagccatgagccccaacaggcgacaacccgatctgcttcttcaccggatatcatcttgtccttccaccacctctgatattttgtctgccaccatattaattaattacttattaccaagcaaaatttatcctctttttattgttatgtcttttttttttctttctttttctaatgaagctttttgtttttgtttctagctacgtacgtactcctatatttattcctctattaattttacataatctttcttactactcaatcgttaatttgttaaaccccgcgcaatctttgttagaaattattataaacaatgaaataaaatccaagaaaatacaactctattgcaataaaatgacaaggataccaatatattaagtaaaaaaatattacagcatataagaaaagtaaaaaataaaaagaaatatatattgcaactcaaagtaacaataaaataaagaacacaactaaaaagaagaagaagaaataagaactcttttacccttatcacctcaagtgaaaattagtggggattattaaaatttgaagaaggttttacacttttattcagaatttattttttcttatcatctctaagcactaaattttttttctaagaaataatttttggaataatcaagtctaagaaataattttgttttaagttatgattagtctgtgtgggaagagttaacatgtaggagaatgtaaaactcaagtctcaaaataaattaagattaccatttaaaattcaatgggatccacaaaaaatatgcgcattccaacctaaaaatttgaatcaaacatggggtgaattacacatttctccatatctaatccctacccctacaccaaacacccccttaggacttcaagcaatgtactttcttgatagaaattatatagtcgccacaaaatgaacactttagacctctatttataatgtttaggatgtcactattattcgcatttctggttagagacacgttgattctaaatataagcttaaggccagtgggcccaaatagcaaaaataaggctaagcctaggatcaactctgccttccgagagaacaccaatacaactcacttaggtgaggttccgtgaagatgagttagcatccggaagggtccgcgtatctagaagaggtcctctgtatgaatttggaagcctaatatagttttctatttactatctcacgtagaataaggaatttcttttcaaaatcccaaatagaataagatcttgctaaaaagagaaattggataactggaaattagataatcaatatgtcattaattacgcatgaatataggacataatacgaacaactatcttcgtgataaggcctccatgttagcctacacaaggtgcctcgtgggctgggcttcaccaaataaattcaaagtcaatgtattatttgtaaactccctaagggagtgaaaagggtaactatagtatgacctcaataacactataaatgctcactgaatttttcatacaaaggattggaaaatcttaacatacttgctcaggaaaagaatagagtgtccatacttaatgtaattcccttaagcttttttagtaaaatactaaataatagtgactcgtgaactaaggctcgttaatgctccaattatgtaaaaaactctaagtgtcttcttcatatatgttgactcagaaatctatttgacttttaaaccacactcgctcactagattggcgagaatgaaaaagtaattaagtaatgaaactacgtctactttgagtttttatttctcatgagatggttttataaaaaatactaagtatcagaagctctaatttctagagagaagctctgaccttagtagttcactctctgcattgcgacatgaatgaaactacgtctattttgtgtttttatttctcacgagatggtattataaaaaacactaagtattagaagctccaatttttagagagaagctctgaccttgtgagtagctttctgaacttaaaaaatgagttgaggtaactctcctttcataggtgaaggaggcccacccaaatagggggaaaatacaaatatcttgggggtgatgactatttttaaaggcccaatgggtcccctacgggtaacctggagcttatttttgtaactcccctggaatgaaatttgacgatgatagcttcaaattacgattaaattgtgagagattacttgatagagcattaaattagctttaaagttcaagttgaatcgcgtcaatcatatcaatatttagtgagttataaatgttttactaaaggcagttcatgacccaacgctcaggtttacatatgacgtcaacttggatgttgggtaagtgtaaaaatatccaagggatgtactttaaaattcctaagtgatattcctaacttggatgctagcaaaattggtcacaagttctcggagatgttattctacagaaacgagagactcaaaactctttatttttgagtgagtttcccatgttggaaatgagaaatgtgaagttgtgaatttgatttctcaaacttcatggatcttagttattgtgaaaaactaaacagacaactgaaacgaaatcaaaatcggataagcagacccaacgcactaggccatttgccaacctaggcgtcgggtaccctattcccgagctcccaagatctcgtttttatacatacaagatctttgaacttgagaacgaggtctcttaccctatttttgaccactccagattcattggtcgaatcatatttcacaattgagtaatttaaggtaacttcccaagttgattgtcaacctaggcgctaggcccaacaccatgtcaacctgggcactaggccctatttccaagggcttgtgtctgtggttttctccctgagtttgcttaaatcttcattatttataatgacagaaaaatgccgataacactttttggtgaatttgactggaaacagcctaggttgacaatatttcaacctgggcgctgggccttatttcttggcacccagaaaagtgttgtttcttccccgaaatgacctacttccccattttttatgaagacgaagaagatgcaaaattcatatcgttgatctgatactctaaaggtgcctagattaatgaattgtcaacatcggcactaagtgcttggggccccagggccctaaggctctgggtcctaaaaaatgaacttactttctgattctgatgcctcaaatatgtccatggtatgtcaagttgatgtcccaatacaagttttgacccattttcactaagacgatcctgaaaattaaaaccttaattgggaatgtctacctagcgcgggtgaaaccctaggttcccatgttggctttcgagttgcaggttcgtataagtttagctcccagggcttagattaggttgctccatgtcttcatggtacaaaatacatcagtctcttagcttcatcccagttagtttaaaaaataccttgttctaagtactgtgtaattgaagtcatccatgatggactgttgtcgattatcaagataggctctgagtcttcatttatgctccatttggtgaggtattcgatgggaactacactgagagtgtcaaaatctgttgtaccattgtcgttctactcacgcgacacttgttggatggagtagttcttgagctaggccaatagatctttaactttgcttaagtatgcaatcatgttcaaccctcgggcttgatactcgttgagaatttgattaataactagttgtgaatcactgtagatctcgagtgattcagctttgattgctaatgctaatcgtagtcccgttaggagtgcctcatacaccacttcattgttggttgcggtgaactcaaactacaatgcattgggagcttaaaatccctatggaataactaagatgagtctagcactagaaccgtgcttgttagaagatccatctacatagagtttccaagaaggtccagtgtcaacctgagctagtctcaggcgtgtggacctagtcttcacaaatcatgagatcaactttgtcgaggcgagtacatttaacaatgaaatttactaatgcctgtcctttgattgttcttcgaggctggtaggtaatctcaaactgacctagttcaactgtccacttgagtaggcaccttgatgcttctggcttcattagaacttgcttatgtggttggtcagttaacaccttgattgtttgagcttagaagtatggccttaactttctagagactaggaccaagcagtaggctaacttctcaatgggggaataccttaattcggccccaataaaatgtttgctaatgtagcagataggatgttatactctttctttctcacacagaaaaaaatatatattaaaaagttaattcataaaaattatccactaaatgaatatcaaaattgaatttaaaagaataaacaaaataaatatgtataaaactttatcgaaatatgtatacataaatatatataataacaattatataatcatatcataattaataaaacacacatatgaatcaaaattttaaattaatacgaattcaaaaattgatcaatttaataatcactttcaatatgatttaccctaataatccaagactcgtgatatcacttataagaaattaaatttaaaatatatatggatcttaaactcatgtcaatgttagattattaagattactctatgaatcaataaatagaaaacatatctgattccatgatattagatatgagatgagattgtgggtatatggtcttccacagactaatattctctctatgtgttctcattcaattgatgagaatggaggagaaaaatagttgagattattcttgtagaccaaactcttatgttttttatatagcaaactaataagagccctataaatcttaattaggtttactattgggtattacacgttacaaaactcataccgaataagatgtttattggactcatttaattagaccacttatttagcctaatttaaaatattaactcaaataaattatcttaatttgtaagcctatatattggaatattgaaaataactcaacaatataaatatatttattaaattaaatgagatatctgctaaatatttgttgaagaaaatattttgttcatctaggatatggctagtttttcatgaagtttgtatgtacaatcttttatgtaatttttaattttttttaaacgattttttaaaatttattattttaatgtataatattatacttatatacataattttttaataaaatttatatataatattgttttatttttttaatttctattttttctttttgattattaaatattggctatgtaattataataggtgtttttatttgattgtgtatagtaattttttttttatggaagtaaatttgtctagtattagaagaaataatgttgatcatggtttagaaatactaaaatcccataaatatacttatggagaggtttcaatggttacattaaatatgtaaccatcatagttatatttttttagccattaaattactattaaatggttatgattaat

SEQ ID NO: 15655 - DNA, 5486 bp, Cannabis sativa
  modified_base (485)..(485): a, c, t, g, unknown or other
caaacgattttatctcttctagtctcatattttcatatctttctttgtgagaagagtgtttcatttgtaaaaacttagagtattcaactaggttttggtttcctcattatgatctcatactattcttagaataggttaaagagaagctttgaacaagcgtgggtcttcgggagaagacttttccaagtcttatttcgggaggaagtgagcatatatcttcgggagaagatttgtttaagccttacttcgggaggaagtaagaacacatcaatatctgaagggagttcactacttggtgtgattcagagatcagattagcaaggtggattacaaagagttgcagcaaatcactagagggagtctaaatttgtttaagtcaattacttttgtaaactttgatactttactaattgatttcattctctgagtgtggtcccgtggactagtagtgtttgcaagaacactgataccacgtacaattctcntgtgtcaagtttttaaattctgcactatttatttctagtttgtttctgcaaaactattttctgcagtaacagaattacattttgttgctgcaaacatttgcagttttataattattatatttctgtaatatttattgatatttgcaaaaactcgatttttcaaccatcaccttcccattccaaagatagcttattaagaaacttcttactctttaacgatgcagctgaaacttcgtcaacatcactaacattttctattccttgaatccaaagactctcatgtagatcttaaaaatgtttcaatagcttaatgctaccagaatgtttattttctctcactgaaaagatattaagtgtctgaagattttttagcttaccaaattgtaatgacatctcttttataaataagtgaacacagagatgttgcaacttaattaaattatcagttggtagtcgagtaatatgatgacacaccttcaacaataatgtctctaaattgtacatgcattaattgtattaggtatctcttcaataccataacaatctaacttcaagtaacttaaatacttcaaatttcttattgaatcaggaaacttgttgatcaaattcattcttatagatagtattcttaagcataggaataatttgtgcaaatggtctaatttagaaagctaatgttttttgataacaaattcagaaagctaatcttgatcagtaattttttatacataccggtataataataagttgcgcaagaagtagttgactttagataactcctcaaagttcttacgctcattagcttcttcaccatgttgtgacgactccaaaagatggcaaacattaggagaaaactcaccagacaaaaacattgctagatcatgtagtagatcatgcacgaaaaaaatcgattcatttgcacttgattgttaaaaaatgacctagaaattagatcttggaagtatctgtctctaaagcactccttttgtttcgagattgtaaaagaccttcagccacccataacaagattatcaccgttttttttttaattcataatctttaagaagctgagtacaataagcaaaacaagactttaaattagaaggtagataaaagtaaatcaaccacaaattctggaagaacatcattattttttctttcataaaatctccatatatcatcattaagaatgttctcccattctcccttattctgtttccctcttaagagattggcaattgactttattgcaagaccattacacttatcaacaattcttcttccaatttctttaatatcagtatcattttcatctgagtctaatcaattaaggaatgtttagcaaataactgccatccaacaacctcagatatccccttcaactgataaattgactatattgtcacagttgatgcaacaatattgcttccatgcaatcatgatttgaaacttatatagaacatcccatttggttgaatcctcatcccaaacatcatcaacaataaataaaaacttctttatcctcaaagtattttgtacttcatcttgaagatcgtacagttcctcaatttcatatttcttagaagtgagtttcttaacaattaacctcatcactatcacataatcaattttatcatctctaactgtaatccatactttggtatcaaacttctcctcgatcctatcatccttgtatgcaagttgagcaagagtagtcttaccaataccacccattcccataattggaattacagatagtttgtcatcaccgtccccgatcttgtcattcgaaagtatcaacttcataatctcttctttattagcatcccttccataaacactagattcttctaacagaggatcacacactctaactagaagcttatactttttcaaacgctctaactaacatctttattctctaaaagaagcttcaatttcctttgtgtctcttctatttaagattttatgtctttatcaaaagaagttaaatgagttgaggatgagatcatgagtttcatgagtaccttactactagtacaattgtagccgcgagtactacgagatttaccttcctgtttattttgccatgattcagtatcgatcatgtaaaccaaatcgtctgcatcataaatgatgagatcatcaagctacttcttcacagcctcctctttgatgagcatctcctcaacatcaatgagtagtagaccagttgtggaaagtaatattttgagctctttcaacagtttgagaatgacatctttttctttgaagaagtctttcacagtctggttcatgtataccaaattgtctgcatcataaatgatgtccttgacatcatcaagccactttctcacaacttcctctttgatgagcttctcctcagcatcaatgagcagcaaatcagttgtcgaaagcaatgttttaagctctttaacaacttgagaatgacatcttttcctttgaaaaagtccttcatctctgtaggtaactttttcgccaaaggattaaggaaagcaaagagagaagcgctccaccaactacttcacccatatcaaaattttcacagtagaaaaaattacaaagagagaaaaattattattgtagcaaacagtgcatagagtagaatgattataaaatttaattttggttaagatgatgagtgcaaacggctccaaaagcagtgcataatttttgtattaaatattttttttaatattcttgataatgttaattttagagtcgtttattaattataatttgataaaataatgcaaattgaattgatttacagtaatcatatgttaatttagtttttcgtagattgtgctgcacatgtggtgatggttattttttttttataaatgtaagaaaattaatggaacacagctcaaaaaatatagtgttgggatataggacaccatccatctctactcttgacgtgatattgttttctttgcgcttaagctatttttttcttaggcaccttcttaaaagacctcaaaccaatagtaatagtgttcatctttatatacctaagattctttccacttctagtcaatgtagaactttatttgcacactaacacacatcattgtggcctaatatattattacaataattcatgcatattaaaaaactacaagtcgtttgttattataaataaagggaattttcaaacgagaagtcgttcgtttttcatgtgtaatggacgacaagtcatttttgttggtttaccaagaaaactgtcattattgtcaaacgacaacaaacaaacactcattttatagcaaaagaataaaataaattatggaccatgtgatgtgagtctagtggaaaggtaaaaaagacattgaagactttttccaaccgtccaagtatggaaacttccatatgactattcaatcaaagttttctaatcattcatatcctctttggctaaggtttttgaaaccatattgtcccattgcatgattgtgttaaactactattatattaaaactgaaaatatactacatataccaaagaaagcgtctaattagtaagcccatccaagatgagtgctctcctatttcgactttcccagagtatttggtagcacagccaagacaacgaaacgaaggttacagcgagacgagtcgttgatcattacaataggtgtcaagtagaagtgcagtaatgtatgcagccgagaggcatagaaataccatcactaatttgatcatttgtctaatattattcaagtttaatttgtagctccagcataagagaatgttattacaaaagcaagtttttttccctttcttttattatattctttcactcacttgtttactctatttgaaaggccttaacaaatagggatctaaggtgagctggacaattgtctattattgttcctttgagagatccaattatgacaattgtctcaacttgttattagattgtttgacagagataggaattaagttggactctcactcataacattgagaatttgagatcacaaaaactagtagtaattgtgtcattaaaataaatataatgtgacagaactcaattctcaagctaagatttttcttttatttttctcccttttttcttcaacattaatcacaatcaaaacattttagttttctctgatataaccaatgactgagctagataaaaaggttaaggggccaaaactattaataaaaggggaaaaaaaatctgcacactatttacttataactaaccacaaaatgagataaaacaaaaaaggaacactattaaaaaaaataaaactaaacaagacatgcttaactaataagtaaattaattaatcaaagctcataagtcatccctactttgaccattcttttgtgaggaatatcaaatgaatggttactgctctgcctcaaatttcttaccaagaaatcataagcataatcaatcaaaattttcttacccaaattagctcctgcaccagcaaacacttggctttctcccatcaaatgaacaacaccatgatcattaaaagctttgtcaattctttcaatctcatcactccttaatagttcttcttgctcattactactacttatgacttcttcactattcttcttcattataaactcctttaatttatcaaccaacattttctcaaagggttcactttccttatgcgaatccctataaccatacctcgcgacacagcgaaacatgttcaactccttaggctcaagtctgcgaaacaaaaatcgctcttctggtgaaaccttactaattggtaatgattttttagagacaaagatgagtgttgagtgtaatgcgggcatattttgcacgtaatgcttgaaaattggaggaattccttgtacaagttcagaatagaatagagcaatcccaggcattcgagtaattcttatgttgttcataatatcattgaccatttgtggagaaaccttattatttgactcatacttgtactttctcaagtacacattgtgccaaacaaac

SEQ ID NO: 15656 - DNA, 1989 bp, Cannabis sativa
attaacttcccaaattcttctcacggtaaaatgaatgaaatgaaaaacatgcaaatagattgttgacaaaacaagaaaaaagaaaaagaattgtctttagatgatcaaattcaagcaaataacagcccaagaaggagagtagttatgatgaagccaaatgtggtggtagtaatagtagttgctctagatggttgatcttctttggtaggagatggtgaaatggttggagaagccaagtcgtcatcaagaacagtaataaaaagcttttgatttcccacttggcagtgctgagcaacgccacaaatgtaccattttcttcccggagttgtcaatgttatcacatcatttccggtagttagggccgcagcatcagctggtggcgcgcattgtttaaagccaacaccatcaactttgaacacattgtgagctctttccgggtacttaaacactacacacaagcacaataataacaatagttttatgatgaatttcaacgtaataatatttgtataggttttattataatatatgattgatacataccaagtttgtcaccaacatggaactccttgccttgtgcccaagcttggtaatcgaagttgatagtccaccctttttcatcaccaacaacgtattcaactgctgtaattgaagggaccaaaattgctacaatagcaatgaagagtacataatgattggaaaaagccattttgcttggttttttagtctctgattaataatatattgctgctatatctgtgaagagtttgtactctctagtggtatggatgggcttaagaaattaaagggctaattgttgttgtgattttagcaagagagtttgattgatatatttatagggtttgggaggtcaagcaaaaaaaaaaaaaaaaattgtgttatgagattataatctcgatcgactaattattgtgtgtgtggccctttggacggcactatatgcctcgtctcctctccctgccgaatggcataataataaggttcactcacaacatgtttctactttttagtgctttgtctccatgaccaattctttacatgtaataagaagtatttcattaaaaaagaacttgtcatttaattaattctaaataattttgtctagttttttgacatgccaaaagaaaatcattttgtgcttccaataagacaactaaactaattattcttttttttattaaggaaaaagggatcaatgcagtttccttctccactttttcgatcttttttgacaatttggggccacgtgctagttatagggttcttatacctctgcatgccttgattgggtcatccgcaacaccttgagggttcctgttgtgcgaaaccaaattaatgacttatgatgcagtttatagtaccaacaaacgcgcaagataatcaagaaacaatataacaagagatcgcaaaaattcaagataatgaattatgtagtaaaacattaaaagaaacaacactaagtttaacgagtacttcaagccatgtgcaatgctctacatctcagttggaacagcaacaaccatatctttattgatatcggtatttataaggttacaagaatctttacaaacttctcagagattacgagaagaaatttctctctagtttagagtctaccttacactataacgattttcactcatgcaaaatctggtatgattctcacactggttacacatatttacaattatttataaattttcattgttgccaaaaatatcttcgaaatcattgtgacatatttacactgtcttaaatgatccagctcatcaccaacagcaatattaattcattttctaactatgcggtcattacagtcacctactagtactattcacatagacatacaccatataaaaatgtaataaaatctgtatatgtatttttgaaatacaaatgtatatattcactacaaaaaattttacttttagtcataataaaatttgtgactaaaagtaaacaaattat

SEQ ID NO: 15657 - DNA, 3401 bp, Cannabis sativa
atgaaaaacggaaataaaaaacatatgaaaacattacgcaatttaatactgaccttacacctttagtaccatcaaaggtgcacaatccaatttgggagcagaccttcttagatcccacctgtcaagacaatagagtaagtcagacaaaaatagtacatagctaaactacactaactctaataatctacatagcctattgaaatagttatgtggatgaataagttacatcttaaaataaaacagaggttgttataacctgtgccaaaagcaaatctataatgttttgtccatactgttgaaccacagctttgcactccttactaacaactccagaggcgccaatggcatggttgatcatggtaatcacactctacaagttaacatagagaaattatgtcagtatgaagcctaagcatatacacataacttttaatctattctttaaagataagttgataagagtttctgttttcattcttaatttcacttcgaacttataatattattagtgaagcaaaaaataagatgaaaaaaaaaatagacaaaaatacataccgttggaccagccaacagagaagttccagaatcagcaatagctgaacagccactaccgcagtatcctgaaaaaacagtgcacttcgagtgaaaaatgcaacaacagacatagactaaaagtgactaagcatcacagttacggagagagagagagaggatgtaccagtcggtttaccaccaataagaacatcacccatgtcaaactagcaaaagagtgtaacgattaagcagtgtgtgtttgaaaagaaaaaagaaaaaacagtttggatggacaaggtttgacttacctgccaatatccttttcgtgatacaggcacgtaagtgtgctttcccttgaagtgttttggatcaacaccaccaaacacaatttcacctccttcttcttcttgtgtgttacgattgagccagaaggaaaacacaggttccttgacaagaccttgcttaagcatgttgtacctaagaacaacaacaacaaaactcgctcatttccacagtttggtccataaaataagttcaccaagtgtccaggttaaataaaataaataaaacaaatgtaactgcttaccacactggaacagaatctcctactgaaatctcttgaaatccaagccccaatagcccatcaaacttggcaaccagaaatgtgacaccaggttccgcagttgtctcaataaattcctgacattatacaacaatgtcaatacagcataatgtggattatataagaacagattctatgatgaaaaatataaagattacctgatcctttacaactaggtcacctactttgacatcatcatagctaaaaaaacctgaaacggctccactcccatactgaatggaagcaggtttccctgcataatatatggaagcagggagagtaaagcttatgtcttgattaactggctaaatcacaataagagatagtttgcaaatccatatggaaaaaatcatacaaaggcagaaatcaaaccatttttcctgtatgttgtcgattggcttgatctatacttggcatggaaatagcaagcaatctgcagaaaagtgaagtacaaaatcataataactaactacatggcctccaataaatgtctctaaatatacagaaataatatttggttaataacaatgagtttgatatctcacagagaaatagcactttgctgatggaacccatagattagagcttcctgtgtcaaaaatgacagtgaacttctgaggagggctaccaattccaatctcaccatagtattgagcatccaagtagttttttaatgaaacaatatcagcatccgcagagtctccaagattctcactacctagatgatactttctaatggaagccctcaaagcctctgccttcttagaatcaagctgtgcagcagtcctgatattggcatcctgtttcacctttttcagtccaattctaagcaaaccttcattggatacagatgacacaagagagaataacagtgtggaaacgaggagagataacacaattgcactaatgtttgttcccatggttacctatgatcccaatcaataaaccgacaagaaaaaaaaaatcaattgaaatatgtaagcagatgctacattattactgaagaaaaacaatttaaacaggaaaaatggaaaacaaaatggtagccacatttacttcaagatagcttgaaatcaaaaactgggttttgtagaccaacaacataacatttaataaatacatacacgatacattcataaatatatgaatgaatgaagaacggccccaaacccaaataacatacctttcctttcactggcttagtgaacctttctcattcgtttcaatgataaaaatcccaactttatttcttaaaataaaaaataaaaaagaaattttcagatgggacaaaacaaaacatcaagcgaactaagctgcatgttttttcttacaaaaaaatggaactttaatggataaaacattaaggaacaaacaacatcaagcctgcatggataacaaaacctaccccgtttaacaaaatatttaaaaagtttccagaaaaggaaaacttgcaccaatcataaaggacacttattcagccaaaataactgaaaatgtgagaaaaacaacattgaaaggataggagaaaaaattagaagaagacattagcacaaaatgaatattgaaagagggccaaaggcattactcacagattatttgcggcgttgagcaaagttggcgaagagaagggaagaatactgggaatttaaacgaagagaaaatggagaaagagactagaaagctacctgtcaaggcgtggaccagcggggcccagctattgagataaagcaaggttgttgaacttttaatctgagccgtcaaatttggattctgacgaaggatttgtctttaaccgtcgatatgggtggatgggttaaactcaaaacccgtttaaacgacaacacacacgctgttctcgttttctcggaactccgaaaagttaaggcggtggtgatcaggtgaggtcacaatgtctgaatgcatttccgtgctgtgattcggggtagaatcggaaattcatatgctatgaattaccaccgttaaatttcatgataaacggtgatgagaggcgtgggtgaaagtggtttgggaaaacgacgggaaatttttgttttacagtttttactcactgactggcgttacaaccgaatgcttacgtggcaacaaatttcgggtgtcgttttggctgcctcagcatgccccacactgctcgctttggaaagaaattaaactttgtgtctttataccaaaatccttttcaaataaaagtagaaaattacagtaaaattttttaaaaattttattt

SEQ ID NO: 15658 - DNA, 11597 bp, Cannabis sativa
ttaaaaccctagcagttgcagcaaaagaaaattaaagaagaaagaaagaaggaaagagatgataattaatagcattatgtgtactgttttggttttggacgaaaagagtgggaaaatgaaaatgtacaattcacttttcatttaatgagaaaaagagtggactggtcaaagggttttgttttttttttgattatattatgtgtattctgtattgtgtactgagtgtataaattaaatatgaaagttgtatatatgtatgtataacatattcggtcggtttcggtttgaattggtcggttcagtacccaaaaaaaaaccgaccgtttaatggcggttttaaccgtcgtcggttttttcggttttgatttcagcgatgttcggtaggtcggttcgatcggttttttcggttttctgaattttatgctcagccctagtttttggagataaatgtataaatttctaaaaaaattaagggaaaattttaattagagaagaatataaattatcgtaaaataatagaagtataagtagtagaataattgaaaaaaaaaataaatataattaattttgatttaaaagtattaatttaaaagatgtatgtagtgtaatttctttcatgtaaaaaggtgtgatgctgtaaactttatattataatattttagtcaatttttgtggtcaaaaacacatgctgcaaatgtgctcgaaatacgaaatgtgtttgtaattatttataagaaaaaaaatagaaaagagaaatgctaaggggtctcatgttgtctagcaccttataaagtgtaatattattattggtgtaattcaatatcggtttcacttattttaatttaataaaaattatagagaatcactaaccaattataagttgcgatgtcataaagcgttgccccatataattttcctagaagcattgctattggggatgcctaatatcctctataagtaacgcccctcgattgattaatgaaattctttaaaagttattttcttaaaaaattgttaaaaaactttactaccctgctcaatgtcatggtataattaagtatcgaaacttatataatttaataaaataatttttaaaaaatattgtgaccattagcatttctcttttcatagtcatcattgggaaagatacacgtgtttctcacgtgacttggtgataatagatggtagtaatggaatgaaaatggtagaacaaaatatccattaaataataatcattataaataaataaaaataaaaaataaaagaagcaaagcacaaagcaaagcatcgtctcttctcttcttccccaaatcttcaatcttcgattcctttctctgtaaaccctacaaaatcctctcactcaaaccaaaacccttccgatttcatatctcccgaatatagccaacggatttttcttcattccgtaagttttcatttcttcttgaattactttcttgattttgaaattgattgcattttcctagttaattttgttctttatttatggaaatatttggtaattgatcctatgatagtgtgtttttcgttcgatttaatgcgactttttttggttgaattttgtgttgtttcgaattcatttttggtttcttttttaggtttgattttcttagaaatgtaaggtgtttcttgcagattgggaattcaaaggaatataaattttctctctttttctttcttgtttgcgattatcgggtaaaattttagtaccttagaagcttttattgcttaaaatttggaggtctgggtctcatgagaattgttaggggaatgcagagatcgttttgcgagaagaagaaggtatcaggaaggaagaaatctttgagccgagggattggtgtgacagtgcctaaggctagagcaagggataaacctgtgatgagtaaggttctgggtctctaagttgtgagggtttcggtagggagagagaattaggagaaagagagattggtcattaggttaatctatttcggtatgactcggattttgattcagcgaggttcctctagtgctgcctcgtcttcttcttcgaacccgagtcgtgctactgcagcttcggctcgtgctgagcctccagttaatcattctgagggtgtttctgttgtgaaggatgaagaaattggagaggaactgcaggaacatgtggttgtggatgagtttgttgagattagcaatggtaaggttgggaaaagtgatgatctgagctctaatatcgagcagaatgagaatttaactgatgaaattgttgatggtgagaaagttagaagtggtggtggtgatgatgttggggatcaaggggaactaatgacaaatttgagtggattgagaatttcggagagaggggaaactgagattgaagatgtgagtggggattctctgcagaatgtcattgggatgacttcgcagccacccccaccccctgtcccacccccgaaaccgtctgcgtcaaactctaatgcaaggaggttcatctcaggatgttctaatgcaacaaggattggaccctctagaagagttgcctggcctgttgtttcaactagaacttcaccgactggatcacggccttcttctcctaggtctcatgttgaaggcgaggggtacaatagcgctgatgaacaaaatccttgcaacttatcttcttatgatgatattgtaagttcttgcttttataattgattaggtttatggatgtttatttcctttaggcattatggttcgtaatgtgcctctttgtaagtaaaatttttaatctcgcaaagacttatctcttgaatttgatgctgttatatcatagcttatgattggtttgaacagtaatgtaaagttgtcatatgtccatcttttcaggaacgagaacgacaatttgaaattgatgtcagacgtgcaaaaggtttagaagtcaaacgaatgcttgaggatggaaattgtctatttcgtgctattgcagatcaagtttatggagattctgaagcatatgatttggcaagacaaatgtgcattgattacatggtaagtcatgctatgtcatgtgtgaatccacatataactgttttatgttatcctatttgctacataaaattattcagtgtgttatttactaccaagtcatgatatggatgtggtcgaaagcctttaattttacggtatgagtcatggcattcaatgcactttaggaaaaaaattgagttattttcactttggggacttttattgaactatttaatgcaattcacttgggggatctttgaaggtcctgtttgtaatgtggtgttcttgttgctactaaaacctgaagatgacttcttgttgtaatctttctttggctccttgactaattttcagcacttatgagtatttgagccttttactgatgatttagtgattgtgattctaatatttatttaggagcgggagagagatcatttttctcagtttataacagagggcttcacatcctattgtaagaggaaaagaagagataaggtatgtatgatttttatcttatctcttgcactactcgtttatgtttggttcatgtttttttttcttactgaaagtaacatttaagtgagtcgaaccactaagagagaaaatgttacttttattggcaaagtgcctgcgaacatcctatattgataattcatagattcgtcatggcaatagagaaaaactcacactttcaataataggacatttttggtttaatactttagtaaaaaataattagaattgggattcgtaaattcgtgatactctcaaaaaataatgaatatgtgcgttgagtatgttattaataaaactatcaaactgtaagggaaactgtattgaggggctcaaaaccagttcgttttcattttcttaacactattgatatgtatgaacacattttaaaagtcagttggtcattccttaataagctacaaacagtctagatgcgaaatttccttgcaactatttctatatcaaaaagatgatattctattatcttgattcgttccgttttgtgaaagtttcaggctaatgttcatttcttattcagtatgcatgtgctgatctttctgttctcttctgtggcaggtttatggaaataatgtagagatccaagccttatccgaaatgtataatcggccaatccatatttattcatatagcacaggtgatgcctttaatattggtctatatcggttccatcctacttttatataattgctgttttataacgttctaccactctggctaactccattctgtcatttagaacccatcaacatcttccatggaagctataatactgattcaccacccatacggctaagttatcatcatggaaatcattacaactctcttgttgatccacgtcgattagcgatcggtgctgggctcgggttcagctgccttcgcggggtatgttctgattaaaaagatgtggatgtgagattttgaaccggtttcatttgcaataattattatctgattgagattcacctttaccatgcagacaaatgctgacaaagatcaagttaaggctgccattaaagctcaacaagatcaacagatcgataatgcaagtgcttgatgcctttgactgtgttgtactattgtttacttgaatgtgaattgatttatcatattcgaagacatttcttttactttctttcaggcacttctagcagagggacgattttattcagatcttgagcttaccgagaaggagattgaacgcatggtgatggaagcatcaagagccgagtatcttgcagtggatacttacaagcaacaaattggccatagggagtcgtcttctacttccacagccgagccatcatcttcgggagccagtgaaaaaacagggtcatcaggcagcgagacaataaaagtggagaccggacaagacaatgtccttagcagcggcatgcgaatgctgttagcaatgggattcagctacctgcaggcgattgaggcttacagtattttcggggacgatgttgattctatggtttgttacttgctggaaacaagcagcagtagcaggcgcaaagggaaggcaactgaatgagcgattcgattcggttgagttgtctgtggttagtttctagtagtggtagaagtagctgtattgatggaagtggagagaagaaacaaagaaggggtgaaaaaatgactcatgctcatagttatttgaaagcctattgagcttcatataaagtttctataaataaaaagctagtagtttactttcaattactctttcttttttttttctttttttatgaagaaaaaaaaaacccaaattgcacattgtttttttagtttaatgagctatattggtattttcttacttgatatttgtgttatgcatgaagtgattgcttttgaaaagtaaaattagtttgtgattagaacccaaattaagtagaactctttccctttgagttgatataaagataaacaagagctgagaatttttttacattttacacaattaattttttaatatatatattttttttaattacacattttatatatacacaataatatttacttaattatagctatataatttattcaaaaaaaagttaaaaagaataaatatataattaataaaataatgataattctctttcaaataaaaatagttatatttgttgtgtttaaatttaagctaattagaatatttacttctaaactttgatatgtaccaaatggttaaaaatttctcatgaagtattgagattattaaatttaaagacttttgtccaattttacgaatgaatgtttgatatggatgaaaatttaaggggtataattttgtacatatctaagtttagggacataattagtacattcactacgatcacgttagtaaaattgaatagaattgaaaagaattctttaaatctaataatttcaatacagtctgaaaaaagtttggaggaacaattttaggccaaaatcctaattatccttgaatttataaaaaaggtttgtgacatcaaaaccaataatttaattcaattagactagaacaattataattaggggtggtaatacgtgttgacgtgttatattcgtgttcgtattttacgggttgacatgtttaattggtcaatcttaactcgatccacatatttttcgtgtcaagaaatctcaaccctaactcgccttgtgatgtctgcttatcaactatatttatattacaatatatggtgatcaatatgattggcattacatatttaatttttataaaaaataaaaaattacaaattatcaatataacgaataaaatttttaatataagtataaattatttatcttatattcttgtaagtaattttatttttaatttatatctttttaattatttcgtgtcacatgtattaattttagattatttttcatgatcttaatcattgattcaattactctttggctaacataatgacatttttttgagtataaactctttgctatgttaagatatgaatgaaaggtggtactaatcatgttcataactcggcgattcagacagttccacactcattaccaactcactccaaatccaattccttcaaagaaatcattaacccaaaagcacaatcccaagaacaaccttaaaaacatcatctcagactccgacattgtacgatggaatgtggaaatcagttctcacatgcgcaacggccgactagaggctgctcttggtgtcttcaatgctatgcctcgacgtactgttgtttccttcaatgccatgatttctgggtaccttaataatgaaaggtttgatcttgcacaacaattgtttgagaaaatgcctcgtagagatttggtgtcttggaatgttatgcttagtgggtttgttaggaataagaatattggtgctgcacgtgagttgtttgatagaatgcctcagagggatgttgtttcttggaatgctatgttatctggttatgctcagtatggttatgttgatgaagctagaaaggtttttgagaatatgccttataggaatgggatttcgtggaacggtttgctttcggcttatgttcaaaatgggaggatagaggaggcttttcggttgtttagttcgaaaactgattgggaagttgtttcttggaattgtttgatgggtggttatgtgaggaaaaagaggttggttgatgctagaaagctttttgatcaaatgactaatagggatgctgtttcttggaatataatgatttcgggttatgcccaaaatggggatttgtttgaagcgagtcgtttgtttgaagagtcccctgttagagatgtgtttgcttggacagcgattgtgtcgggttatgtgcagcatggaacgttggatgaagctagaatagtatttgataaaatgccggtaaagaatccggtgtcgtggaatgcaattattgcaggatatgttcaatgtaagagaatggatgtagctagtgaattgtttgaggcaatgccatgtagaaatgttagttcttggaatacaatgcttactggatatgcacagagtggtgatgtagaacaagcgaagtttattttcgatagaatgcctcaacgcgataccatttcttgggcggctatgattgctggctatgctcaaaatggccatggtgaggaagctttgcagctatttgtggagatgaaaagagaaggggaaaggttatcgaggtcttcttatacgtgtggtttgagcacatgtgctgagattgctgctcttgagttggggaagcaaatgcatggaggacttgtaaaatcaggattcgaaactggttgctatgtagggaatgcactccttgtgatgtattctaaatgtggaagcatagaagaagcatatgatgtgtttaaagatatacaacaaaaagatattgtctcatggaacacaatgattgcagggtatgcaagacatggatttggcaaagaggctcttgtgatttttgagtctatgaaggcagcaggaatcattccagacgatgttacaatggtaattgttgttgttattgttgcatccactattttaatcaatttagaatgatatcgatacactaatgttctagtttagctcttgaaagaattagaacataggcatttcattgatatcaaagagaaaattataaagttccaaacttttcaagacagtttggtatctctctgagtaatcttttactcgctttgttacaaaacaattccttgcccacttacaattgatcatccctttatttatactaagtctccttaactggtttaacaccttaggacgataagatatctcacttaaagccactaagaattcgacaacttagcctctaaaatcctaattaattatactttttggttgcccgttgtttctattaatacttgttcctaattgtatttcaggttggggtattgtcagcttgtagtcatactggcttagtagagagaggcaccgaatatttttacaaaatgaatgagtattatggaataacaccaaattcgaaacactacacttgcatgattgatcttttaggtcgagccgggcgcttagatgaggccgagaatctaatgaaaactatgcctttcgaaccagatggtgcaacatggggtgctctccttggtgctagtaggattcatggaaataccgaattaggtgaaaaagctgctaagatgatttttgagttggaacccgaaaatgctggcatgtatgttctcatttcaaatttatatgcggcttcaggtagatggggtgatgttcggaatatgaggttgaaaatgagagataaaggagtgaaaaaagtaccgggatatagttgggttgaagttcagaacaaagttcatacattttcggttggggactctgtacacccggagaaggataagatctatgccttcttagaagagttggattttaaaatgaagcaggaaggatacatttcttcgacaaagttagttttacatgacgtggaagaagaagagaaagagcatatgctcaaatatcacagcgaaaaattggctgtggcattcgcaattttgtcaacaccatctgggagaacaatccgtgtgatgaagaatttgagagtgtgtgaagattgtcacagtgccttcaaactcatatcgaaaatcgtgggaagaacaataatcttaagggattcatatcgcttccaccactttactggaggctcatgttcttgcggagattattggtagactaacgagatttacagcggagaaactaagactcagattgattttgtagccaattgagactcttttctgtactaagtcagttgacttattagcagaaaatagaaacagaaaaaagggtgagagaaaaagagttcttgagagcaagtgttgaggtcaaccttcatgaaagtggtttcaggtagaactaagagccttgttttcttgtcatattgttgctggtgtaaactatccaaagattggtgattgtaatttcattcatacatagtgaaacaacctcttttggaggaagactggatgtagatctcaaattctgatcgaaccagtataaattctgttgttacatttttctttcactgttctgttttcctttttcttcttccccaaattatgttaataagttcactgttttgtacactaatctgattcttgaactgttgagtcttgtgttgaattgtttcaacatcatcacattgtggaagtatcaagatgatagaattctactgattgcagatgagtaacggtaaattgaactgtctcaactgtctcgatagaggccagattgcatcctacctaaagatatcaaggcagcagcaggttagacatttctcttttgtttcggaggccaaaaggaagttacttttctgttctttttttctctactgagcccttggaattaaccaattcaagattgtatattttattattgtgtactctcattgaaactccatataatgattccacatgagttatgttaatttttcagtttggtcctttcttttcaaggttttgacggtcaagacacaaccaatttcaagttagaacagaaggtggttgttccatcagagataaaagttttcgagttggctgctaatttcgggattggaaagtccattctttatctccaagttggtatgtgtaatctgctttaaccgatttatcatatgtatgtttttctcattgcccttttgttgttagattcaattggatgtgtccttgccatggttgaatgaaactacaatgattcaacactgttaagtctgtagtgcatcgaaaatccaaaaccgaaatagctagctagtataggattatcggttgaaggtgtaagataagataattcaattcaaccagagttagtaaagtgtcgctgagcttaacatagtttcgaaattattatcaaatgacttgtattgtatagtgtgtaataaataccaaatggtctaaagaacttttcatttgtgttttgtttcatgaagtgtttttgttagagataaaaagagaaacgaactaacgaaggcatcatgtgagatgtaatcgcggctgcagaaaagggtagcggtcggccttgtcaaactctctttgtctctccctctacggactcatcgtgttgttcttcggccttacagtgttctttagcatcttctaggatatgagtcgttaattttctacaatatgcatcatactgggtatttcctttcaataataaaccagaacttttcggtggaccaagttgatcaagtggactgtacgtctctctaattaatagaaagagtaaatagcagtgtaacttacacttaaagttttaagtttgtaagcggcataaatttactatttatttttagcggcataaatactcagtatttgtaaaactgtaattttcttccagtttcgttagttagattccgttttgaatttgttagaagaatatttagaagtaactaatattacatgtttctgtctagatttaatgatttagaatttggaccttatatgtattttgtttaagataataatagagtctgtattcacgaaattattaaaaaattatagttttataaatattgggtacttatagctttaaagattttatgctacttataaacttaaaactttgagtacttattttgctattacatttaataaaaataatatatatcattgcagagtaaatcttatcaatattttccctaaaaataaatgaaagcaaaatcttatcaacattggtttgatgtatttttgggaaataatatcattgattagattttagataaatttacctaatgtactttttttttacttacctttctctaaaataactaagtatttttatttgatttctagacattggctcacttatgcacctaattataaactttcactcttttgaatttatatagttgcaatttatacttgtgtaaaataatagtttctatatgtataattgtgtaaaatgaactcaaacattgtgttgtcactctagaaataattaaaagacaacattttttctacccgtgaaccctaacctaacaaatatcattcgatcaattattaccctttgtaaaaaaaaaaaaaaaagatgcatttttaaatgaatgtttactagtatatat

SEQ ID NO: 15659 - DNA, 3196 bp, Cannabis sativa
tgaggtaatttgctttattccaagttcttttttatactatttttttcccttctttcctgcatcactgtttaaatttagagcatagttgttccatttttagatatagtttttgtattgctcaagtatataccacaagactagcatccattccgaacattaccttcttttagtccaaatacacattaatgatgtgatgaagccctgtcttttcttgttctgtctttgtacatttcatcaagtgattaattttagatactggaagtttctatagaggttcattcatttttttaggaaccaacatcaagtgatcatagacatttgttggcattacctctctagattctttttcgatttgctttgcaattgatagtagcctgggcgttttaaaagtacaatcatatttcatgtagagaagtgcagtgtctccagttactgacattgaactgttggttatacctttgtaggctgtttttcctttttttttgtgaatcagcaattttatgaagtgtaacttgagtgcaatggtattccaatctaggtcactttttttttttaatgattataagtacttttggcctaaaggcttggtaaaagttttgcagaactacttgatgtcattttaaaaactggatctaggctttgtaaaagttctgttgaactcgttggtgtcattttaaaaattggatctcttagatctgtttttttgcccctgttgtcctcagttctcccataatttaagaacaaaaattgctgggcttcaccactactagaagacaattaaatagtttgaaatttaattggaagagtactaggctatcctatgtggaaaactataatgctgtgagataggattgggattagagattctaatgaaaatggtctaatagtcttacagtgctgctcagcaacacatcatacatacactcgagtgagttgatgatatgaccaaaagaactccagaaaacccaagggttaaggacaactttagtaaaaatcagaagagaatgggaagggacctttcttttgcagcttgggttcctagaaaaatgaaattttttgctgtccgtgtaggaaatattctgatctattttgtcatcatgtaatgtaattttaacaaaacaacatattcaattttgttggatctaggcaatggctcaggttggtggtttggtgatgctgcaaccagaagtgggaggttctcgggagaacttcttttttgctggaatcgacaaagttagattccggaaaccagtgattgctggtgacactttagttatgagaatgacactcacaaagctgcagaaacgctttggaatagcgaaaatggaggggaaagcatatgttggaggtgaggttgtatgtgagggtgagtttttgatggccatggggtagttaatgacttcaaacttttgttgtcaattcaccgttgctactacttcatatccattttatttttccaccaaatgtcaaccctctagtgatctttcgggcttgtttaccattcgatttgagcgttagtaagagtattaataaggacagtattcttttaagaattttgttcattgaaaagctagttgatgttattttatgcaatcaagaatttcattgctcagttacactcactgcttgttatctcagattggccaatgtcatcgtcagcgttggctaactcgtcttccaccacggatccatctaattggatagatgggtctgttactgaacttagcagcactatttaacccttaaaatggtttgatgttaaatttttgcaaggcttttggaaagaaatgaattgaataagaaatgcaaaaaactcataagaacttcacaattaagtcaggcatactttattatccttgctatttatctttatcaaataacaataataggggatttccctttttggttatgtaatctactaatttcttacatcttgctatgtgcaaatcataaagtttcagtatagttgtgttgtgagaatggaaagagaagtcgttcacaatggagaacagagtttgatcctaatgaagtagtgaaaaggaggtgtatggggtctggcctaacttttgggatgaaaactatgtataattttgtatggttttaaatttaatattagactcattaacaaaatattataattcataaaataatgacatcatctactaacttaaacatcaggtcttctctcttaagtatttatagaaaatcctcttgatagatccatcttcaaaccacattaatgatttgactaagccgatcaatgtgagtcaaaggaaaaaattaccaaatttgatctattattatagttaagcaagattctccaaggttcaagttactcctaactagtgttgtaaacacaagtgccataaatataggtccgatcgtgtcgtgtcgtgccgtgtcataaaagaatatgagtcgtatcgtgctgcgttcggatttgtgttgtgttttgattcgtgccatattttactttggtcggcttgttttcttatacgggcttaaatttgtgctttattttttgagaaatttacacctactgacaaaattttgaaataaatatcataactaacgctgatgtttttacgtgtaaaatatacctttggttctacatttcttttgggcaggtatatacgtggtggcgcactacttttttttttttttcattttgtacaccctagcttatttatttttatttttttgcctaagcatccatctacctcctctatattgtttttctttttacttattcatttattttgttactttttatgttaatgacatgacatcaacatatctctttcattttattttatttacttttgaaaaactttataataattttcaacttcatttacttttttctctttttttttttttttttcaagtttaaaaatattaatttttactacataaataattgtttagttttaagagttacatcattgtaattttttttaagatgattattatgtgagaagtatatattttttcatcatcattaaagaagacaattaagatcaaatgtaacattttagtttcttttatattttcttaacaaataagtaattaatctttaaacttaaacaaaacaaaatttaatatatcaccaacttgataggttactaaagtatttttcttattttatctttagatattacaagattaaattataaataaacttatttttataaaa

SEQ ID NO: 15660 - DNA, 2628 bp, Cannabis sativa
atttcttccatcttaatggaatctcattgcagatggagccactttcctatagacagatggactttgaagagttttgtgcagcagcaattagcacgcatcaattggaagctgtcgataggtgggagcagatagcttcgactgcatatgagcattttcaactagagggaaaccgggttatatcagttgaagaattggctagggtatgaactacgacgtcccttatagtttaactagtttaactgggtataagtgaaaaaagagactcatctatatctttttgtcgatgatactttttgacaggaattgagtcttggcccttcagcttatggaatcctcagagaatggatcaactcagatggaaagcttagtttgcttgggtacactaaatacttgcatggtgttcgcagctcgaacacaagacatcattagcatcattcatttagcctttggacatatacacagagttcttaaaagattattggtttacaagggggtctccggtccggtatttttttttttcgctcccttgtcttgtttgggatttgggtaaaatggagaaaagaaaggaaaacatgcacataaatgaatattttagtgtagcaaagatattggatttgtaattcaattttagattaaaactatatcccgtatgctggataccctgtttttcagatgatagcaatgtaccttgtacaataggtttgagctcaaatagtgacagatgatcaatctgtgaaaggcaaaacataaataatgtagctttctatattctttgttgttaatgaaaatgtttgacaagatttcaatagacactcattgttccccaatgcatctatatatctctcaatattgtctttttaactttagaagggacaaaataagatccgaagagtttatatataatggactcacatgctcgtaaaaattcatttacatggaattagtaaacctaacactcccaaatgaattgacatgagtcccttaaaatacagtatcatttgctagtcttgcttaattaagctactttacttactttctatttatgtttaacgagcatttccatacattatagccattttgagtccattttcaaacataatggagcagacatatatgtatgtgttaatgattaatgttcccactatctctaaatgaatgtgaccctctagatatgacttgaattatatggtataattcaaggttggtgtctggtcaatggactacattgtttggtaatgtagtgataaataataataaaagtatgagagtagcaaccaaatgtggtcaatgacattttgtgatgtaatcaatctggagtggtatgtggaaatttttcatcagaatatcactttatatatctttctctagtggaaggaagctaagaagagcttctgtttttcatgcacaccagcaaagtggactggtcccatcgtcatgattattggtttgttgaaaacacattaatcaaattccaagtgctaaaaaaaatcttcactatgcagccaatgagaatgatgctgttttgtagccgttgaccctctctcaattttttcttttctttcttttcaatatatatcaacagatagatatgtttcatttaaaaatgaaagtaggtcaacgacaacgagttgaccttagtaagtgtttaacttataatttgttcgagtgagttagaattgatctactacccttagactttttcaaagtttgtgtggccacacatattgaaccaagcagttatgatatccaataattatcttcttgagtcaactattatctagatacaatagatttccaaacgtagtaacattttcgtccaataacaagtttttgttaattaactcgtgtgtaaatcatgtttttattttctagaggttatgaacttcgtccaaagatataaaatatatagccacagacacaaagtgtaattgtttttttttgagtaaaaaaccgaaattatatgactagtatacagtctacgtcttttatatccctacagtttaatattaggatgggatatttttcataaatatagaaaaatgatttaaaatttacttttatataacgtaaataaataatgtaattgttgtgagattaaaaaaaattaaagtttaaattatgaaaaatcaaataaaagactataaataagtttgataaaatttctaataacaaacatcgctaaaaaagtcattagagaagatactgacaatggaaaagtcatcggtgtcgaaaattgttgctagaaaagtcatcgtcactaaaaaagttatcagaaaagtcactggagttgtctcgtcatcgaaaaaggcgcaagagttaaatatcttagatataaattaaaatataaccgattctataatataataaataaacatacacaataactcaaaccggttataattaaataataaaaaagaaattagttcataaaacactcaaacataatttaaaaacaaaactagttacacaacaaaatgagtaaaaatgaatcacacataatacctcataaaccggttataatttataaaaaaacaaggtggtcatttccaaaaatactaaaaggcataaatctaaacagaatcagtttcataaaaaaaataagtaaaacaaataacacacaataactca

SEQ ID NO: 15661 - DNA, 6915 bp, Cannabis sativa
accggtccaaaaaaccgtttgtgatccgttgtgagccaaagtgccgccggtccaaacagatacttccgctgtctcccctttaacctctatttgcgacctttcggccaatgtgcgccaatttctagtgctgggtctttaacctgtttcaaaattcacaaatttcctgacgtgtacacccacaagtttcccgatatttgaccttgtgggattctttcaaatgtcacgttcggtcatgtggtctcttaaaggtcgttcgttatacccacactttctaagcccaaacgtgaggagggtgtattaagagttagtcccacattgctaatgcatggaaataaattgtgatatataagataaaatagctactcctcccattgccaattggttttgggatggaacctcattcatcttattcctcaaattctaatatataatccaattcaatataattcaatacaatacgacctatgacgttacaaacaagcccataatgtagagagcagtaagctttggatacgtataccatgtatgcatgtttgtatgtcatgtaaaagtaaaactactaccaaggcaggcccccaagtgtttttatcgaaagtaataacacattttattaccgggcagaaggtaagcgcatatacaccttatcttgtacatgaaatcttcaacaaaatggaataaaacattggcacaagaaatcaaaattgacacaaccagaaaagctatatggctaacaacagaaagataatgtacaaattatttactctctatctactagaggattagaaaataatccaccagtaacccttgtacaatgaaagcattaggattggtttttgagaaagaaaaaaataataattattatcttattgaatgtgttgattagttatggaggcttctagggctagttctttggtaattagtctcagcagcacttgcactgcttctcgtactctagtgtctctgttcatcgaattcacaaagaggaaacagtaaggccttagtcttgtttgactaaaatattatatgttagtgttatcactcataccttgaaataacaagttcgcaaagggaaggaaaaagaacaagtaggtgagggcgcctgtcacgattatttttctccaccagaccgcttttcaaatagggatgtaaaggaagaacagatgctgtgtctgtatgaattaccagatcagccagttcatttaggacatacataatttcatctagtcttgcagctggtagagggcaatcgcctgcacacagaagcatatatgattcaaaatggcataacacatcaagtgaacttgaaaagaaaattgctgcagttaacttcattcagttgcagatgatacgcacccaggttattctcatcaattggaaatctctttaaaatgtcttcgcatctgatcataagcagcaaaattgagatcttgctaacctcagatcgttctgaactccaagtgtcagctttcttctcggaactgtaaatgacataatcatgtgaggtttttttgggagggaaacaaattgtattagtaaaagtgaaataaaacaattaaatgctacgtggaacaagaaatccacatgtttatagcacattccaaatctaaggaaatctaaaaaactttatataggaaacccacaaagagctccaatatttaaatgatatcccacaaaacccacttccccaatgtttggtgtaagagttttacttagtggactttaattgggaatgattgagattaagggaatctcaaaactcaagtgtttaaagagtttgagaataccttaaaaataaatttgaaaatggaatccacacaatcatataccttccactaaaatcatatcaaaccttacattctcattcccaagaatttaaaccctcataacaaacagaaagagctcacttgtagatatatcagctaaactaataccaaaattgcagcttttggtaaattaactgctcgatccttcctagtaaatcacccatataactcttcactccccatgcataaatagattatccaaactctcagcatcttcttaatgtattacacaccaatcagaggatataatcaatcatatatgactttcccctacaaattaaattaaggatatttaacttacaatacactcatggccaaataaactatggtggcaccatgaaccttccaaatagttctataaggttaaactgataaaagctaattcattcattaaacaaagtaaaacaatatacaactatctgaatacatcaaataaatatgtatataaagggtgtgtatatacgtacctgctcagaaaaaataacttctgcaagcacgacaaggaaaatctgctgcaatgtaagggcataagttctactgtctcaacaggtaaagagcaggttcgtgatgcacaacgatccaatgtggtaactagtctttgcaaaatctgtggaaaacaaagacggaaattataaaacagacatagacataccattgaagccctatgactcaagtttaagtgaacaagtacaacaataagctgcactaaaataattatatctaaacattgtttgacggacaattttataatattcatattttaccatgaatcgagcattaaaagaataataaaagaacattacatcttgaggtgcatcaataggtgacttgagaatcttgtcaccaagaatgtctaaagtggtcatttcaagggactcatcagctttcactactgcagtagagagagaatcagaagaaagagcccgcccacaataacccacaaagaatatttcgtacacatctgcaacttccttccatacgcgtgttcttgcaggcttactaatactagaatccagtcctccatccaaggccgatttgcaaacatcatcaacaacaatgcgattaaagccttcaacagctaatctccaaagtgcaccattaggattgtctcttctagtagtcatagacctaagaagaacaaggaaacaaagatgctaaggatgtgcctttgtagtgttaactacgtctatgtatgacttattgcagtgccaggaacacgtcctcaaaagggacgttacatgaatactaatattaattggtccaacaatttatcaactgaagtttgtaagtcaaagatttaattaacataatggcttatctccaggttctcaaaaaacagctgggaagcaacagaagtttacaaacagaaaatcaagtatctgtacctttctagactttgaataatttcaggatatataatatacttctcaactgatggtgtttttaagaaaagatcaaccaacaaaggaataagcttttctgcaaacaaagaactggggacgcctactgtgacagctgtacttgaccgtgaacttgaaattttagcttctctctgatgtgaggatttggacactgttccatttgatcttccatactttaaccctaagttagtatctgcaaaaattattaatcactttgaatttctgttgtaagatgtaataattttttttttttaaaaaaaaagaaaagtacaatcaaggtaatgacatacctggaattcggtcaacaatgctggttggccctgcctcatcttcctcatcctgtactggggtgtctgatcttggcagatattgcagaagatcccgaagaagaattagccacattgaagaaaagtgctcagttggaaccagcagaggtatgatctcaagtattgtgcgtaatacgtgtgaaatgtgtccctagtgaaaagcaaacattaaattatagaacagagtttttatcaagagaataatacaatgattgtggtatccttctcgttactacagctataagtataactatctcaagaaaatgaggcttagttcatgatctatttaacagcaatactggaacagcctaaaataaataatattctgaatgcaaaattatactggtaaacgcacatgcacacgctttataggtatgtcaatttctccttgttgcataaataacagcaaattggccaagcagtagcactattacttaatttggccaaaggggggcacacagaaaagggttgagtgcaaaagctcacttacaaattcactctcgaagctttcatttgtagcaatggcctgcttgatggaaaaatctacgatcccaagcaattgagtatacaaacgaacatcaaacattgtttgtgcttgaacatataactcccctgcacatttccaaagtagacaaaaaattatttctctaacatcaaataggtacaataactaaagctgaaatttatgccaaataaagtcatcaattgatagataactgtaaataaaaagtattaacaatatttacagggtatttcagataatgcatgtatctctgcatcataaaaaagatgcacaggtaaatgatcaactatcttgctcaattaattcattaccaagaccatgtaaaatctcctgcttcaccttgctagctgtgttaccactgtagtttgttgacttctgaataacatgctcgtaggtattaagtactgatgtaaggtaaggcatcggtaagtttccctgcatgacacaaacttgaaaattttaccaaacaatagaagggggagaataaaagagtacaagaacaagaaataacatattcacaaacaagacatcctccaaaaactacaacaaagcatataaacaaacaaaagactcaacactaaatcattcaaattatgcattgataagtgcagaggtctcatgtctccaagtacacaatttaacatgtgaacaaacaaccctaaaatttaattcttttcaatattaactcaatgtccttcaaactttcttaagcacagcacagtaatttcagcactattattagcataactggtacaccatatgttctcacaaactagccaaaaaattcaaggatgaaaaaacaaaataaaacacaaaaccagatgtattcagggaaaaacagagccaaatttgataattaccttggaagagtgagaaagaacagttatttgcaaacagcttattgctgcaagagcaacctctttactatcatttagaatgctattgtttacaaattgaaccaaacattcccatcctgaataagtgcaatttttgtgttattttcataattgaatttcgatttattgaaaacataaaaaagcaagagcatcaagatctgttagttggtctacctgagcagaaactcttcaagcttctgagtaaagggaagaaagaacgcagaatacgagctattccaccaagaataagtacaagtgtttcatcccactgtttctgagctgtgttgcgactgaattcatttaacataaaaacatttaatactagatgagagaaatataaaaactttactagatccttctctacttttttctttcaaatgcgtttatttttttcaaaatgaggtttgacagagatcaggataataggatcttaactatgtacctatgatgtatgagcatgtggacagcttttccttgtcgagttccaagttcttttccttgccattcatctttagatgaggttgcaacctaaaataatacattcagatcacaacaacatatgggaggaaagaccccttaatcttttataaccacttttcaccaaccatgtgagaagcaagatccaaagtagaaaaaacataattctgcaggcaatcctcccacatgctttcggaaagtttctgtccatgacttccaagagtctgaaaaagtgtcctcaccgcagaattcctcacctgagtatacaataagatcatacattttttgtttgactgaatttaaaaaaaaaaacacggaacgatatacacacaataatgtaagcagaaactggagtgccagattaagtttcagcctaaaaataacgctgaaagtgtaccgtagacagtaatataagatgttatgagttagaatatatttatctcccacaaatgtaatcatgaacaacataaataaagtacaaacttttcacccagcataaaatatgctaatttaggaaattgaatatttttattaaaaaaatgtaggatgacgatcaactaaatctaaaaactttctgtcaccaattataaccaagttatgaattcatcatgcattgaattgaaaccaaaaaaaaaaaaaaaatcatttagaaatggtaagtaaaccacagatgtacaaatctgaaatttgtgacatttatgttgaaaccttccactggcactgcaataatattatcaaataccaaaacttagtcgccctacctctggtctctcatcagctccaaggtttttaagcaatgagaaaactgagaaaagcaacttgtcatgttgaacaaaggaagcttggtccaacacattgagtgatttttcttcgggtttttgaacatccatttgctctgaaacagagtgcccatctggtataccattataaaagaaaaacattaggaaagaaaattatgtacacaaaacatttacaacagtaatctgcaataacaagaattcctatacctgtttccgtttcttccatggatccatgtgtaatgccctttgcaataaagtcagttgtagtccacaaaagacctatggctgtcaagcttatgttaagctctgtcttttgagcactgtaagctccagtcacatctacacagctgcaatatttgagtgtaataatggaatcagaccaacaattatttgaagccgtagttctaggtcttttttaatatatatccataaattgccttgtatcaattaaaaatgtaaagaaaatggtaattctaggtttccatgttccgagtaaagaaattattaactattactcatcaatgtttgtaaacatatatgtactttagacatcattgtccacatctatgtatacttacaaaagcaccaatcaagcaattacagaatatatatgtactttagacatcattgtccacatctatgtatactt

SEQ ID NO: 15662 - DNA, 5376 bp, Cannabis sativa
  modified_base (27)..(29): a, c, t, g, unknown or other
actaatcagattgtaaagagttttatnnngggcataaaacccaacatgctccccctactgcctctccctttttatcctctgctgtcacgggccaagaaaacacccctgcctaaaagacaaagcgattccctcactatgagacaattccttaaaagatgtcgcagccaaaaagctgctgttgaagcctctcccttgtcccagggagaaggatcaagtcacaatgtttccttagattctatattcggatgactttgtggacaattccgtgaagattgctttgcaatcccgtgagtcattatgaaaatccttagttggaatgcacggggtttggggaacccgtttgcattcaggaatctccagttgcttgttaagcaacactttccccatgttttgtttcttatggaaacaaaactaagttagaattcactcactagatttcgacagtctcttaatttttctcataggcttgaggttccaaggaatggtttaaaaggtggcctactgttcctttggagggagaatcttgatgtcactttattaacatttgatcctacttatttcgactgtttcatgtccgaagatggatgtcgaacatttcacttttttgcaatgagtcccaaatggtgaacttttgttcggctcttactcattgttctttacacgagttggaccataatggtgatgatttcacttgggctagaaacagacaaagtatgaattccattaaacaaaaatttgattggtgctttgtaaatcatctttggggctccaccttctcaactccacaggtggatcatcttgactactaccactcagatcatcgtccaatcgctgctacgttctctttgcaacaatcacaacctcctactcataagcatcacaatcgttttcgctttgaaaaattgtggttatctgatccggagagtaagtacattattgctcgttggtggaatcataatatacctgactcacccattgcaactataattgacaacctgacctcctgtgcaaaaaatctacagcagtggcatatagggaaatatggtaaaatgaagctgaaaatttctacagcacaagcaagagtgactgatcttaataattcagttgtctccacaccagcacaggttgctgatctcaaaacttctaaagctattctagatgaactccttgaacaagaagaaatctattggcaacaacgctctagagttgattggcttgctgcgggagattgaaacacaaagttctttcacgctaaagcttcatctagaaaggccaacaataagattaaaaagctctatactgcagcaggagaggtgaagacttcaaagactgctatggctggtgttgtgcaaagttatttccaagacatctactccaccactgccatcaatgaatctgctctgtaatataccttaaattccatccttgccactgtaacttcgaatatgaatgagcatcttttaaagcctttcacggctgctaaagttgaggctgccttacaatccatgtctcccgataaaagtccaagaattgatggtatgtctgcaatgttctatcagcgaaatcggaccatagttggtcctttggttactactgttgttctcagcgtgcttaatgaaggagtcaatctgaaggatctcaatagaaccataatcaccctggtgccaaaaattaaaaacccgaagtttgttagtgactttcgaccaataagcttatgcaatgtcatttccaaactgatctctaaggtattagtctcaaaatttaagcacatattacttgctgtgatcaatggaacttagagcgcatttctgtcaaattaacttatccaagacaacattttggttgccttcgaattggtacatgctatcaagcacaaaacaaatggtcgaaatggagttgttgctatgaaattagacatgagcaaggcatttgatcgtgttgaatggcgctttattgaagaagtaatgaggaagatgggctttacaaatggctggatttctctaatcatgacctatctcactactaacagttttacttttcaaattaattgtgaattatctagcagccttgaacctacccgtggactacaccaaggttgtcctctctcgccttatctctttttgatctgctctgagggtttttcacgcctattgcaatatgaggaaagtttgggcaatctacatggattctctttaacacgtcatgcgccaacggtgactcacctattctttgttgatgacagtctccttttttgtcgtgcaaatgacaattcttgcctggctataaagcgagttttggatacttatcgagatgcttctggtcaagtgcttaacttggataaagcggtcatgtccttctcaccaaatacaacgctagcagctcaagttttctttcatagacagcttgcgattcccataagcgagtgtcatgaacagtatttgggtctaccagcttttttaggaagggataagaaggaactttttagtcatgtcaaagaaaggatttggaaattgatgcacaactagaatgagaagattttctctactggaagcaaggaagtactcctaaaagctgttgtacaatcaatccttacttacacagtgagttgttttcgcttgccaattactttttgcaaacaacttgaatcgattatggtgaacttttggtggggttctaatgcaaatggcatgaaaattcattggtggaattggaacctgatgtgcaaatctaaagctgaaggtgggttgggattttgttctttcattcattttaaccaagctctcctggccaagcaagcttgcaggatttttcagaaccccaattcacttcttagcaggcttctcaagtgtcgatacttctcaagaaaagattttttgacggcacaacctgggcattctccatcactgacctggcagggcattttatggggtcgggatctactagtctctggtttacgatggaaggtgggagaaggacgacacatcttatgtggtagtgacccgtggatccctggacatgaaattttttatcctctttgttattatgggccatctactggacttgttgctaacctcattacagatgaacgccaatggaatttggattgattacagcaatacttctctccacttgatgtctctcggagtttaactatcccacttagtttctttcccaacaatgattctcttgtctggcatcaccatcatacgggcctttatacagttaaaacaggctaccatttggctgcagaccttgacaataaagacatgtcttcttcttcaacgtattcaggctcatggtggaagcttttttggtctttaaagctacccaagaaggtaaaaatctttccctggaaggttatccatgaagcactttcggttgctgtaaacttggtcaagcgcaaagttattacagactccacatgctcactttgtagacaggcatgggagtccataggtcatgcccttttcggttgcaactgtacacactcggtgtggctacactcggggtttaagttaaattggcatcagtcttcaacaatggtcaatggtgattttttggtttttttgtctacaatccatagcacatctgagcttgaacatattatatgtgttatgtggacaatttggaatgaacgcaacaacattgttcatggggggaaagctaaaatggctgctacacttgctaacaatgcaaccacctatattcaatagtatcaggatgcacaagggaaatatgacccaactcaagctgttgcaactcataccctgctgccatctccctctcatccacaacaaccatggttgcctcctaaccaaggtgaattaaaattaaacgtagatgcggcccttgatggaacaaaaaacatcataggagtaggcgccattgtacgaaactcacttggttctccagttactgccctctctaaaccagtcatgggtaatttctcctcccatgagatggaagcaaaggctctcttccatagtctgaactggatcctacaaatgtggctgcctgttactcactttgagatggatgctttgatggtttctcaagctctaaatacttctttcaatgccatttctagttttaaagatctaattgtagatgtatctggtctcttatcctttctccttagagctactgttgtacatgttaaacgttctgccaatatggcagcacaggggttagcaaagtatgctttagagttggatgaggcttgtttttggacggagttatttcctccgccaatttactctgttattgtaaatgaccttccttaatttataataacaagtaattttctaaaaaaaaaaaatataggattgcatatattataatttgttttaaaaaatatatataatgaagtgcggattggattggatcggttattttttaaggtcaaacaacatctaatccgcacaagtgtggattttagattttcaatttaatccaatctgcacaagtgcggatatccgtattttgcggattggattggattggatcatgcgaattggatcgcattggatactttatgaacagccctacatgcaacaataagaaaaaaaattagtttctaagtttaagaagttattgagtgatagttctttgtactgtctacaaaatttaagaattgtggcaaccgtaggtgagtacaggtcactttcaaataaccataaaattttattcttggttacaactttagtagagagactagaaggagaaatagttaacattccgatcaatgagtttcaatttataactccaaattcgactcatttaagcttaatgataacacaatactctcaagtatttactcaagtgttaacttttattgatatttaataaatttattcaagtaataatctttataatattctaacattttttattattttatattatatatatatagatattattagataattatgtggtgtcggtgatattgacattgttagagatcgttataaaaaagagagacatcaaaattataacaaactagtaagtattgtaatttttttttttgtatatattttactttatttgtttttcttttttacttattattaaattttgttaatttttatgtatagtttgatcacattaaagataactttatgggaaaaattaggtgagatgctcaatccaaatttatatgagaaagatggtggtccattcactactacaagtcttggttttagaggtaatttttaaggcctttcagcgtcaattttagtaaaattaattaccgacgctgatccaaacgacgttataggatcgaacataattgacgctaaagtgtactgtatgactgttgtgatattttgcacacgcaagtgtacatatcggtacaagtagtaaactcaccaggag

SEQ ID NO: 15663 - DNA, 24762 bp, Cannabis sativa
  modified_base (19101)..(19102): a, c, t, g, unknown or other
aaggaatcaagggctagagatcatgaatggaaggagtcattatattttgttgtaaccaatgtaaggttttctaaaacgctaatgtgttaaatttcattgtttttgagatattcttacttaggatgttaattcaatatacctattagtaaatctagatcctggtaaaatattcccaacagtggtgtccctatagattagggctttacaaaagtaatgattagagatccatctaaccctaatgactaagaaaactagccacacttgagaaataaagaagaaagaagaagaacatgtgaaaactcttgaatgcagcttcaaattgctattttgatctctcagaagtgtttttctcttctaaaattgtatttccccctatgtaatcgtctagagtttaaatatataaatctatttatagcccaagaaagatagaaaagataacgtgcttagaatttggtttaatttgaattctgtatggccgatgctttggcgcctaagacatggggcaagggcgccatacgagatttcttaaggttttgaatttacaagaaaataatgttttttttgtttttttttcagttttggcactatagctctataattacggcgctacagcaccaaaagcactttttttgttatttttcttaactgcttcaaccttgttctataaaacatgcataactctcgtgtttggattccaaatgaaatgacattacatattttggaaagctaagaaagaactccttcattttgtatttcacaaactcttccaaaaaatgatgggaacatagtcataaattagctcaaagatctcaaaccatcacaaactcatctcttaagcacaaacctacaaatttagagaaaacacatcaaattgaaccaataactcatggaaaaaaaaaaaaaaactaaaaataagaataaataagagtaaatgaatgcataaaatacacattcttcacaccccaaacttgaatgattgcttttcctcaagcaaaggcaaaacgttaaaattaaaaataattcaattattagtatgacaaaaaaattttagacctatggaaatttatctgaaatactaaactctctttcaatcattcaacttgcattcaaaccaaggattagaattttaacccaccaaactaaacttcaaatgttacctaattattaaagtgtgtataggtcaattctacaaaccctatatacatatgactcatatgcataaagactcatcataccataaaacagtcaagataactataagcttgcataattaattcatctcctttaatgtaaactaaagtcatgtagatcaaaatgactttataggtatgtaacgttagacttagataaatagtgaatgagaatgtcatttaggctaattttacaccatagacttacaaaaaaaaaaaaaactaaaaaaattcaagaccttcattgtaaatccctttctctctttagtatttttcacttaatgctttcttttttgcacaattaaaatttataatcctctaaaattaatctctttttattaatatttttttttcttttttcaacatgaattctttctcttattatttttcttcttttttctttgagatatttcaatatagacaattagtcataactcactatacatacatccttcacaaaaataattctcataaaaatttctcatcccacttacatcatatatttcatttagtacacaacaaccttttatggtatgatttagagcaaggataatttgcttaaaatttttggctcaaacgattcaacaaaaattgccttatcatctctatataaccaagatttaagattttgcttcaaaaaattgatcacacaagttttatttttctcaatattaaccaaatcaaataagtctacgtatatataatcacaaattatataaaataagtagaacaacatataattcatataacaatatcaaaagtaagcataacatcttaagcacacaatccgtaagtactcacacatactaaataacatcaaggagtttagtgtcagttcatcatcaaatcacataggtcataagtcaactttagtagtacaatcacttaataatataaataaaaactttaaaactatccatacaactcaatataataataaaaacatgaaaattgccttcctccaatttttttgattcgttcaggggccgtaccgacacttcaagtctgttagggaccatggctggttcctggtctcgtcctaagacccctggctggtacttagttcctttccaggaactctatccagccattctaaggctaattcttccctggccagttcttggtggaatttttagaacctagccggttcatggtgaaagaaccataagctcgccagttcatggattaacacttcgtgggctagccaattagtacccacacgtgttggcatattatctcatgtttttatccttgtcttattcgtgatctctttggttgttcacctccctttgtcttttggtatagatgaacatgcatgactattggagaggtgacaattggatcgacgaggacttactttctcttctgtacgaagactatcactcagctgttcttcctctgagagctcatcagacaactctttaagtgactttgaagcgagcagtggttcttcgaaacttaaagttcaacatcgccactactttgagtgaataggtgatgagatctacgggagtatcatttggaaactgaatcgggggtggagatagttcatgcctaagtcttggacgtacattatccggtagggtgtgcctgacacattgccttttggatgggcatcttccgcgtctagagatcttcctatagcagcagctactgtgactattgcccagtactctgagaaacattcaaacctgacaagaagaaaactcacctctgaccgatccccacattgccaaactcatggcaagggggagagtttgtcaggtagaggaggttgaatagcttgaggctagccaagcgaaagagcatatggccgacaaagaggaggaaaagctaaaagtttattaggcagagcctgaaacaaagcctagggctacttggaggctccctaaggagtgaaatgtgatccatggcaaccccctgggctcttatggcgaggctggagtgcctctgaacagtaggggtaaaccctcgaagattgggattaaccatattgaggatgaggttgctaagccatggattctttagatgggtgaatgagatagttgggtatctccttgttctacattatcactaccaagcttgacgacattattgatagtggacttgttgggcaggtctagtgcattaggcctgcccaggaccacttggctcaccatctgtagccaaattggatagcgtggtttggcccacatgcagagcagggtgcgatgcttcctttgcacctgtattttagggacatagcaaacttcttcaagctatgtccaacttagattgcacaaaagagtatcaagtacctgttggtaatttttgtgttatacgctgagttaggatggccacaaccttcacctttcgaggtgaaatattacttagctgaaatccaatctaagttagaataggactaggtacttttactttagctagcatggctatcagtatcttggcgacactaatgacacgaccatgtcaaaggttggggggtatgccagaagttactttatggaatagaacataaatggcgtctgttagttttgtcacctagttccaacttaaaattggccattccccacattgagacagagggatagggctaaccatatctatctctcccagtagcttggtgtaacatttgcacattggcctatgaggagaacttcaggaagtatggtttataccctcctattgaggatgttgttgctctagataaccctcctaaggaccctgacaattctcttattggaaaggagaaaaccaaagggaagagactcactgttgaacaggaaaagagaaattctactaaggaagcctctttggccaagatagcccaaaaagagagcagaagggaccacactctttggctgcattttatttttgggggcactgttggtgatgctctagttttgatcaaacctgagcggtagtggcctacaaggcctgcctagcctgcgccgacagacaaaggcaaggggaaggccgtcatgactaaagatagctctagtgagtcctgttttgaggacgagggacctttaggtggcactccttcggtagatcatcctgaggacactgacgatagtaacccttttaccttttcttgcattttatattaattacttgtatgttgaccttgttatttttctttttatagacatgatctctagaataaaagatttgatgaggtgaccattgaacaacccttatggagggcgtctccagtccaaggttgctctgacggggactgcatcagatgtgacccaagttcctttaccgccacctccttctggcccaccaccatccaatcagcctattattcgagattctttgcccaggacaactcttcctcctcctcccaagacacttggcaagggcagccagaaacatagtcaggcagccataaacatagtcgggaagcctgctccagcaagagtgagaaggccatagaggttgtccaaaactaccttggcaagtgcctaccaagtgttgatgaacaacttcaggggttggatgatgattccccagactacctgacagccagcttcttgagagatggggcatttgtaagttatcttattatttgctcaactatttacttcatgcattgtacaactctattgatcttatttcttcttttttgatttcagcttctcttgaagcttggccatgctcatgctagggcaagggctctggaacaaccttcaagaagaaattagaatgcaaggatgctaaacttgcaacaaaagatgtgcatcttgctgagcttgacaaggtgaaggtcgatctagagttggcagagaaagagctaagagagttgaaggaccagtacaacggcatgggccagcttcttggtactcctaccaaagaggtgactgaactgacctcaaagaatgtcaagttgaagagggagttggaggctaccagtaaaacctgccatgataggcaggttagtctttatgtagctttgtggggtcaggacgacctcatagctgagttttgtgacttggccatggagactttttatgagtgttacctccataatcccgggggtaattttttttatgttgagtattctgattgcgagggcatgatttcctagggcagggagttgtatgagggtagaacaaccaaagagagtactccaagagtgtcttctagccagcctcgctaagcttctaatggtgtataggccagccaggttggggaggctggccaacattctatggagacacatgttagccaatatttggcggagatacatgacagccaggtttttgtcaggtaggccattaagggggctgcccaggccactgattctacccacgaggctcctgttgctgaggctgccacccaggaatcacctgcgcatgactcacctacacttaacaacattgaaaagctttagttttatctttttgtgcttggttttttttttcttcactttttctttgtttctacctggccctggccttatgcatttaaaacaatgatagttcttgtattgccttaaggccttttactttcgaactagtgcccgaccaggcagtttttaatcttggatttatcttcttttggttttttaaacatgtagctaactgggaagcctttaatcccaagtttatacattttatgttcaccttgaagcatgccgtttacacatacttagctattaatttttggctttgatgaagctttaaatttttttgcctatgtatatttgtgcttgttcgatgctgtgtgtgggtgcccccaagtgatcaagcaaacttttggtctcttggtcacttgcaattcaccaagtatatagatcctttgcttgtgcatcttcttaggaggattgttttatacatatgttgaactaaaaataagaattatctttaaaaagctaattcgttagcaagttgtttgacacaatttgaactggagaaacatctttattcattaattggtcttacataagtgttgttactatgcaacatacattttttaagtacgaaaagcttgcaaatacaatatgtttttaaaaccatgttttggctactcctgcgcgacatactgtgcaaaggccaccactaaagagtggtggtcatatagctcttttttgaattcttgcacagtgagacattataggaactgctactgaagagtagtgttttgtacaagtgggctactggtagtactttctgagatgttctctattccaatatcttagtaggagaaccaattccattttctcattgtaccggtcaagtttgtacgcacctttacttgtaattttcgtcacttggtacggtccttcccagttaggtccaaacactcctactgcagattcttttgcattcaggaatgctctttgtagcactaagtctcctacaaagaatttcctctccttgacttgggtattgaagtacctggcaacattttgcaggtaggcatgtagttttaagttagcatcgtctcttctttcttcaatttcatcaaggaattctggcaacaaggtgtggtttgttccttggtcattggataatgcaaagggtgtctatctagtggtcgtcttctcggtgttcctgtgtgaccaaagtacctctgggaggaggttgggccagctacctttttcctcttctagacgctcttttatagtgtccttgagggtcttgtttacaacctctacctgcccatttgcttaagggtgtgcaactgcggagaatggaaagcatctttgatactatgctccttgcagatgcacgcgtaccagaagatgatctcataatgagcattcttaatgtccttccagctgaatatgagtcatcaacatcattctaagtcaaggaaacttgaatgttcaagaagttcaatcacttatgttgagtcaagagaatcgactccattactggcacactcctggtgtgatcaaagttcctccctttgccaatcatgctcaaatcagtcatcgaggtcgtgactccaattcaaatcaaagtcgtggaggccatcgtggtcgtggacgtgctcatagatctttgaaaggcattagatctaagatcgtgtgccagatatgcactaaacatggccatagtgccatcaattgttgttatcgtcatgaagaggattctccaccttattctcagacatcgaatggagataacaccaacactaagaattcctttcttgctacaccaaaaaccgttgttgatcccgcttggtatgctgtgcgatagatcacattacctctgacctcaacaatcttaatctgcaaaatgagtatcacagtcgtgagaaactcatggtagaaaatggtgaacttcttcctatttcgcacactggtactgccttttcatattcaccttctcataacacaccaattactttacatgatgttttgtgtgtttctaatatcaagaaaagcttaattagcatttctagactcactgcagataataacatctttgttgaatttcattctaatgtatgttatatcaaggacgaggtgacatgtcaatctttggtggaaggacagcttaagaatgggctctactctctctatcctagtctagaaaagtctccatgtactaaaccttgtgtgactcaattgttcaattatgtttcagctagtgatcagtgtaaaaactctagttcttctaaatgttttagtactgttcataccaacttctgtaagtggcacaaaagattgggtcaccctacaataaggctgttactcaattagtcaatgtacttcctagttataatacaaagtctcaatcaaataaagctaaattttgttcttcatgtgcctatggtaaaagtcatgttcaaccatttaaacttgcaaaaaataaaaccactcaccccctacatctcattcattctgatctgtggggtccttcccctattctatccaaatctggctatatatattatgtgacatttattgatgactataccatgtatacttggatttttcctttacaaaccaaatttgaaaccttatctgtgtttcaaaactttcaaaagtaagttgaaaagtattttagtcagtccatcaacttgtttcaaagtgattgaggtggtgaatatagaccattctctaatcttattacctcacaaggcatattgcaccgcaaaccatgccttcatatacatcaatagaatgatagaattgaacgtaaacatagacacattgtcgagagtggtcttacacttctcgctcaagcaatgatgccccttcatttctggtgggaatcatttctcacagctacatatcttgttaataggatgcccacacatgtgttaaaagggaaaagtccctttcaatgtttattcaactctactcctgattacactttccaagagtctttggatgtgcttgttatcctcacctaaggccctataactcacaaaactccaatttcattccacaaaatgcttgttcattggatacagtcctgaacacaaaggctactattgccttcatccatctgtccacacttatgttactcgcaattgtctctttgatgaggaagagttttcctattctacactttttcctgagtcccctaactctaccttagattattttgagtatagcacagatcttggttttgctccttgttttcctatgaatgctctaagactacccatgagcccactccaacaactgttccttccacacaacaagctgctgcaacaactcatacacaaaatgcaccaacaattcagcttcagcaacaacaatgatgttcaaaatgcaccaacaattcagcttcagcaacaacaatgcaacaataattcaacaacaattcaacatctatacctggtgcaactcacacaacttcttcttcaacactagccactactaataatactattcctcatgttactgagccttcaccaatatggccttttcatctgctactgctactatttccaatgatcttactgtctcaacacagctgcagccagctcccgttaatgcctttgtccctgctcttgttgctgcttctggtgttcttctagtcccaatcaactcagtagctccctcacactatcagtcagtagctggttccacacatggtatgcaaactcgtgtcaagtctggtgttatcaaacctcaagttctagcagctacaaaacatccttttattgttaacaaaggaaaatgtgagcctactactattactcaagctttacttgatcctaaatggaattcagctatgaacaaggaatttagggccctagttcaaaatcatacttgggacttggtacctcctgatcctctttacaatgtagttggcaataaatgggtgttcaaagagaaatttaatgctgatgggactgttcaaagacaaaaagcacgcttagtggctaaatgattttaccaaactccaagccttgatttctatgagacatatagccttgtcatcaaacaagctactgttcgtatctttcttgcaatggtcgttcactttggctgggagattcaacaactcaatgtggacaatgccttcctccatggtgtgctaaaagagacaatgtatatggttcaacctgaagggtttgtcgatcctcaatatcctcattatatttgtcatttaagaaaggcaatttatggacttaaacaggctcctcgggcctggttcgagaggctcaatacatctcttctacaatggttgtttactccctctaaagctggtgtctctcttttcatttatcacaaaaactctcaactcattcttctccttgtctatgtcgacgatatactagtcacaggatcacatctgtctctcatttccaaacttgtgacatacctaaatcacacctttgctctcaaagaacttggcccacttcattattttttgggcgttgaagcttatagagattccactggcatctatctatctcaatctaagtatgtggctgatttactcacttgactcaaaatgacaggagctaagacttgttccactcctgctgcacctagacaaaccttgtcttgcaatgaggaagaccaatggatgatcctagtatctatcgtagtaccatcggggctcttcaatacttggcactcactagaccaaatattgcttacattgtgtcgaagctaagtcaatttcttcactaccccactacagcacattggcaaggttgcaaacgtgttcttaaatatcttaagggcactgcaacacatggagttaacttcaaaaaaggatcatctcgaacactggcgctgcaagatttctcgaatgccgattgggccagctgcctagatgacaaatggtccacgggtgcctattgtgtgcatcttagctcgagcttggtctcttggagttctaaaaagcaaacagtggtagctaggtccagtactaaatcaaaatacacccttgctcatgtcacagctgaaataatgtggctcaaaactcttattcaagagatgcatataccaattcaaaacacaccaatcatctggtgtgataaatttggtgttgcatctttagctgccaacccagttcatcacgcatgaactaatcacattgaaatagatgttcacttcgttcgtgacatggtacttcaaaagcttatagacatttgctatgttccgagcaaatagctgatgctctaaccaagggactctcagttgctaggtttctcaaatttaaagacaagctataagtggttgattccccttttcgcttgagtggaaatgttgagaaatccttagaagccaactcagcaaaagatagttgcagcaaaattagttagactgttagcaattagttacaacttattacattctgttattttatctttgctgatagttctttgtatttactgtgctataaatactgtcttctataactctaatcaatgaataagagagcttctttcataatcaacatctctttgtaagctcactttacgtaataattaacttttaaaaaatatcaataattaaataataaataatcatggaacagcgtaactaattaaatgtgaataacaaattgaacaagataaatgggatcttcccacaaagaatagtactcctactaaatagtatgtatcaactcaaaactctaaaataattaatttagtaaaaaataaaatcttaagcaaataataaaattgaattttctactcagccctactatcctaaaatttaaagaattatttatacaactatcatgagctatatattatatttatatatatgtgcagagttgagattctgatcccctatgtgttgcaacaaaatggctagaaagatatatttcccattccttttgtcaaataacaatgtctacccgtgttttgatgggtttgagtttaatccccaaactctctggagaaagaagttctggtgcaatgcacgaccggtttgatgggctggccgggtttgaaccattacttgatgaagaagcaaaatgtttttgcctatagaaaccgaatcccatcaggaataactcaatcggaaccaccattgcgtatggatgctcttctgttaccaatgagccacatgcttgaacctgaaaaagacacagagcaaccccatttaagatcttgtgaaaaaaaaaatggagtcaaaaatttcgagaagtaactttacctcaacaagcgcacagcctttcctgtccattttggtactcatatacaaggactcggcatgaaatggactacaatcaccaacaaaaataagtgttttacattgcaattttttgaagccttctgtaaggtcatgcctcctgtcaaataaattcatcagatacattacgagatgttatatttgataaggtgtttaataaaagatgaaaaatctgtaagactaatctttaagagaagagaagggtagtactcattgattgcatgaaggaaacgcatgacattcaaactctgtctttcatccaataactgcaaacatgtcatgaaaaaaagcaagaaatattgaagtcatgtataattaccatccttaaacttatagttctctgtgtaaagcagtgcatggcataatcaattacgagaccgatgttccttacccttcggcaagcttgaattatgtctgactctgcaccatgcataccacatctaagctcctaataaagttaaggatatgaaaaattgaaaattaaaaacaaagtccgaatgataaaataaatgtccctatgaaaaaaggtcaaaattggcaccttgctgaagtagcgctggaggaggcattccttcaatacgccacacataccatagaagtacaacaagttcatcaatacctgcaaagcagagttaaaggaaatattaagcaatgaagagattctaatggttattcattgaattacaatggttttaaaatacttaatctaaattacacaacaaaggtaagccactggcaaaaggtcaaaaaattgtcttgcccaatttcctacttaagttcatgttgtgttgtagcataatgacctttttgtttgtgcttgtaagcccttcattcataactggaagacaggtcagtactatcaataatttaattgcatgcaagttccccattatcgatcgataggtaatataaagtgaacccaagaacgcaaaatacccaccattaacgctttatgcactcaaaaactctcaacacttgctaaggcacttcaaaatattcacctctctcgagtatatacaacaaataagaatttgtgcatttaaagacctatgaacagttagtattgttggtacaactgaatttgattttaaaatttataattcaaatcatgggaaaaaactagtttcaaatacgaataaattaaacaaatttaatatttttaaatttttgttagcctttgtctctccttcatacaaacacaaccttaatatttgaatttttttaaaaaacagtgttcattttctttgacatactaataggtgatattgacttggtaaaagattaaaataagagataaccttgttgtaaagccattcagtccatgaaggtgctttgcatataggggatacaagaattaatccaagcacgcgttctcggtacttcatctgccaaagaaattaagcaactatattatgaaataagaacaacacgaaaaatcatgaaaggttatctgaaaattggtgactcactgcaaagagagtaaggatgtaagcaccagcagttacaccaaagcacataacctctctcaacctggtttaatcataaatatatacatagtcaaaaggtgtacaattgagaaccatagtaaacactttaacgtaagttcttaacaaaaaactaggataattcttcaaaatatttgaaacaatattttattctagtaaaatcttttgtataatgattgacagttacaaacattcaatttcatatcataaacaaggtaatgattacaatgtgcactcaatagaaccaaatgcgtattaaataacacaaaatcagttaaagccaactaaaaagtgagtaaatctagaaccccgaatggataacagtgagataaattaacattaaacatataaaagtggtgggggtgatagtctggaaatatcaaatatataggattttctgccagcataacaatttgataaataaagatactttcatgccaaacatcaatcatactaaaccttcccatgtcattaaatttagcaaaggcatgactatcttctgggcttaaaatactacatataattaagctgtttataataacacagccaaaataaaatgacataaaatacacagaaaaacggtacaagcattaaaagatgaccaataggattacccaaagaagtcaagcacttcaacaacctggtcagctaagtcatccacgctaagaagtggatcatctgaagaaatcacattagctcctaactgcaaggactcttaaacaaatggggaaaagagaactccattaaatttggccaaaaaaacttaatgaataaataaaaacacagtgcttctacattagaaattggatactttgacactgacctcatggccaggggcatcaatatggtaaatacaaaagttatgaagtagcaaagaagctgcatcctggcagaacaagagaccttggaaacaagacatgtctgtagaaaagagaacagccaagtagtaagaaaaacataaacacaatatgcagttcaaagcttgtaaaggattctcacaggaatataagtaaacccaacattttggagaaaataatattcttttgagtgatgttcaaataaaaacatattaaccatttgaaccgtctcaaggtactaactatcactcagaagcaagaacaaattaaacccacttgcagaaacaatagctaacactaaaaactcaactcagaacaaaaaaaaaaggaaagcatacagttgagagcaacatctgagtacgtgattaaagcaggtttttcttgatccccacaaacaaaaacagagattgaacctttgcttgttttcaccacaaattcctgaaaatgtcaaaatgagagaatgagaaaaataagataaaaataacaaaccccattaacgaaaatattgataataaaacaaagaaatgggcaataataatatatagcttgtattagacaataatatagtagtaatgtagtaaatgaaagaaaagattaaaccgtttttggtgggtgttattattgatttttacattaccttccctcccaaaggaatcacatcaatgtcaatggaaactgagtcgcttgactcgcccatgactcagtcagtcacccacataaaaaaagtaactggagatttttttttttattttcttcaactgtcaaaaaacacaaaacctttctcactttctaaacacaaagctgcactcttcttctccttgttcttttcttctctttagtttccttctttatttccgaaattaccgaaaacccctcgaaacagtaacgaaattgcaaagctaaaccttactcaatatagttgctctgacgattttgaccccaggtcaaagcttggactccttgtccttttgctgattccaggtcaattaagtgaccgttggagtgggtataacggtcaatcggcggaacattactctccgccttgtatattaaaagggcaatccccgagatgcaggcaaccgacaactaaaaacgacgtcgtcatgggaaagacttgtatgtattaagtagaatagttgagggttatttaggtaatttcctagtaagcatattacagctgtacgccacctggaagccgcaaaaaaagtaggctccaggagagttattctatcattgtggaccagctcatctgtcccctgcttactggagtaattccttattattaattttacactatttatttccagtttaaatataaaaaattctctcataatagtatgagaaaattaggaaaaaaaatgtgttgatcccatttacaaatttaaattaattagaaaaataatgtatcctccaaatgaactagtgtatgtccaattagtttgtacaaaactataatatacatacatagtaacattttccttattgttggtgaaatttattaattaaagataaaagctgatatagagcaattgatataaataagtttttgctaaaaagatatatatagttttatactcttacgtaagaacgtaaatatggtgaattggtaatgttattgtatgttgtgaattgtgatgcatggtatttggagttccgaaattgaagagtacgttaagtgagaattaatataaatatggatatgattaatcatgatcacgttgcgatgatgtgattaaaaagtctcagcttaatttgctgaaatcttggaacatgacatgattggtctatattgcacatatcttacacaacaaacaaaacgcgttttaaaagacgttgatcacggccattatatattccaatcaaccctcccttactactatacacctcaaaacttgaacctccatgaattgtctttatagttaatattgtgattggtgtaatattttaattaagagagttaatcacaactttttattataactttttaattaatttttatgtttaaaattaaaattacatgtcagaatatttttttttaaaattcttttttatagcagtattcgttatagttaccgtatcaatttttaaaaaattctgaatagtttacaatgccgaaaatagaattcttaatgttccaatttactacgtgcgttcaaaaaacttctaatgtattttcagtactgtaaactatttgaaaattttcaaaaatttacaggaatgatgttgcaagcataacaaagccgctataaaaaaaaaattgaaaaaaaatattctgacatatgttttcgagcacgtatgttgactaagaaattataataggagattaacagttgtactcttccatttcaatatcgggtctcatatattttattttaataaatattatagagaatcgctaaccaattatagaatattaccttatagtggtgctaatcacattaatgtctcataacaatttttttatcaaaaaaatagagtttaataccattatgtttgattatatttttcgtggacaaagaaaaaaaataattaaaaaaatcgatctaatcggatgctattaattgaaacaatgacaatcaatcacacaatattaagctgaatgtaaatcagagaagatcaagatttacaagtttttcctgcatcgaaaatacatttcgaccaggtagtcactacaacaaaaatgactattagcgacgaatgtattagcagaggagataattcgtcgctaatgttagggtcttagcgacgaactagtgtttaaagaaacaaaaaaaaatcttctttactattagatgcggggtccgctactattgcttgtcgctaatagtttacctgagaaaattcctagtctttttatttcaatttttactagcgtcggagcatagtagcgggcccctccggcaataatattattttattaaaaaattactttgtaattaaaatatctatatatattattagcagcagagcaatagcgacgggctccgcactaataatttttatatatttaaaaaaaactaatctgaattcattttctctcaattctcaaactcgctcatttctctttctcttctcccttgacggcaacccaccccttctcttctctattcacagttgctcgcccttccttggccatccatccctccctcatttttctggtcattttgtctccgtctctgccccattctcatttacgttcttattctcgtccactgaagcactcaccggcctcgtcgttctagccacactcccaatctcgcgccaactccgttttgtggtgtcatccccgtctcatggtggctgtccacatgtttgtctagtggtaagtagttttttttacttatatacaatatatataatatgtacaaataaatatatatttatgaaaatataatgttcaatatatattttattaaaatcttcttttatttatttagggttttatttttgtccggctaccacgatttaccgtaaattgtcggagtacactttaggccactctctacttaaggtattttgctttctattattgtatttatatatattataattaaaattttgatggtttattaatttataatattttgcagattgttaaaagtaattgattatcaattctcagcttaatttttgaattaacaacttgaaaaagtagattcacatttgcgaaaagtaattttttttctagatttgtggcttattttgtttattttgaaaatatatgttatctatgttttatgattatttctaaaatttaaatgtatgttgatttgttcggtctcattcttctaatttatcggaccgccacctcaacttgacttcaatattagtatgatattgtccgctttaggcttaagtcttcatggttttttttggacacctttccaaaatacctcatactaatagaatagtaatcgtccttatatacccataatctttttcatttctagcaaatgtgggacattggttgcacactcaacaatcatctcctcaaaccaaggaccacatactcgtggtctcccctccaacgaaaccacccttgatgttgttatcaacttattaccaacagaacttgccacctgaccataaacattgccagctggaagactttcgacacaaggcaccaaacacagatctccatcttatattatcttgtacgccacctgaccatcataatatcaggtagactttcgatacaaaggcaccatacaaatcttcgatcgcgaggtcatcacattgagtgtttctcccacacatcacaaatgcaactcactatcccagtgctcgtaaacctttggctctgatatcgcttgttgggcatcgttcttccaccttgttgggcctccacttcaccttaactcgcacattagtataatatttttcactttgggcctagtcaggttgcgtatcctattggtgatagcggcaggacaagctggttttgctagtggggaagtaatgagtacgtggtccttgatttgagggaaggtggcataaggtggtttctattagagattttattacaatggaagaaaatcaagacattacaactctattgcaatataatacaaggaccaacaaagagactaaataaatgttacaacaacacttatatacactatatatataaaggaaaggtgtaagaagattattacaacacatgtaatataatacatatatatagcaatagaagaatatatatgtataatacactctttcacaaccttgagtgtagattagttgggatcaccatgacttgaacaaggtattacacctttgttcaaaagtttattttcccctatctctaagcactaaggaaactctctaggaaataactttgagaattatcaagccttttaggatttctagcaaagtgctttgttgatagaaccttctcatccaaatgagcacattagactccnntatatagtgtttaggtgatcacacttagaattcaaacacatcatctcatttctctcatataaatgagtattaatataatttgtaacaactatatttcataacttttgaatcctatcatcaattttgtgtaacatctcttttattacacaaaaatatgatcaaccaaaagaaattataaaagtaattgatcttgtaactcctctcatgttacaaagtgtaagttacaattttaggttaaataaatcatatgttacacgatttatttataaaacacttaatatatattattcacataataatatattttaccacatattattattatttatatcgtgaataaatagaatttagaatttattttctaatagtgattttgaaaaaaaaataaagtgtgtcttttgagaagctacatcctttagaaataaaagtgataatttcatctcatttttaattctgttgatgcggtttttcgtcaactgatctgagaagatcgtaaaataaaagaggaccacggtgaattaatctgactaataaaaactgcaataaattcaatggacactaggaatttataatagttcaccccccatgtcgtgatggtaatggggctacatctacttgtagttttattgattggattcgacacaccagagtaatattctcaagagtgtgtggataaaagtacagcaaaggatttctaggtaaattttaatcgagatttatgaatataaggctcatgggagacttgaaattcatgaatctgatctaaattaaaggttgtaaagttcttgggaacaataaaccaataatttgtgggaaaatgtgtgtattaaatggtattttgaggtctagtgtcgcctgagtatggtagactcaatgaagaaggtgacggaaataatatagtgttcttggaagttgtcaaatgaacttcaaggggaaggtcacgatgaggaagatccaaaaaagagagaaaggtctcaaaaggaagaagccaaaaagaagcctgatagaagaagatccccttctcagcctcctacttggtgtatatataggctagagggtttgttagtgatccctcacacatcgggatatttcactaacaaatcccgtataccactcttttttattaataaaatattataagtaaataaatatcaataacaatctccttatatctaggcaaatatcccacaaatattagacaattggttatcttcgattgaggatgcaccaatttgaaatggagtgctgaacacacgcgttttggactgtcgatgctcatgcacaacgccacataggctgtgacggtgtgctccaccaaccctcgcttagccgcatttcctaattctcgagtaaaatgcaccaactttccttgtaacctaatttaggacccgataacttcagaattgagtcatggttgtgagacatactttgatccgtctcaaattatctttccaacgcaagttgaaccagatcatttgaataaaaattgagagagttatgcttattttaatgaattcattttatgttatcttgtacctagttgcgagcactgccatggccaaatggcagaggtcggaaatgcatgttctcggacccctcggggtgtgttttgactaattttttgatggaaaatcatattttggaggtctcgtgacccaaaaacctcatttcgacgttcgagaccctaaaaggtgaccactaccaccagttggggccggataatggcacaggtcacccatggcttgtgagaatccatgggtgatgtatctcacttgtatttagtacatggatgttgaaaatataacttggtcaataaattcatcttcctggtgtggtaaccgacttgtgccatttcactatggcactggtctccaatttggagagcactgccattctcttatggcacaagtcacccaaggcaactcctaggtcgaaaacgactttcctcacttgtttcttactccttgatatcgtaggaacccactcagaaaatttcctcccttagtttgtgaggaatgacctatgccattctaccatggcagaggtctccaaaattggagagcactgccatttccttatggcacaggtcacctaaagcgactcgtaggtcggaaatggcttttctcacttgcctcgtgctctttgatgctgggggaattcgttcgaacacatttccctccatggttcgcgaggagtgacctgtgccattctaccatggcagaggtctccaaaactggagagcattgccattctctcatggcacaagtcacctaaggtgacttaggttggaaatgactttcctcacttgtaccatgctccttaatgtcgagggaacccgttcgaacacatttccttccatggtttctgaggagtgacttgtgccattttcctatggcacaagtctctaaaattggagagcactgccatttccttatggcaatggtcacttgttgctattttcttgtgattttagtgctattttgactttatacataaacacaagtcatgttcatgcctaaacaagtcaagtccttattggtctccttggcggattgaggtctcaagggtgaaacgctctcgcaggcccatgaatcctcgtttgggcacacttgggtgtgtgagtctcggcgccaaatggttggttgacattttcaagctctctagaagtgccttggggcccccaacaaggatgtcttgatttattttatatttatgagtcttggtcaaagtcacaaggttgactttttttttattttttgaaaatcgggtataacattttccccccaaaagtgtttgtcgagaacttcgggaaagacttttgttattgtacccttcttaacttgaaaataataagcatgttgtcttttgcttattttgttttctcttggagtactgatttaagttgtcgtcgttgcgagtcgagtgtgtcttcttgatgatttctctgaaacttggggattttaaactttattaggtgaaaagaaatttaatttgtctaaggatgacaaatttttattttttcacataattaaagggttaaatcacaaattttaccaacacatgacaagtgtcggaatttgttacatgcaaaccctatggccaattaagtagggtcagaaattgttgcatgtaaaccctatggccaacatctccttaataacttagttgaacatcattcaaggttctacttgcatagtaaatagtatgaaataccttatcaaccccttgtcccaatactgctccaatagcatagtcactgacaccacacatgatctcaaaaggtaactcccaatctggtgtagtgacaaataggtgttgaaactaacttctctttaagaatttgaaaggtttcaagacactccttcccaaactcaaaaggcactccattagcaagtaagttagataagggtttggcaatcttgcagaagtctttgataaatcttctatagaatccgacatgccccaagaaactttgaactcccttaactgacactggaggggataagttttcaattgttgacatcttggctttgtcaaccttaatgcctctttttgaaattttgtgccctagtactatcccctttttcaccatgaagtgacacttcgctcagttcaacaccaaattggagtcttcacatctcatcaataacaattctagattactcagacattgatcaaaagatgaaccaaatactgaaaagttatccatgaacacttcgatgcacttctcaattagattagaaaagtatacacctttggaatgttgctagagcattacacaatccaaatggcattcttcagaaagcaaaagtaccatatggacatgtgaatgtcatattctcttggtcttttggtgcaatggctatttgatggtaacctgagtaaccatcaataaaacagtagtactcttgtcctaccaacctgtcaagcatctagtcaacgaatgggagagggaagtggtctttgcttgtagctttgttgagtttctgataatttactcaaatcctccacccagttacagttctggttagaatcaattcattcttttagttcttgactagcgtcattcctcctttcttgggcaccacttggataggactcacccatttaatctttgaaatagggtaggccaccccaacatctaaccactttaggactacttttctcacaacctctttcattggtggattcaattttcattgcgcatcaatggttgcctttacccattccaccatcaggattctatgcatcacagttgagcggctaatcctcttgatattggaaaatgtccacccaatggctctcatgtgttttctcaaaaccctcaacatcttttctgtctccactgtagtttgggaagctgacacaataacaagaagtgtcttattatctcctgagaattcatacctcaagtgatttggcaagacttccagttcaagttattgtggcttctcaataaatggaactgacttcgttggaatcactctaagatcttcatagtattttctgtttagtggcccataagaatcaaaccacaaagcatacttcatcacttcttttccatcattatcaaccacatcctcttgtaccaaagtcagattaaaagggtcttcaatttgttcctttgactctaccaacttttccaccacatcaactaaaaagaaattgtcactagcttcaggataagtcatcgccttgagtacattgaatactacctcatctccttagactttaagctttaactctcccttttgaacatcaattagtgctttgcatgttgccaaaaaaggtctcccaagaatgatggcaatatttttatcttcttccatgtcaagcactattaaattagcaggaaatataaatttgtccaccttgacaaggacatttttgattgctcctcttggatgggataaggagaaattaactagctgtagtgctacagttgttggtttgtcctctccaagctgcagcctcttaaacactgacaagggcataaggttgatactagcccctaaatcacacaaatcattaatattctcgagcctcccaatagtgcatggtatggtaaagctccttaggtctttcagtttaggagggagcttcttctgtaaaattgcattgcactcctctgtcaaagctactgtctcaaaatcttctatcttcctctttttggatagaatcttcttcataaatttgacctagcttggcatttgttctaaggcctccgcaaatggaatgttgatatgtagcttttcaaatacttcaaggaacttgctaaacttcttatccatgctgttcttgtgaagcctttgaggataaggtattttcacatgatgatcaatattgattgaaggtgaagtttctttttattacagacctttagtagtcttcttctcttgtggcggtgctgatgctggtgcctattgatcctgatcttcatcctctaacttgtcttggctcggcttgatatagttctttccacttctcaaagtaattaccttacaattttattttggattgaattttttagtgctaggcaagtttatctttattcttgttagccatttgagtatccaactaccccacttggttctctagagttttaacagaggatctagtctccatcatgaattggagcaatagatctacttgaatattag

SEQ ID NO: 15664 - DNA, 7728 bp, Cannabis sativa
attagtattgtagtaggaatgaaaaataaaataatgttaaaattagttataattcaaaataatttagtttggagtttgtcttactagataaacctaacgtaaataaataaatagtccaagagctaatactttgaaataatagtaatatttcacttaaaattatgtgcctttaaattatataactattaagttacttttggattaaaaaacaaaacatttattttttaaatttttagaagaaaaaaattacaacgtaggtttattgattttcaaaccaaccaaataaaatatgttactttgctaataaaaacagaacaaatgaaatattgttttcttgtttagtcagaatgttaattacgatttttgctcaataaattttaatatatattaaatcttacttttaaaattttcaatgtcattaaaaactttctccaaatttttggattattggattatataaattctattcaattttactagtagacgattaacttggacaaaaattctattaaagttagagtttacgatatcatgtcaaagtttcaagagtataatttaatactagataatcattacgttagacgactattagtagaattgaattagttcttgaattcaataattttaataatttaattaggagaaactttttatgatttaaaagtttggagattgtaatttaatacatgtaaaattttgaaggatggaaattctaattctatttagttataaatatacaagtcattaatttttctttttgcttttgattctcatatgaattaaaattcttgctttaaaaaacaaattacataaattgttagtttttgtaaagttttcacattttacattcaaagtttttttttaattttttttttatttttacattttaaaatatatactttttttttgtatttttatgaatttccacatataacaactcgcatagtaatttaaatcgcaactaaaatctacataacaacccacatagaaattatcggaacaaccaccaaagcaacctaaatcataaatttttttaaaaaaattaaaaaatagtatgtgatgtattctataaaaatacaataaaatcaaatgaaagtgagaaaagcaatatcaaaataaccaaacaaattatatataaataataaaaaattaacaacaaaataaggagagtacaacataaaaaaaaatatttaaagactttattttatgtaaataaaattttaaaaaccttacaaatatttaaaattctatatttttttttgaaataataatcatctccaaaaaaaaaaaaaatcaaaatcaatttttttcatgtaaaggtggcataacatatgacaaaggtcatgaaattttgatgggacccgctatgactaaccactgttaatccatccgagtctctaaacaaaaaaatcttggccaagtctcaatcttgattagagaagagaagagccttccctttaaaaacactcaaattttcagtaagaatctaaactctaccacactctgatcattaacacctcacccaccaattttacgaaactattactatttcttaacaattcccatcaatcttttctatttgcaaacaaaaaaattggatccccagatcccatattctcaatatcttactcacccagatcgtaaatcaccatttttcttgtcttgtcaagcatcgactgaccccattaagtttctcaggacggaatccgttttcaaactttcggtcttttcatcatggtagagaccgtacctgcagggcggttccaccaccagaggttggacatccgacgatggattccggcgttcgtatcctcgcataggaccctcttcactacactctgggtcttcgtttttttgtcacttttcgtttggcagaggaatttgattgatgggttttcgttattcggacgaaccgtgacgaaacccatgcctaagcttcgaccggtggcattcaatttgacggattttggggctgtgggtgatggggttactgtgaacactgaggcctttgagagggctgttttggctatttctaagcttggcaagaaaggaggaggccagctcaatgtgccgcctggtcggtggcttactgccccttttaatctaactagtcatatgactcttttccttgccgaagatgctgaaatacttggaattcaggtaagttcttgtgcttgtatttaaatgtttttctttattttagtaaagtttgcctttttggggggcaatgctatgcaaatacccctagtgatttttagtagcattaaccatgttcgcgctattgttggctaatgttgctttgtaaaactctctgataacatatcggtttagcttttttcagacagtgataacatacatgtctagctttgataaacactctgataacatgtagttctagctttgttaaacactttgagaatatttaagttgtaatgcttgctataatacagttgtgaaactgttgttgaatagaaaatattaccaaataacgaaaaattatgtatagttttatatgtgttagtggaactgctcatatagtagtgtaagtaatgggattcactctttgtgcaaaatgactgaaagtgtgaagtttcaatacacaagtttcattatgctgaagtttccaattgtacatcttttttcgttccagttgatgagatttctatctctttctcttattcttgttttcctgatcaatacacattgttagagttggtactgatgttacaagtgttctctcgtattatatgtgaaggatgagaagtattggccacttatgcctccactgccttcatatgggtatgggagagagcaccctgggcctcgatatgggagtttgattcatggccaaaatcttaaagaccttgttattacaggtaacatatatttctcttttttggggggatacagtttttttacttctggacttctagtacctttttaagcaaaaaaggaaaaagaaagaaaaggcttgtagtaccaaaaatgagttacatagtaagctgatcgtatgaatattgatttgatgagaagttcatcacttccaacatagtaagctgatcgtattatattttgtaagcatatttcatatatgtttgacatcagattttggcattctatttgaatttgtggatagaggtaacctatttgtttggttgtggagtgtcgcaaatacttgcatccattgaaccatcatgtctttttctttagcctaatgaaagccgaataaatattttctgaaaatgaaattatggtcttttaccagtttctcactccacccctactcataagtcttagtagcaataagtagggaaaagctgtcatcttgcatttgactatcatgtatgaggcattgattaatttcttatatatgttataccctttattaggaaggtaggcacatatttttctgtaaacacttttattaggaaggtaggcaaatatttttctgtaaacacttttattaggaaggttggcaaattcagcgtactgaaaaaaaaaacccctttattattgctctgaaatataaaaatgcaagataagatgggaatattcatccaccaaaacagcccccctggcagaaagcaaaaattacagtaaaaaaactctgaaatataaaatgaaattcttatcattgtgcagccataataccagatactcagcttgacattactccacccgccgcctctctaccttcttttctctattctcaaaaatccttccattttgttccagctattataccccaaaaaaaagacagctgctgaaacaagttgcctttaatctgaagcaaccatacttccaaacactgaactgaaatacaccaaaataacctgaactccttcggactgtataccaaatgtacaatgaaattgaacagcactgagaagtatgatccaccaactcgacatattaattcttaaaaattaagtttgccattttcctgttccctatagtgtctttatctttgatttatgaaattttctgattttggcttatattcattgaccaacagggcataacggtaccataaatgggcagggtcaaacatggtggaagaagtatcgccaaaagctgctcaactacactaggggaccacttgtacagatcatgtggtcaagtgatattgtaattactaatataacattgcgtgattctccattttggacacttcatccttatgactgcaaaaatgtaaccattagaaatgttactattttggccccggtatatgaagctccaaacactgatggaattgatcctggtaagctggtttctgcttcttaattcagtttcatgtaacataagcttagcattagtcctatcgccagtggtattatacaagcactcaaaagtcaaaacttcttcattcctctgtttgggatgatattaccaaatacacttatagtaatgttacagtggtatatctatctaatgtatctattgagcattaattagctccaaatttgcatggcaaacagattcttgtgaggatatggtaattgaggattgttatattagcgttggagatgatgcaattgctataaagagcggctgggatcaatatggaatttcttatggacggccttcaaggaacatactcatcaggaatcttgttgttcgctccatggtcaggtcagttttatattttcccttgtcctgtctctgtccaaatgctgttacactgagggaaaatgtcataaaatgacttgtactttttcttctcctaacgaaatccacggtatgttaagaaacataggcgaactcccttaaatttgattttccttattacagattgactgatcttttcattcaatctaatccccaaaaagaaatgtctgccttagtggtttaaatgacattttactgtttttctgtagccgatagctgtttaaaattaatatatcactcattagatcattttaattctaaaaaatattgtttgagaactagtaataggtcaatgctaaattgaatacaagtataatctacccttcaataagagcaattattttaatgagatcttgggaagtcaaattacaagcttcttattagtaaaaaaacaatcatgaaataccaagttattttaggccaatatatatgatgaagctctttgtttttcccttttcacttattaaagaatctttaagtaaacatatgacttcttcattttaacttgtaatgcatgttctatattctttttttagcaatttttttatttcttgactagaacattgccacgctttctccttgaatgtcttttaggtcaagtctcttgaagccaatatttatctttaattaaatgcagtttgggccatgttttacatcccctaatacacgaaatgtttcactataagagaagtttgaactttgaactaaaaaaattggtggattaatccaactttcatatttataacaagagaataacttgaatccgttttggcaacaatgcaacagtgctggcgtatcaataggcagtgagatgtctggtggggtttcaaatgtgacagtggagaatctcctcgtgtggagctcaaggcgcgctgtccgcatcaaaacagctccaggaagaggtggatatgtccgccacataacctaccgcaacctaacattcgacaatgttcgcgtgggaattgttataaagacagactacaacgaacaccccgacgacaactacgatcggaaagctttcccaattctcgaggacataagcttcacaggtgtccacggacagggtgttcgagttcctgtgcgtatccatggaagctcagaaattccagtgagaaatgtgactttccgggatatgtcagtgggactgacctacaagaagaagcatattttccagtgtgcctttgtgtacgggcgagtaataggaaccgtcttccctgccccttgtgagaatctcgataggtacgatgagcaagaacggttggttaagcgctctgcctcccagaacttgacagacatagattatgatttttgacatgacacagagccttaagacaaagcacaacatgagcatttggcaacgttacggaatgtagtttagatgtattgttcctcttctttttttttgttttttataaaattaaaaaatgatgtacatagggtaaatattcctgttgattattacgcttccttttttctactcacacaatgtactgttttgttttcattttccacatcaattttcatctccagaatagataatgagcatgaataattcatcttatttttatgttttggccacataaattgaaataataggggaccatttcccaaactagtcaatgcatacagagcagagtgtgcagttaatattacatatgtactactattttaagagttagatgtgagcaatattagcaagcaaagcaggccatgattggttgagtgtggccttggaatggacgtgaaacattaaatcttgttaggaccacatcaatcttatgttgtcatcaccactttaattgtatgttatatcattccccacctcgtacaatgcaagttgcattacccatcccatgaaatagttacaaatcattttcgtttgcatttgttttattctttaagaaaaaacaaaatgtgcataatttgtatatggttggtttgtgtagaatgtgtcactctataagttaaccaagtgctcaaaactattatgaaggataaaaatatttttttcattaaatgcctgaaatacgaaaaatataggtgcaaaacatttgtgaaattgtagaaacgaaaccaaaaattgatgtaaatgggtcaattcaatatttttacaatgagccaagttgcaaaaagaggtcatacagaatgaaggaaaaaaaatataagaacaaaacgaagaatgaaaagaacccaaattaaaacaggaaaatgatgactgcaaattgcaattagatcaaaaatactttgaacgatgttcggtcaaaacaccactcactcatctttgttttggtttttgtttttattatttttgtacattttggctaattagttaagataatattaaaaaatactattggtgtataacaccctcctaacttaggaccctaattgaaatccctatgaccctattttttttcttctgaatatttgatctcattttatggtcttgtgatttttatgatatttaatctacttaaattaatatataaaatatttctttttgtgtaatattttttggaacaagcaaaattaaacagtttagatcattatattttcaccattcaaaaatatttttaaaaaaaattataaaattatcgaagaagtattgcaatttccaactttatccaaaatactaaaaacacacctagatttttcaatatacatattcatctatttttgtatttcaatcacaaatcactcatagaaagagaatcttcattggaaaaaaaaaacatataataactatagatagacattttattttacttttgtagtcttttaattatcatcgttactactttaatcaatgattctatgagtaagtgtatatatcttgctaaaaaagtaggcccttaacaataactagaaaaaaattctcatgaaaattaatgtctaattgctaaacgtgaataatttaacataactggttgaattataagaagaactattcttttatatataaatatgagattttttctattataaacttaaaatgtaataaatttacatttatgaccctaaaaaaggaaataaacaaaaatagaaactataaagttg

SEQ ID NO: 15665 - DNA, 4906 bp, Cannabis sativa
aatagataaaaaccatgaagaacaatgcaccttgtgtgtatggaaagaaaaagataaaaacataccgataattgcaccataatgcatgttggcatagggctcctcactggtgagaatctcccataaaacaataccaaaggaaaagacatcaacctgtaatcaacaaggaccgaaaagatcatgattgagcaagagtaaaccggttatgattcaaagatcgcttcgcttcaaaagcttctcgaaaaattatgagagaaaagtatctctggtagtcatttaccttctcagaaaccttgttgctgctgccattcagcaactctggggccatccatggtaatgttccacgaacaccgccagaaaccagtgtatttcgttttatttttgaaagcccgaaatcaccaacctgggaagacaatacttctcattagttattcatgacaactaccaaatttaacattagtaacaccacaataccatcagaattaccttgcaaattggccttaaaggatctttcaagttcacaagcaagttgtcacacttcaaatcgaaatggacaatattctttgagtgtaaatattccattccaaatgctgcatccatagcgattataagacgcttgcggcgatcaaggtacctatgaaaaaatttcgggttaaatgcctagaatctaacagaatattttcccatatcacaatatgagaaaaaagttaaaaaataacaaaagaaagagatatatacatatgtatagtttacctatcttttcgaagtaaaacatgccttagagaaccatcaaccatgaactcggttacagtagctaacgtggcccctggtccatcttgcactacaccataaaacgctacaacatttggatggtgaagctttgaaagaatatcggcttctcgccagaattctacagtctgagaataacagtaattattatcaaccatagcatacaaaacaaaatatttagccatcacctgaatcaacaaagtgtatgactatatcattgatatatgttctcatggaaggtcattaccaatctctcttgttctgatgatcttccggtaaagcaactcttctttattctcttaatcgcaacgtctgttcccctccattttccatgatacacagtcccaaaggtacctgaacccaattccctaagctcttcaagatcttcatcctttatggcctgaaatgtaaaccaagaaagatgaatgaacagaataattctgacctcctcgccttactaacggttatcttagtcaataacaaactttcaatacagtgagtgaaccacagagtaacttctataatgtcaaagcattgaggccaagcataatacctgcaatgtgctaatatccagatcgcccagggaaggatctaacggaggtagaccggatgtcctggactgaaagtttccatcctatttccaagttatcgaaaaattatcagaaaagatacataagagatgcacaaacgataaaatgatatagttttacttaaaatacctcatatcccgactcctgaactctaaggttttccatcatacgatcaaattgcatgctttcggtgtcctttgcttgggagtgttcataatttggatgcagacttgaatcgccttcagttggtccagataattcgttatggttgatttcaccaaattttggttgtggagcaacacggtgcggtgaaattccttcagcagatacaaccataggaggctctccttcatcttttcttagtgcagatgcaaaatgaagatcctggtccataagagaaaagtctttctgatcaaatccttcttgtgccaacttctgaaaatatgaccagcgcttcggttcatgattttccatgttcaaactaacaccaggcccgtcgttgtgcatcaaatcaacaccaggtgaatctttagacagtattgctttggagaaaatgtcagaaagcaaatcacgaggaaatcggtcttcaatgtcaataaggatatctccctgcacttcggttgaagatggaaaattttcggtggccacatgaaagtcatgccctggatgattgtttgaaggatcaacatgttggtccacagaaggtgtctggtttccatctggatatgcagatgttgcttgttgtggggtttcatcagttacgagtttcttctgctcatttctcaaggaaaccgcttcttggtcagacttgacaatgttgtcctcattaacatcttctacattgttcggtattgcctgcttcgtcgactcaccatccacattttgcaaaagctcagcattcatttgacaaaccgaatcagcaaactctttatactgttcaagttgggtaagtccatcatcaacagtatgagtatccacaggcaatggtgttgatgttaagaaggaaacttcagcctgaggaggtagctttccatctttctgcgaattttcagaatcattcgtaattgaattctgctgggtagtagtatcagactgttgttgaggcatgacaaattgggaaccatacgagtcatccgactttgataatctactcagcaaccccaactgctcccttggtattttctccgaatagaaaactctctgaggaagtgctggaggttcgtggtaggtctggtcgcttacactcgaatcagacctaacataaccatgagactgatgatcatcctcgttgaatttaggcaccggaggtagatttcctgaatcaatcataggagaaatattgttaggttcctggcaccttccaacgttttttgaagacaacgagcgttgaccttcttccaatgaagtaactgtatgtgatgcatcttcctttggaatatattcagagttactattttgctgttgcatcgaaacatcagattttacattcgcatgagttacaggcacctccaaattgtctactgtagagccaccgagtaactgtcccgttgaatatccttgttgaccacccatcatcccatagaaaggcatcgaagcagggacttctacaaaaggggcgtaactagatgcaacttggctgttgtacaatggattaatcatattctctccatgatgcatcatctcgccatgataaaaatgagggttattttcgtaagcatttgaggaaactggcggtataactggttctgaagattggattatcgacgatgaaacaaaattgttattcaaaccaacattgctcacaccagctgggccaaccactgctgccatgttcttctctttctcaacacttcgtctttctaacgcacctaaattgtttgttgatgagcttgtaaatccatgcatactcgagctttttcttgaactcaggtccatgccattgacagcaactacatattgaacctcggaatcaccatccatgctattgataccaaactgagcatcttccaaatcattcatagagaataaaaatattctaagcttttgtgaaccttctctacttcctaaatcactgcattcctccatcatgttctgcagatcctcatcacaagacaccgaaaccagtgcatcaagatcttccccgggtagctgatacttaatgatgctagtttggttataaatcgaaaagattttctgagttagttcctgccaagaaatatcttttctgatacggacaatgcgtgtttccccaccaacatatctaagcttcccatcactaggccgaggtagaactttaccaccaaagctacaaagaaccttcatcttcgaagaagagctatcagaggctccagaagaagcatagccatgactaactcctcgattactctcatagcccgatgacatccgttgtactgactgagtcgacgcataaatactcctatcttcatgtgctgatgaattttttcgatcatattgtgtcgggcctttttcagttgcattaagcatcgaaatatctgacccactttcagaccccgtatggctgatacctaacatccctttgagttccatataacccgaaacatccccaacagtattcggaagcaaaggtttccattgattcactcgatcacgaataaattccagagcaaattcctcacccgtctgtaaggaataattaagcccgggtttaacttctgtattcggtgttgggactctcatactaccgcgtatactgccatgagtttcaggcataaatgattgagatgaggactgatatgactcatttccgggttcaatggaattgtactgatactgcttatttgttcttgattgatccattataacattctttgaaactatatctgtttctctaaaattaatcaagaataataaaaagaacaggacgccatgaacaaaccatctaaacaaaccaaatttccatcggcagttatagcctggaacacaaaacataacaccttaataagacattgattcatagaaatataagaccaaaacaaaaaaaatataaattctcatatttggtatggaaagagaaattgtatagtaaaacactcaattcaacaaaaatttccatatcaaacatgaaaatggatttattcttttcttctcaacattttccttaccttgccaaaatccaacttccaaacatagcctaaatgaagttgaataaatactttcaattcataccaacacttcccaataagacttacatttcagattattataacatctgaactgatttaatccaggaaaaatcaatacatatatgtatgacaaacaaaaactaggtcattatatgatattaaaccacaagaaagacaaaaaaaacctcagcacagatacccaacaaacagtattttctccagagttgtaagtgcatgttgaatagggttaaaaatctagttacttaaaaacaacatatgtaagataaataataatttctgacaaatggtaaaaaatataaaaataatcagaaaatcctcaccttcatcttgagcttagttcta

SEQ ID NO: 15666 - DNA, 9391 bp, Cannabis sativa
  modified_base (5602)..(5605): a, c, t, g, unknown or other
acaagaggggttatcaaatcaatgttggcattaaaatttttgcgagtacaaaatgaaaagtgctagcgaaaataatttttgccagaacgtaaatgcattggtaaatttaaattttagccactgtaaatatgtgctgataaaactttgacttttttataaaagttacttttaccagcacaataacaaattgtaatggtaaaaatgagatttcttgtattggcctcaataagcagtagtcagccgcagagtagaaatctcctgtatagtagtgttatgtgagtgccctgcctaacattattgttccttgctatgtaaatctttccctctctctctctctatgctaattataattatgtagaaatctagtactacaattaataattacccttttctccaaaagggaaattaaggtgtttttagctttttaatttgtcaaagataaagttataaagtttagagaattttagaactctcatgtcatgcgcttctatatacgtgtataaatatacaattatatatatatatatgagcaaccagaaaaggagtaacagggaggctgaggtaaaagaggcgtggcctacagtacatggcatagaatggacttaaaattaactttgaataaaagcatgaaagcaaaggtttatgatggcgatagttttctacccaaaagaaattaaaccctttgatatttttattcttaatttggtgtgtacagtagtggaaaacctttattttcactatttccactactatcatatatatatataccctattatatattatatatacatatatatcttttgtctctgtaattaatttaagtattagaaggcatgcaaattaattttaaaagggaccgaagttgatgcacggccagtctctctcaagtgtacgaatatgaggttaatagtaataatccaaaacgttgtaaggaccacaccgaccactagcggaattggccaaaaaagaaaagttaaactgaccatccaaaaccatcgaaattttttttctgtttttataaatgggaatggaaaaaagaaaatgatcgaaagcaaataatatataagcatgataatattctgatgtatacgtaataatcatgcatgggatggatgctctcatgactttaagagagagaaagaaagagatgattttcatgcattagagtccattggattttgattcaatagcgtactaaagtgggaccaaaattacaatagctttacaatgtgtgcatgttcccattgaagaaagtgggagtttgcacttcacttgcctcggaccccaccaccactaaatagttggagccgctatgtaattgaaaatcatatcatatttcccatatcataatataattaaccccaaacaaatataacaatacatataattccaaacaataaataattaaatgagaaaacaaaaagaaagtggtgtttggctcccaattcatatcgtacgtcatggtatcatcatcaataccatcatcatagaataataccattcttcttctactacatacaccaaattctatccctactatatccaaactaatttttatagaggagatacatttatttatttatttttgtagaagctagggaattaaattatttaatttttctttttgtgtggctgataaagtagatgataatatagacaaaagaaaagaatagaataaaagaaatatgggtttgatatagtgtatagtttgcatgagcatgtggtataatgagtgccattgtcagtccatgcatgtgattgtgaaaggattattcatttcgtcaaaatcgagatagagaaattaaaagatgcagtgcatggcgtatttgcaggactttgtcagttttttgtggttacatattcatttatattcatataaaagataaaaaaatatatatacgagtttttgaatgcatgtgaccacttttctaatccgatcaccacatatataaatggttactatatatgtatatatataaatgtagtcttaccaatttcagagcctcgtcaagtctagtcaaaacatcactccgctccctttgcagaacaatactcaagtagagagaacccctctatttttattaatatatataaaaatacatagctataatttttagtggaactgttacttgtaaataagattgggcatgtttaaattaaagaaaaaaaagagaattataatttatataatatcatgtaacgttgaaaaaggtgtccctggaccaatattctcaacgtattattaaattgtaagtgctgattaaaataaatttgtgccgcatgtcattagtttaattgtaaatatatacactaaattattagtactatatataatatacagtaactaccaattaagccctttgtgctttgggaattagggtactgcagtatagcacagagacctatgtatttatatatatatttatatattattatatagggtatattcatgtttttatgcttatagtgaatgaatagtactactttagctaccatgttgtcccgatccaataagttgttaagaaaagaggcagagattttattattattattattattagttttgggggaaaacaaaaacatgaatatactcttgtaaacatttgtattctggttttattttgggcaatgaaatcttttactttattgacttgcacatctttgcactcactccaagtttccattcacaaatatataattatatatatattatagtgaagtatacatgattagtttttgaaaagacccagtctgccataatttggttaatgctgcgggagcgccctttaataatgttttttttttgttagattgatcaatcaagcactgacctttacattaattttcaagggagaaaagtatctaattatcaagagttttaattgaaaccaatgtgtatacatatatgggacacttattatttcactaccttgctatatagcttatgaactaaggatattttcatgatatatatgtttttcttatttccatattcactgttttaaataattggctttcattacaaaaattgagatttatatgatacccctcttctacttttttgtgctcgtacgtgtgtgtgtttaactatatgtatatatataaggaattaatgttaagtagtgcacacatatatttcattgcgtgtagcttgaaaagggagatggacggttattatgtcctgtattgcaagttacaacctctccatataatcaccatcatcatcataatattaataatgatcatacatatataattgatgagttttatgaaattcagcgttgacaaccatatatatctttgtccctttctgctggggcttcttatagcttctaaaatcggcaaacaacagtataaaactacatttttctagaaaaaagaaaactacactatattaattgaaattcttttttttattttttttttaaaaattatttttactgaattttcctccaacccctttcaaatcaaggtctctgttgtgactggaaatgttcaatttttcatatatacacttgatcatatgttctcagacttttgtagctgaatatttgaccattatagtttctttcttctagttcaaatcccacttggatgcatatgatcatcgttggttttctgatagagattggttttctgatagagagaattgcatgtaacgtcaaatggtatgattcttaagccaaaaaagattgtgttgtgttgtgtgtatggctaggccagctatatatagcttattcattatgacctatatatataaatatattcaacaaataatttatgtaaaacaaaagaatttgattcggaaaatctcatagtttttttaatttttttttttatcgaagtttcagtatatatatacttgagatattatgtacattatttttgcaatctagtgaaagagaccggtcgttgcaagaaaggtatgggggttctgatcttctgctctttgttggagtgaatatattatattattttatcatatcatatattatatattctttgatataaaataaaaatgagagagagatattggatgggatagttttggcaaaatggggtgagcagtagaaaatacatatatagtgggagttgggttgtgtggggtgatcattccgaagtgaaaagggggccaactttctataaattcctcttttttggattactactttgcattgcatgtcccctttcaacgcaagccaattttttgaagtttcaaataaattaactacatggacattgctattaggtccttaaaattgttggaatattataattttttatattatttattaaattaaaatatattaaattatgctaataataattctcatcttatttgatatttgatatcttaaaaatggaaacctttctctacgtcttcagaatattctctccctcttttttttttttttatataacaacaacgtccaacccttaatttgatcacgagcaccctcaatttttttttaccaaattacttattaatgggagcacctcttccgagtaatatataataaatttagttaaatttgagcactatgttctctgtttattaattctactcatgcatgtgatcactcactgtatatgggggtcacaaaatattaaagcggttatatataattaaagcagaaaaggtaacaaaaagcaaagcaatgacataaattacacaacaaaagacaaatattggaaacttgatcttgatgatcatgatgagtagtagatcgagagctagctagtattctttaaatacaattcttacatgtgtacaaataaaagcaatgaagaaaaaaagtatatatattagacatcattgacactaattacaatgaaacaattatatctacccctataaattaatatagcatacatataatcatatatatatatatgtatatttcacgagagacaatctaaaactaataatagctggtgatcagcatataattaattttggcatatacatcatgatataccatcaagctgctctctcttaattaataaaatgtatataatatagcatcatttcctccagtagaaagcttttgatatcgatcgaacctatattattaactagaaactaatagtagttggaattacaatatgtatagtatacaagttaaaattggtcaacaaaaacagtaattattattggaataataaggccgaggccatggtgaggctggggcctctctcatatgtgtataatatatacatatatgagagagagaagggcagggaaaacagtgagacaggcacgctttgcttgatttgatcaaagcagacacatgcataggattgttacgagactatataaatatataaatatatataaaaacatatatattaaaatgattaatgtgaaaagtaacagaagaagaaaaaatgcagtagtactgggctctctttgcatgtcaccaaaacctaaatattccgtgttgttttatcttttttatcttctcctctcactgcttcccactcaccatcatcaccaaaaaaaacctcatcatttccaactcttacatggtgaaacaagatatatttatattgtacaaatattctttctggtcatcatataatctatatatatatttatatnnnnatatatatatatatttttcttttatggtcggctcggctggcccttgggacaaggcttgttttgcaaaacctaccactttcttctttgttatcattattctttgcattcgtccgtgattattacttttactaccaaaagggtacttgcaattacactcaaattgacttcaacatcaccttccccttaaacatttcaataatattaatcacaacggatggatataaattaaattaaatgaaaatatgaaaagatatatataataaaatatttcatatattatgggttataatttactgctaacgtaattaatgttagaaaattaataatttaagatataaatttgtattgtatataatttataacactacatataataatagatattaatttagtatacatgttaggttgatccatagcaatgatttcaatttaatagtgtaatattattaactaagttgtaatgatcacatgattaagatataaattagtaggacaattaccattaattactgttatttgatgattatatatgaatatatatgttgtaggtctcatttcagaaaatagacattagagttataatttttcaatttcgaaaattttattaaactctaagttgtgttatttactttaaatgaaaaatttacaatttttatgattttagctcgataataatagataatgcgacaaatggccattagagtcacatgggtgaacttgaaacctttatttagagggacaatcatatgcttgattttgggatatcgaaaattaatgaggttatggtgttgtactattttgcccctaggctattttattacttaagcattaaagtaaagttaattttggtattttattttaagtggcaagtggattattccactaacctctagctagtcattaatgattaagagataaacttgagttatcttttgtttaagggaaaaatttggaaaataatcaaaacctagtgtgaagagcaaaaccatctcttgctctctctttctctaacctttcggccacaagaagaccagcaggaacccatgccaatttcctcaaatttccagggtagtcaagcagaattcaagaagtataatccaatgtataaccctaatccctttctattatgctttttttgtaagtttttgaaggtttcctttggttttacgtatgtaagttaaggattagattctgtttggattatttgaacttagggttaaatttctatggttaaattgagttgattgaggttaatttcaactagtttggatggtttaatgaatggttgagtaagtttgagtttggctcaacgatggtgttttgagtttttgggtatttttgttgttatttttgcttgaaaactgttcttcgatgttactataggtatctggaaagtttggttggatttgggtgaaatttgtgtgagattcgaagcttttaggattttttaacaaagaatcgattaatcggttaaccgtttctccaggcaagactctaggaactggttaatcattttggaaatatggtttaccagtttaggcagtttctataaccttaatttttgtattttctcgatatttagagtattgccatgctatctatcgataaggaaactcctaaatttatatttagatcctcaagaaggttctagcaagttatttacctatttatgtggttgtgacgtagggcctccgttcagcgcgtgattttccattcaagtcgaccgacacacttgaatttgaaaacgaggtaagacaagcataaaatatgtataagtatgtgtgtatgtatgtaaattgcatgcttattatgtaagtgatacactgccaacactagcacagtagcggtgcggagtgcattggtgcagtgtataatgtttaaagggtatggtacagtgttactaacactagtatgggatgagtacgtagtgcatgtggtacaacactagtggtacccggaggtctggttcagccctaccaacactagtacaggacgagtacttaactacatgtggcacaaaggtcgtacttttattaagaacgttcttgaccatccaagttttgggagtaatgcccgcgtctgccttagacattatgcatttttcttactttgacccttgtcagcgtggagcttcagccaattacacaacctgatgaaccaaacttttaggaaattcgctaagactcgtaagaaggaattcaggcaaatttttctttttgaagaattttggctgaatatgcatcttttctctaaatttgtgctaagtttagttcttgcagaaagaattcaagcgtgtttctctcagggaaactaggttgaaaacatcgtctgacttttgttgcatatgtatactgagctaatcacctggaaaaattattctaagaaattgtagtcgacgacaattagcaactaggcatgccataccccccaaaagagttgagaaatttggtctcttctagattctcggtcattttcttaaaatctaactcatattctttttcagtctttgaggaggaggtatggttgtggttctgttttggccactccttcctccggtagagttgttctcactaatcctccacgccatacctttcctctccatgatcatttggaggggacttcttgatggtattggcaataatcttctagcttccgcaaggaaaagacgtggggttgtaggtggaaaccaagtttgatggctagccctaaacgactatcgttcctccaagctgatccccatccatgtgtttacaatgtgtcctttggctagacttggaccttggaaaggagagcacaaactctcgcgaaatggtagggttttggcttcccgaagggaaagctgggcctgcgtctttgcttgagaaattatcctttgatgaggtttatttcgataagctggagtcatgttgagttttgcagtggcaaactttggctttcatagggaaaggctaaaggtgtgcaaaatcgaacgatgaatttgcttgaaaaggccaaaggatgaaacatcactgggcatgcgacagacttcaattagtccttctattcggagaaggagggttgatgatgtgttgcatccccaatgatctttcacgcacaaaaaacatcgtgcatgcaagagtcatgttaaattttatgaagcagacaccgactttcgcaagggaaggctagagttgcataaaaattcaagcaatgacttcacttgagaaagatcaaagggtgaaaacatcattgtgagtgagacaaacttcaagcagtcctttcattccaggaaagagggttgaagacgtgtcgtaccctgagtgatctttcacgcgcaaaaaacatcatgcatgcaagagtcatgtttaatttttatgaagcaaactctggcttccacaaaggaaggctagagttgcataaaaattcaagcgatgacttcgcttgagaaagatgaaagggtgaaaacatcactgggagtgagacagacttcaagtagtccttccatttcgggaaggagggttgaagacgtgttgtacccgcagtgatctttcaggcacaaaaatcatcatgcatgtgagagtcatgttgaatttttatgaagcaaactcttgagttttgaaagaacccttaacttacaagaggaatactaaaatctcacacataatcataagcataattataaatagaaataataagaatttaagtggaaaaactagatgtaagtgcatattctcttcttctcttaagttctctcatttaaaaatgtaatgaaaaacttgctgaaataaactctaaatgtcctattta

SEQ ID NO: 15667 - DNA, 9299 bp, Cannabis sativa
  modified_base (9245)..(9256): a, c, t, g, unknown or other
tatatattcaactctctatgcttcttagtcaagctttctttcgattgattagggtttctcaccattaatgatactgttcccgattcaactgataaagtaaggaagaaaataagtttttagggctgtttgatatggagaatatttggtttcaggatcaatttaaagaatatttttttttctgatatttaatcaattgcttatttgctcaaatggggtttaatttttttgagtcttgacttagctggggaaatttctttctttttaattggttgttttacaatttttgaagattagatgatcgtggtattgctcctattaatgggcttggctacttctactttattgttttcaagtatgatttgtagtacataaacgggtgttccagtgtttttacaataagataaagagttattatttgaaaaaaggttttattgtttattacaatgttacaaataacaattttggtattcgaggaacgggatcttatttcatttgtagaggaatattaaacgacaatggagctgtagaaactattaaatacagaaagatttgtttttgtatcaatataaggttaggttagtatggaaaaacaatctatgttgtcgaggaaagaaatattattttgtctatggaggagaatgaaagatccggaaactctaaaaaatattaagtgtagaaggccatttagtatcaacataagagttttggcataattgctaaagcgaatttcaatgtaggtaagagatcctctttatttatttctgttatttccgtagaggatatgtaaatttagtaataatatatgcacacaaaactcacaatgatgtgacagtggcatacatagttgaaaaattataccacgtcactgtttgcaatgttttggtgcatatttttgtgtgcatatcattactcgtgtaaattataaattagcctcctattcagtttgtttactaaaggattagtcttagagagtttcatttgacctgtactagctttattgtttatggcgaagggttttgatttcatttgttattagcttgcaattaggctactgatgtggcaagttctatactttataaatagagtaagggaatttggcagatttctcatgttggatgagaatagagagtaatctttagtatgagagagctagcccccttgaaaggttagaaacaggagagaaagcctctcaaagagcttgattgtgtaattcttaaagattcaataaagagtttctagtgggatctcatgattcttgttctttattattgttagactctttctaatctaggaaaattctatcaaattggtgtggtgagctgcggaacatggggccgaaggagagtgtggaaaccaatctacctgaaatggatatggaagctttgaaaacaaaggtgtcggaaatgaaaggctccattcaagaatctatccgagaaatggggagacaattacaacaacaattcccaatttaaattgttcctagagactaagaacagcgaagaaagcttctagaacctctggttactgctgttaacagcccaaaacatggtgaattggagacttcggcatcccatggcagaggattagcgagtgcaccaacagcaggtaatttcaggaccattgcagtaggttcgaaaatggtggtattaccaattttgaatggagatgatccgtatgagtgggtcgtgcacattgaagaatatttttggcttcattggattagtgaaagcaagaatattttcgttgctaaagaatgccttggaggggttgcttggagatgatttcagatggtagaagaacaagaaccaatcaagaactggttagattttacttttagaattacattgttcaacaattgtagtcaaattgatgacggttcgttccaagatttgatgacactcgaatacaaagattctgcgaagaaattctggtctaagtttgagcagcaaaatttctgggaattccagcatcttttctctgcgatctattctctggtctaagtgtaaacttttcaaccttgacctctcttagtggtatttttcaaggctattattgtggaaaaacgactcaaatcccgaattcaattttctgatggcatggaaaacaatgtggatgacggaaagaacgttctacattcgccgctgggtgtgggaattgctgaaccaaagcagatggtgttgcagcttgaggaaaatccagctgctcaggaaagtttgtaaggataaacatgggcaggacaagagagaagagtgctttaagtcttattggaggaaggatttcaagaagcatctggttcaatctattgtgttggagaatcctactctgttgggttggttgtttgatagaggaagacaactctattatggcaacatacaagtgccgcaacaagaaataatgcagggaatttgaaaggccgggtcaatataaaaacttaaccatacgctttcacaacatctcgttttatccactgaagagggaagtactacagctgattgggtaattgacagaggctggacaaacatttaagaatggattctttgatcactcaccttgaggacaaggtgaaggttttagggggttatttataagcttcgtattcagtttgtttactaaaggattagtcatagagagttttattgaacttgtactagctttttaattgtttagggtgaggcattctattttcattggttattgcttacaataaggctgctgatgtagcaagatctatactctataaatagagtaggtgaattttacagattccttttgttggatgagaatagagagtaatgtcaagtaggagagatctagccctcttgaaaggttagaaataagagaggaagaaagcctctcgaagagtttgattgtgtaatcctagaagattcaataaaggatttctagtgggatttcagtattcttgtgttttattattgttacattctttctaagccagaaaaagtttattaattatcaaactggaaagtattaaatgtacaataatgatgttgttgttcacagttgtataatgtttcccgtctaggaagtggtgtgcgtatgtattgtgtctccagaatagtgttatatggtttcagtgttcataatacactttatctatgtttctttttggcgtgttgcaaagtattatttgcccctctctgcctttccataccttactgttttatggtgtgttgtgtgtatgtgcaacgtgacaatatctattaagtcctgtttaccttttttgttttgtagaaaatgtactttctcattggtgagttaactttgataagtaattttgccccttttaacataattcttttgaaacagagaatcaggaggctgagacagttgtgcaagacgaggccaatggtaacgaacaaaatgacactgtaaatgtgaggcttcgtgtatttttcttatgtttgagcctttctcgagtttagctttatgggacatggtaactaagatgtcccttaataaattaagagagagcctagttgtgaatgggctacttagttattggtgtggcctagaaataaaatgataacttagcaattatcagagttaattatatgattttttctttattcttagtacttggtttatatgcatgtatgcatgtacatgcatattggaatgtttcgcaccaaaaataattcacgaaattgttattatgtacacactgtttcacacacagaactaatttagaaccacgtagagtttgtgttctgttgatagagcttctctattgacattggtggcatagctgtatgaaatttcttcttgcttttgaaatctgtgaagttatatgtcctcctatttcgttatgtgtttagtacttgctttaatgcgaacagttaacattgaactgttaatttttttttttgtaataaatgaatatggacttgtttcatcaatgagatcatcatattgaatttaaatttcacaaccattagttttctttctttagattagcaggtttacttatacatagtggaaattgcatatattttaacttgactaattatttgatgtgtgactatatggagcccctgtatcttgttatttgtagcttttctcagccaatataatgttttagtaactctcttgctacttctggtaataatttgtagcatgagctgtccggaacaactggagtagtaggtcctggaacagcagcagatgtttcggagaacatttctgatttggttctgcccaacaaagataaaggaggcaaccttcccaatgagagcggactttccgaaatcgaaaagttattaaaggggaaaaatttttcgaggcatgttatgattttcttttttattttatgttttttgtaaggtttgttgtaggaagtgcttactttattattagtatttttaattatctcattctgtttttaatatcatatttgtatagaaacttaattcattcaaatttgtatttagtgcacttgtttttttaaaatggaatggaacaatatccattttgtatcatcggatattgttttcttttgttcagtacaccaccgtgtgagattttactttgcacacatacaaacactatcctatgtgctttcagtttgtccagttttttaaatttatatatgcaattattttacacttcatcgtcttgcagggatgaagtaaatcatttaatgctaataataaattcaagggcagctgaagttccagatgtacataaaggaaaggagtaccaacgtactccctccaggggggctgcagcatctcatgaaattatcagtacatctgatagaaatcagagagatttgcaaggttctttatggaaaacttcaacaccccttcctaaatcggcggtgagcgacctttaacttctttaaatatgctttccttaatcatgtcaacttgtgaaaactgaaaagtcattggttcacatttttcgtatttttctttgtcagcttgaggttcatgtgctattttatgaaactcacataaacatactctatttaatataatatagtgcaccctacaatttattactgtttatagggtaagaaaatttgtttcaagtgtatgtggcattgcgattttgagtttatctgctggcatgtaaccaaattaatctttgagggctcaatattacttgcagatggaaccattttacatgtgtgtgtggatgtatgagtgttgggcatccctgccaatatatttaatagcaaagaaaatatttggaattgccagtttagcaaaatattgtgtttgtgcaacttacatagcatctttgaatattttgtattatagtatgttgtccttattttcatatgtataaatattataacagaatcctttttctgttctgggttctgcagatgccagatgatgtttgtgcttcaccaatagatattgccaaagcatacatgggaagccgaacattagaaactggccattctattaagggaatgatttcaaaagaagaaaggaattcattatatagtgctgactttgtatcaaagccatttatgtcttcaccttcttctaagccatgccggccaggtgccatgctacaggatgagcaagatcatctaaccccccaaagtcaaagtggaagatatgggcttcacaacattccacgaaccccctactcgagaacaatcttttcaaagtccaagtccaaggtatgcagatcaaaacttttgagttgattttagtattttttggcaatctctgtgatataatgtttcactattctctgctatcagttaatgccctcactaggtgatagtgataaggggacgagaccatctacttctctgcaaacatctcaaacacctgtttatgggcaggtattattttttattttttttgaataaaggtaatattttttattagtcatcttctaagtgaaatttatgcagtaactaagttatgttattttaggtatataatcattttggtatgaactcaactatatgctttaatggttactggcttactgcttgggttaatgtattttgtaaattgataaaagctgttgagtaaagtttagttggaacaagtgatgtgcatatagcactgatatgttaactaggcattaactctttggcaatggtgaaattcaataactcatatccttttccctgatttttatccaactttatttttttgttcaatgattcatagtgttcatatacgtagttttttaatcatatagtatataatatactattacaccctaaataaaataattgttagaatgtttctattcattcgttgattttgtttacacattagtttatatgtttccgccgattaatatggataggtgaagtcaagtagtgatgcattggaggataaccatggctcaacaggaccgattcgtaggtcaagaaatagatttggtacacaaactcctggtacacaaaatagatttggcagacaaactcctggtactcaacacagacgtgctacacaaactcctggtactcaacacagacttgctactcattctccaggtacacaatcacctttcagaggatctggttttattgaaccatcatctgttgggccttcaagggttgaaaattctagtacatctcaaggtttcttgcctgcttttataagaagtgttgaaccaagagaaattagtggctcccaatttcattcagctaacaggaaaaatcacagttatgatgtgggtgtcccaactgttcatccacattctagtcagatagctaggacaatcttggatcatatagacagaaacccgcccactcccaaggacaagtcacaggagttgaggctagcttttgaatggaagaaacctgattcttccagtaccccttcaattgatccaaatcaacacaagtctaagaatagcttactgaatttaacagccttggaatctcaaaagatagtgaatcaagatgaccagaataaacctgctcaagatacttctgacaagagcaattcccgttttatgtttccacatcaggaaagtactgtaaaatcagttgataccatatccaatcctcggtcgaatgttttccttagcaatggggttgatggagtgtcccaaatgaaaaattcacacgaggtacatattttttgaattgtgatataacttgagctaaatttctttacgtcgttcaaaagttaaatatgttactaacacaataaattggcaggaggtcaccaagattacctcctctcaggtggtaaccctacaaaagaagcctgcagcttcagggactaataagccacttttgtctaatatctccgttgacaagcctaactcgatctggaaattttcgtcggatcaaagctctgggtttacttttcctgtttctacggcctctggagtgagctctgagccaccaacgccatccataatgccatcgttttcagcaaatactcagcttcagctcaaagatggacatgccattccttcatatacctttggctcatcatcaactacgccatctcttgtattttctttcccttctacaagcagttctgcaatccaaaatgacacttccgatattaagttcagctttggctcagataatcccaggttatcttttggttcagtgaagaaagatgccatctgctattaattaaagacattttaatacttttttttttatcccatttttaaggtgaattttcatttagaatctacaaaaagtttgaattggaaccctctgttttttcgttgaaaatattgaataattaaatattggagagtttgcagttctattcaattattgcagactaaataactgtattggacatagaataattagctggaagccatctaaatgatccacatgagagatttttcctttttattatcttttacaaagcattactttgattggatttttagtcaactgatatggagttgtagtaaatgagatttaacaagaacaataaatgtaaataatgacaccaaaatttaaagaggtttgatttcaagtgttggtaatagtatatttatgtattttattgatttgagttgcaaagtcaagaataaactcttgaatgcaagaagtaaaaatgaaagtttatgctttttaagtcaaattttggatatccttcccaggtcttgtgtgattcattatataggtgaagggtcggtgtatctcgcttcaggagatgcaactttgatgctaaaatatatcaatcattctcttgctttttgggattggttgaggtctgatacttgtggtaatgttttgttatttttgtgggtttgtacacttttgagcttcatgcgggattggattatgctgggagagtattggttgtgtcggtctgtgtggggctacccccaagagtactgactgaccctatgggggtgttgactcacctcggggtgtacccccgagacaactcctccttgctcctcatgtggtgttaagtgtttcgtagtatgtagtcttgataattggagtaagtattgtactatctacgtccatatgtaggtagagtgtgatagcaagaccataagaatgtaaggggatatgggtatacccctagactaatctattaccattgagtagatgacctactcccggggtaggggtaaatgtatataatctatcatccttgagtaaatgacctactcccagggtaggggtaaatgtatacctctttgactaatctatcacccctgagtaaatgacctactcctggggtaaaggtaaatgtatacccatagactaatctatcatgggggtaggggtgaaaatcggtcggttatggtcggtttttacaaatttataaccgaccggtcggttgcggtttttattttacgaaaaccgtaaccgaccgtttagaaattttaaccgtataaaaccgattgtacaatttttggcgggtttttaatggtttttcaatttggcggctttagacggtttttggtagttttttggtataacctttttttttttttatttcatcaaaaactgaaaccgactgccatgtcaaaaaaaccataaccgaaatcgaccgccaaattcggtgatgatgtgaaaccaaaattcgattacggtctgagcggtttgatggtcggtttcgattttttggtttttatgacaccctgggggtacttatcgatctcttcctaggggacagtcacttcattcatactaggcgtgatcgttcaatcttatctccatacttggagtataaatattgtactatttatttaataattaaaaataattatcaaataaaatttccatttaatttatttattaattnnnnnnnnnnnngtctcttaattaataaatagaccttaaaacctcttttcttcac

SEQ ID NO: 15668 - DNA, 2076 bp, Cannabis sativa
  modified_base (1636)..(1648): a, c, t, g, unknown or other
gttaaaccaagaaatgccgttagatagacacttttaatatataaagatatattgcatgtgatatatatttgtggtggagaatatattattttgttgctatgtatctaaatattagcttctgtcaacgttagctcaacgaatatattcttaaacactttgacaaactaataagttttgattaatttgagtctataaatataaataaatatacacaaaatgtgtaaatttaatatatatggagtttcagaataaagagagatatacaatgctttgaccatttaaagacaaaatccagattcactaagatctttagagaataaacaaagtttcattataatctcaaaaaaacataattattcacacataattattaatttacaaaagaaaaaaaaaaccctccaatatataatatatatgttccatattttctctcctgatttcataatcatcatgattttcatcttatgcatgggattaaaaccctattatatagttactacaataatagtacttattagaagtaaattaattaaaaaaattaattaattaacctcataattttgtcatcacaggccataactagtcatttgatcataatgatgatgatcatgatgaaacatctcattactattattagattgatgatgatgatgatgatcaagaaccacagaagtagattcccatgaatttgatgatgatgattttgatgcttcaaactcattagaccaccataacaagctttccttattattagagaccaccacattattcatatccttgatcaagctatcaaacccgggatcagaacccgccatttgattatgattatgattatgattaaactcgattgagtttatatcaccatgatctccgttaagaatgccctcgagctcagcttgaaaagccgaaacatgttgattaccagactggtcgcctgatcctttagcgctatcaatttgatcttcacttacaacgatattattagcaataatcgacgaaccataaaactcaatctccttttgggcttgattattagggctaatcacatgatcatgcgcttgcatgatcatagaattctgagctaacagctcagaattagggttagggttagggtttacattcaaagcttggaaactttgttgaatcattttttgttgaaagggatgaagcttaggccacaaagcaggattgttatagaaagataaagggttctgaaggctttgaagttgcatatggagttgaagcctttcaatggctgaactacttaaagtttcagccgaattctcttccaagatcggattttttccatctgtggtggccgaggatgataatcgagatccattggattgttttcgccttcccaataattttttcttcaatcttgtgttccaatagttttttatgtcattatctgttcttcctggtaattgagctgctattatagaccacctatatatacataattacatagacaagaaattagctccaaaccctaggagatatacaaagcatgagtttttctaggcaaatttaagaaagaatctggacaagagatatgagacaacatgttaaggttgaaactttaggttaagtgtgttttccaagtagatatgtatacatacatacatatatatannnnnnnnnnnnnagagagaggagagagagagagactgacctgctgccaatacttatatagagactacagatgatgttgtcttcttcttcagagaatccaccatgtttgatattaggtctcaagtaattaagccacctcaatcgacaactctttccacatctcttaagccctaattaattaaacaaactaaaatcaattaatacccaccaaattaattaatcataataatatatataattaagagaaatatatataaaaagcatatataccaattttttggggaagagcaatccaattaccaccagtgccataagtatcaatataagccttaagcttagtatcctcttcaggtgaccatggtcctttcttcacattagccttatcacaacatggagccctacccatcttcttgattgatatataatatatataaatatata

SEQ ID NO: 15669 - DNA, 5935 bp, Cannabis sativa
catccaatccgatccgatcacaattggatatccaatgtttgacggtcggttataatttgattgaccagttctcattagattggatcgatttattcacacccaaatccgcacttaattatatatatatttaaatatataaagtatatttaagtaatattaaaaaaaaacctcgaaaatttaatttctaaacataatcgtttttcttttccttcacttgtgcagattagatattgtttgacctcaaaatataatcgatccaatctaatacgtacttaattatgtatatttaaatatatataatagtatatcaatttttttattgtaatattaaaaaaaatctctaaattctaatttctaaacataatcgtttttctttccttatactacaattgagacaattgtacaagtatcaaaataaatggaaactccatctccaattttagttgtgttactggtgtttttttttttttttttaaatattaaaatgcactccacactaaaacaattgatccaatccgcactattacagattagatttaaactgttacgtggatgaacaaccctatttttaaaccactattgagaattttaaaaccgtaaccaaattaaaaattataaaaggtctgaattgaccaaccattgacaccggatttttttggtacaatatcaaatagtttagttccaattagttaagatttgatccgaattggttaaaatttggaactacaaattataaattgtataaacaaccctattttaaacctaacaccacacaaataaataaattaattaattagttaataactaaagtatacccatacttacttatatcttagcgacatttactattctggtacaaaaagttcgtctcctctagtggttttcttgtttatattcttttgtgttaataatttttttattaaaattttaaataatgtatatttgtttaattttttactttaagaaaattttatatttcttatattaatttttttttcataatatttaaaatacttttgactttatatattatttttcttagattgtgaggacttgaagaaaaaaaatgagtacaaataaaaaaaaaatatacacaataaaaataataaaatatactcatttgataccttatattttaaatacatacatacaaatttagtattcaatattttcaataatacttatatattaaaatagtacatatttagtgttctaaacttaaatttgattaatacaattaaactattttcaattatataaattttaaattaaaattttattatataattacatataattaaaaactgtttaataaaattttattgattaaatttaatactaaacttttttttagaagattcagggtactaaatgaatatatttgtactttttttttaatgtaaattctctcaaaattttggtattttttttttcttttcaagtattttagctataaaattttcagttacttttataaatatgacaaacattactcggttgttgtaataattagactattttagtgtatgcagctttgaatgtacatgatatgtactttagtatctcttatcgctcaatgaataattaactcaacattaggacaaaagattatacattttttaacagaagaataccatccaatactaatagtcaataataataataataataaaagtggaaatgtagatgaagatggatgatgaaagcagcactaggggccattgctttgcttttcttctacttcccttcttataccttgtttgtttcatttcatttcattctcgttatgaactgttttccttttggcgggagatggaccccactactcaaaatctcgtctttcctaagtctctttctcataaatactacttccacccaagtcccaaccactctttcttcttcttcttccttctctcactgcaccaacttcagcaacttcaactgtacacaaaaaccaaacacttctcacttctctctctccttttccttcttctctggacgaacaacaaaaaaatatattatcaaaattccaattttgaccctttctgatgatgaagaagaagactgttttttcattgctaacggtctttttcttcatctcacagtctctgaaactcgctctctctctaaccccagatggactctctctcctctcccttaaatccgccgttgatcagaaatcggccggcgaagctttctccgactggaacgaggatgacccaacaccctgtcactggtccggcatttcctgcatgaacgtttctggttttcccgaccctcgtgttgtcggaattgccatttcagggaagaatctccgggggtatattccttcggagcttggtactcttgtttatctccggcgactcaaccttcatagcaataaattttacggttctgtacctgtacagctttttaacgcgacttctctacatagcatatttctctacggtaacaacctttcgggtccggttcctccttcgatctgtactctcccaaggattcaaaaccttgatctctctaacaattcgatcactggagagattccggaagagttgaagaaatgtacgcagttgcagagactgatactggcccggaacaaaatctccggcaaaattccgtcggggatttggtcaggaatggaagatttaatccaactcgacctctcttcgaacgagttaacaggtccgatcccggaagatataggcgagatcaagtctcttacgggtactctgaatctctctttcaatcatttatctggaaagctcccaaaatcgctaggcgaattgcctgtaactgtgagtttcgatcttcgtaacaacaatttcagcggcgaaatacctcaaacggggtcgttttcgaaccaaggtcctactgcgtttctcaacaaccctaaattatgtgggtttccactccaaaaggcttgccgagacacatctgaaagctcatccgggagttcaaattccggcagagaatccaattctggacccaaaaagggtctcagtcctggtctaataatcctaatctcgttggccgatgcagcaggagtggcattcattggtctgataatcgtttacatttactggaaaaagaaggacaattccaacggttgtagttgcacagggaaaagaaaattcggtgataataatgagaaaacccaactctgttcttgtctttgctctaatgggtttgggaatgaggagtcagaaatggaagatcctgagaaatctgagagtggaagaggtggtagtggtaatggcggtggtgatcttgtggccattgacaaagggtttacatttgagcttgatgagcttcttagagcttctgcttatgtattggggaagagtggtttggggattgtgtataaggttgtgcttgggaatgggattcctgtggcagtgaggagattgggtgagggtggtgaccagaggtataaggaatttgcagctgaagttcaggccattgggaaagtcaaacacccaaatattgttaagttaagagcttattattgggctcttgatgagaaacttcttatcagtgatttcatctctaatggtaacttgggcactgctcttcgtggtaagtttctcaattttcactcatccttttgttttttttacttcttctgtcatgtcaagtcattatccatattattgattggggaggtgtaaaattccttgcctaaagtaaaaatatttgagaagagtcaaaataacataacttacaatcatagttactcttgtttctttttcaattgaaatagtaactaatcattaaataccaaatcatgatatttttttctttcgaaaacaaatgatccttgtggttaagcatttatggctgtcatgggtagatggataggcttgaatgaatttgataatttctttcagcaatcccaaaggtcttctcttttccctatttattttaagtctttggctgtttgtttctttctataaaccagagacatgttcataattttagtactaaatcgggaaacacaaatctatcacctatgcatgagaaaaagttaaaaaaaaatttatgtctacccttttggtaaagaaaaatgtacacttttgtcaattcccaatgtaaaagaaaagaaagtatctttgtgttggaatctatttatttaactttgtcaaactcggtggaaattggtccaagtatctgacaaaaaattggtcccacattatactttctatgccacgtggctgatagttgtgctctcatattagataaccttgtacatgcaaatattatttatctacaaaatccaattatgttttttaatattttcttcaagagtaagagtagagtgaaccttatgacaagaagctaattttttgaagaaaaaaaaatgtattacttaattgtttgtgtttttagtagaccacaccaaacatgacttttggcttttgggtctttaatctttagcaaaaaaacaatagtacttatttttgtttgaatctgcttcactttattaactctgtctagctgagtgaattgattaaaattgaatttatgaagcttgttttgcctttcaccatttcaacccttattaaaagcctgaaaacaaagctttttatagctgataatggaaagcttctgttttattatctatttttagataaacaaattgatatttagtgtcaaatgctagtactttttaaacacctgaagttaaaacttattaatgtataatccaaaacccctttaatatatataaacggtattaaagttacagctttttctttgacaggaaaaagtggtcaaccattgacgagtctctcatggtccacaaggctcagaatcgcaaagggaacagctcgaggcttagcttaccttcacgagtgcagcccaagaaaattcgtccatggcaatatcaaaccctctaacatactcctcgacaacgaatttcaaccccacatctcagatttcgggctcaacagactcatcagtataaccggaaacaacccttcttccggcggattcatcggcggagctctaccttacttgcagtccgtacaaaccgagaaaagcaacaattacagagcccctgaggctcgagtcaccggaagcagaccgacccagaagtgggatgtctattcattcggagtagtgttgcttgaacttctgaccgggaaatcgccggagctttctccgaccacatctacttcgatggagattccggatcttgtgaggtgggtgagaaaagggttcgaagaggagaccccactttcggatatggttgatccggtgttgctccaagaggttcatgcgaagaaggaagtcattgcagcatttcatgttgctctggcttgtacggaagcagaccctgagattcggcctaggatgaaaactgtctcagaaaatattgaaagggttggatagtaatttacattatatatatatgagcttcgtataattaagtttggaagttctaaagaaaaaaaaattgagagggcattcaattaattgatcagctatattttgattggttttggtagctttttgattgagattcatgaagatatataattcttttgaaaaatggatgcctaaccaaaccaaccaatcaaccataaaattcttttttgtgtttagttaggtgtagtttgtttttgtaatttaagtttttatagaatggttcgcaagaatgtgtttgtaataatttacttttgagttacataaattgggtcaatttccctttttgttcctattttcttcaactaatttttttcttattcaagtaaatactggtaatgttcttgtctcgatttagtctaattttgctaccacttgttttctttgggttcggttttaatcttcattcttgcatcaatttgaactcagagaggaaaatatatgtgagttgagcatccacaatcttcaatataatttaggaaaattactccatatattatttttttaattt

SEQ ID NO: 15670 - DNA, 9535 bp, Cannabis sativa
ccccccccccctttttttttttgacttgtaatcctgcccttgaagaggctgaaactattgatcaagattggagaaaggaggatagagcccctcaatcaagcaaagaagcagtggattgttgggattgtgtgggttagagagtctcatattgatatgtgtggtgacttaatactagatataagatgcatggaaaactccacttaaattagttttgagatagaatgccacattcctttcaaaaaaaaaaagaaagatagaatgccatatttcttaccacacacctcacctttcatcctactttctaaaccgcacttccacattctaacaatgacccaaattctatacaattgtggtgaaataaaatattgagagaaattggctcaatggacctttatcattttaggttttcccattatgtattttccatgttgtattgctacgagcctacaactcttgtgccattgtttggacatagtgaattttatcctctatccgtgatttgctgttacttttttgttttctacatggactctttaatgttgagcttaaatttgtcaaggctttaattagggtgttctttcagtctttctttcattatacaatgaggctttcaattttatttttaaatcaaacaagcagaagattgagcagctttacattcatcacattcacattatttgggactcgtctttttattctattctttttctttggatttctatttccataatgtagataaatgacaaactggcttattatgcatgcgcttaacttaataacaaatttgttctcaaagtaccttgtattatggatgcactttgttttttcagtcagcaaattcctccactgggttgccaactgaaattcagcttggattgctttcacccttgtatctgaggaaattattcgaacgcatgggagcaacctatatcaagttaggtcaggtaatttttgtgctattaaaaagtaattatatatatatttataatgcattcagtatgcggccattttcattatgcattaaacatggtctctaattatacacttgcatgccttctgtagtttattgcttctgcccccacattattccctccagaatatgttcaggaattccagaattgctttgatagagctccttcagttccctttgatgagatcaaaaaaatactaagtgaggaattagggagaccaatagagagtgtttatgagtatgttgatccaattccaattgcttcagcctcaatagctcaggtctgtactttgattctatatcctctttatttttttctgtcaaaaattcaaagaacataattgaaaatttgatattgcaattaggttcatggtgccaagctcagaggctctcgggaggatgtggttattaaggtcttgaaacctggtatagaagatatattggttgcagatctcaactttgtttacgttgttgctcgtcttttggagtttgtgaatcctgaattaagccgtacatcactggtataatgtggatagaatcttcttcatctgctcttaacttgaatagttgaatgtgtatttcctagcaaaaataaatccctctcttttactgatttagctttgaattgtttgcactttgcacaaagagaaagattataaattaggaatctttccaattcactgacgaacttaacatatttgtaaaactatgatgttactcctgctgtggcaatgttaatgttactaaaagcaacatattcagatcgataagtgttctcgtttcatatgtatggtcactcttcaagtttcagttaatgtactcatcctttcagtaggctggtatcgtacaagacatacggcagtccatgcttgaagaggttgactttcaaaaggaggctgcaaacatagagtcatttagaagatatttggaagcaatgggactgacacagcaagctacagctccgaaagtgtattaccagtgcagcacacgacgtgtgttgactatgcagaggttgtatggtgttcctcttactgacctagacacgataagctctcttgttactagtccagagaccagtctcataactgctctaaatgtttggtaggacaactatatcacttagtacatgggttttcacctatttgtttaatttgttaaagttttacgacattgtttggctctgtaattattctgcaggtttggcagtttgcttgcatgtgaatcctttcatgcagatgtacacgcagggaatttgtggctcttgcgtgatggccgcattgggtttcttgattttggtacattttcccccaagattatatatgtgacattttttttattacctctgtatctcctttttgaagcatgtgtttcctgagctgtatagaaacttaactacaataatattggctctcaaaagaaaaagaaaaaaacaataaatctctgcctcgtatcaatttgtaggtatacaaattatttgatcaatatatggctggagaaatgtttctacttttgtagctaaaaggactataaatatttctttttaataggaatcgttggccgcatagcccccaaaacttgggctgcaatggaagtgtttttgtcatcaattgcaactgaagaatatgaatcaatggcttcggccttgattgaaatgggtgctacaaacacagatgttgattccaaggcctttgcaagagacttggagaaaatattttcatcaatgaaggcaagcattacaaattatgcataaggcttgatgtttaatggacattatacttgatgtccttttctctctgttcaaatattaaaccatcatttatgcaggacttggatacagaagtagttgtagcgacagctaggggaacaactaccggggcaactgctgtctctgctaatgtgattgttgatgagaggcagatgaatgcacttttccttgatgtggtaagttgttcttctgattttaaatgcttaatatgaagaccttctgtttcatcagcaaccaaattgctttaagtgcatattcatattgctctcattgcctgagacccatagattgctatgaacttctggaacaggattatacgatgcctaaaagacagttgaaatgatatagattccaagttctagattttcattatgctaaaaagggaatgggggatgtcacattgaaaatctatatgcacttctaagaatgctgtcagtcggtcaatttaaatgctgttgcattctgttatttactaaaactataaaaatttggccattaaggggttttatcaagaaacagtttgaaaatggtagaattaatattcttattatttgaagtaattgatgtgatcattttatcgtaagctaagcgacttgtttacttgatcgataggtgcgggtgagcgaatcatatggattaaaatttccaagggaatttgcacttctcttgaagcagttgctgtattttgaccggtacacccggttactggcaccaaacttaaacatgctccaggatcagaggatctctatcgcttcaaaccgaaggaccaactacagggacaacttcagatgaatgtgatgcatagacttgtatgtaaatacaaataaatttacttggagtgttggaaataacatacaccataggagcataaatacagcaggatagccatgtacttacatgcctttggcaaagaggatataataatttgagttatgaatctgattactacttgtactatattttggttaagtacattccaaagccaaactatattactattttaatgcccttcaaattgtacttcattattcaataagagaaaatcttccctataaaatctcttgttagtctaaacatttcgacataacaataccgtcatgctccatctattttaataaaaagtgttagaatttatgagcttacataaacaataggtttagttaactgaagcctttcacttagtctaactagagttttctttatattaagtagtttagtgttgtactaccatattgagagatcaatcgtttctgttcttatgtgcaatagattgagtctatattatatgttttatctgaccaaaaatgttctccaattaagttaccagccaaagatggactaaaaacaagttgtgacaacctgcaacgctatgaaagtaggatggttggtatggtagcatctattaagataaataaaacataaacaaacagttttttttttttattaaaacataaacaaacagttatgaactagaaaccaagaaagttttcattttagctataaagggtgtaaatttaaaaaaaaaataattattatacacaaacaaataaattaaatcgaagtctagggcatttctatatacaaaattgaaactctttcttttaaccattttccacatcttgcacttcttagtaaagtatatagaaaaagttgaagcctttgtatgtaaacattggctgtgtcaatccaccaccagcagaagaaaccttggctccatttgaattctcaaaatgccatagtacacgagaactagatacaaaaatctagtattcagtagtaaaaagttttttttttttttttttcagttcttggctcgattttctttcagcatagagtatgaagtacttgtccctcggccagatgtaactgaaccaaatatcacgtcacttggagaagagtatcccatgagtcgatgaagtggtgaagttgatctttgtggcagctcctcaatttctgaagagaaattttgtgatctgggtatgttaggggaaggcccagagagttcatatttggacttatttttcccttgagactgtgtgggaatgaactccactctatccctcgaaagatcaaaagaatcttgtgacattttcctgtcaactgtgcttccatttggagtgtgaaatggtgtggtggagcaagagagtccacaatcttcagaacatgttgcaggaccagtaagtggagtttgagaagatgaagccatacttctcctatctatatcatcaccataatcttcggcttcacttggtggtggagggtcaacagtactagcttcacaaggaacaatatgagatcctttatggagtgaaaactttagtacctctgaacaagcaccacacctcaaccgatggcacttctttttaaacaggaggaaatctgcaggtatctgcaggattttagagcatttgtaacaaaccatgataggggctccacctgcaaggggtcggaaatggcgcttagctggacgttgtttctccctcaaataatttgtcatgtcttgacttctccggcgctgatcatcagattgcatttcacgtccccatggaggatattcggaatccatactccactgagggcttgccgggcaagagctacaacatgtgcagtagctgtgaccgggatggaccctgcacggcccactactgttgtaatgtgagggtggaggtaactgagctgagcgctgccaatttggtggacagcaatgggcacaggaggggtcaaattggtgactactactgctagttgcctcacctgaaaatggtatcttcttgaacctacgtcgataagaactgttgcttccagtgctgtatcctccagggtatctacgataatttggaggattaagacgttcctccataggagcttcataattattgtacctggggttgtatcttgtgtttgaagggagtcctgaaattccctcgttctccttatcatgcaaatgggttttgttaagctgatcaaaaactaatgccaacagtttcagctttatttgttcaggatcctcagaccactcatgtgactgaaagcttgagttgcggtggaactcaccgtgcaattgaccagaaggacgtccattctgatagctagttcgacgatttattcgttcaaaaaccgaactaggtggatgatgttcatgtctctctaatgtccaatttcgaacacttcggtcatgtcttgcaggttctacaaattcatctcgaccccactgtctgttgttcactgaatggctcttatctgaccaggaaggccttgctggatgttgtaacttagaatcactattcatcataggttgcgccaggaatttgtctcctcttgaacgttctccagaatgtcgaaagttttcggccttgtaactattttcaaatgagtgaaaatggcggttaggaaatcgatcatccattccatcgtacgatgagatactgctttcatatgcatgttgaacactgagctcagagctggggtcgaattcttcagacctcggatgatcatatccatgttgaacacttctccgaggtggtttcagtttactaggagaagatactacagaatcggatgcaatcctttctcttacagccgtacgattaggtcttgaaccattttcagctgtagccccatagttgacagcaatatagtttctgatattagaatctgagccaatcttcttgctggtgtctgctgatggagtgctctcaccattgactgttacatctacatccactcccaccaaacctaaagactccttctgagaaaaattctcagtttggttttgagtgaattcatcattttgtttttgagaaaatcgctcaatctcattacgagcaacttccggagtaaatttcttattctcattataagttaagtcctcactctcgttatgagcaaattcctcactttcattgcgaggaaactcctcaccctcattgtgagcaagctcctcactctcattacgagcgaatttctcaatttttctgtggaaaagctccccatttccactatcgtcacactcctcgatctcattatgaaaaatcctatccccattatcagctaactctctgttctcattttgttggacctcttcattttcattacgagcaaacgtctccttcttgttattaggactctcctcctcctcctgacgaacaaactcctcattcttactatcaacaaactccattggtgaaacgacttcattggaagcttcagatccatccacatcacaatctgaagactcgctgaattgatgagtcccattgttctgtttttcactaggtagattcacaaccccaccctgctcaccatcaaactccttagatctactttgatcccactcattgttttgggatgaagagcattctcccgggccacgaagaacctctttcttacctgattcgggttctttatcttcaaaaacacggcctgtttgatttccctgaacagcatcagcaacatttaaactggttgccgtgcttctggtagctcgactttttgctgcaagcagaatattacaagtaaaaattaatcaatgcagtccaacaatttagattcctcacaccataaacaaaacaacatcaggacttgttggaaaaagaaaaagaaccaagcagcatagtaaggtccatgctgtttcaaagtaacaaaacacattgcaaaactactttttgttccaaaaactatgcaatttcaagtactatgtatatatatatatgcttgcttagattttcataagagagagtaccttggagagtggcaccacatccaccacacttgtatacattaaattcaggcaactcaggaaggaccaatcgacacttaggacatctaactagccgaactttggtggtacactcactcgccatgcccgtccaaattagtggcagtaaccagagacaaaaaactgagcttccactgctagacttgacaagtgttaataataacaataataacagtcaatgatttgatgaaaagctcatacaacctgcaaacagaaagtaattctcatcagaaactaaaacatggattaactaaattagactagatttaagaaattgagaggagaaaaagaaaaagaaaaacatataaatccaaataattatttctaatttttgtggttatctttgagcgatacgataccctatttcttctagagatttttccaaaggataaagagaaaaaataaacaaacaaatagataggcttgtctcctaggtttatcttcccaactagatggtataaatagcattcaatttttcacctttttattaatatataaatatatttttttaaaaaaaataattcccattaattcaggtatttggaatctgtgcaccaaataaaaacaacaaatcaatcatctttgtttattactaaactactcagttaataagaattaagacagtaataactaataacaaacatgtctccaaatatatagcaagacaaaaaaaaaaatgtttgttgcaaatctaacgcttaccatttaaagttcaaagagatgagattatataaaaccttgaaagaaccaaatctaatgtgagaaagaatttggagtagaagacgagcataaaaaaattaataattgcagtttagatcagagaccaaaatataatgcactgggattaatagtaatgaaaaataaataatccataaagatttaaaattaaaatgcaaaagcgattaggacgaagatacgtaaagatgaaaaactaaccttctttattcttgctcagaaattactcagagagctactcattagggcttctaacccctaattaaaaaggaaaataaaaatcctactactgttccccatcatcttccacctccaattttttcaaatccatctttttcttcttgttctacttcttcttgttcgtctcgtgcgcacatagaccagtctctgccgtgctaaaggagcttaatggtcaacggtcaactcatcccactctatatatataaccacacaagacccataaattcagctgtgatagaggtcgatcttcttctctttctacactgagcggaccactttttccagtcgtagcttcaaagacaagaaaataattattgaaattgcaattaaattaataatatatgaaaacaaaatcgaacggagaagctgaagtcgggcgcctaaactaaagccatgtgatgacgtgtcctcttacgtgtacctctctttccatctctactgttgaccgttatgttgttcaggtcaactttttctattagaaaaaatacgaaaattataatcgaactgtacagataataaataactacttaataattaattagatgctttttactaagctttttctttcatttaaagtgtttggtattagttggaattaaaaattctgccccaaaattcaaagtcaaccgtggaaatgtcttccgtggtggggtcatatgacacgtggctccaagtttgtgactaatgatgacttaagtgggaccactaattttgttcttcttgatatgtgtaggggtaaatctgtccaatcgggttgaacaaaaactgcggtgagcgaggagtggtgactgacaaataaataattataaatgtgaccgcttccaactttcaatggaaattttttagcaaagttcaaataattggttttactaaaatagattgaaatgaaaagaaattattatttttttgtttggttattatattttaagttgaaacagctcaaaacacaaaggaattaaacaaagattccattttgtagggtccaaaaaaccaaaactcataatagaagctgtccaagccggtagacaagtagagattgagcagctcc

SEQ ID NO: 15671 - DNA, 3117 bp, Cannabis sativa
ctttctcttctctctctattttttgttttttattttttatttgtaaattttttattaaatgccatatttagtataattaaaattttttgccatatataaaaatttatcatcattttctagtatttgtgtaaatagccctatcatatatatcctctgcctataaaagataaagtaagcagttgtaagaagaagttgttaggaaaatatctaaaaacttaattttggttttgttggaggtccttatcacggacttttatcatcattatcatctcatgcaccttaatacatataagaaaaaattacgtacactcacgtctcttgtatctcgatagcagtcgaatatttatatatttatctagttgtgatctaactttaaaaattggtttaatttggactatgtatataaatatatcatatatatccatacatgatttctttgattacaaaattttttaaaaattattgtcacatttttcaactttttcggtttgctgccttggaaagaaaatcaaggtataattggttccatggagcttcaaaaggtttgcaaaaaaagaaaaaaaaaacaaaaacaaaacagaaaaaaaaaaactacaaaaaaggtacaaaattagataaatatgaaatcaaagtttgaagggatcaacagtgtttaatttgaatatctcacaaagtatttaacaaatagaaagaaaaaaaataaaggttcgaactcgtgagagatttcatgtcttatgtatgttttgtgtgcttcgtgagaatataataaaatgaacgtaagttattctttatttgcttgttattgactacacagccaaaccaatatattgaacaaatactaatcaacatttccacattttatttattttatatttgaattaattattattacttaattatcatgacacaacaacggtttgaattgttatatgtttcaaataataattaaaaaaaatatataatgcggtcatgtgattgggcatgcatgtgtaatggacggccaaagattctgtttgaccatgtatttgactatattgccatacactctcatcaaatgttcaggttgttcattttataaataatataaacaacaattaaaactaaaaatccctataaaaataaaagacaattgttattaggtatgaggagtgcctaatagtttatagatgtgttattttataattagttagtaatactctataaaaattattacgttaaattatataagatttcaatagttaattacaccaataacaatattaatacgtagaaggatactaaacaacaataatactctttagcatttctgaaaataaaatggtaatttgtagtcaaattatttgaattttaaagtttggtactatcacctcttggagtgaaatgttagcggttaaaccctccaaattttaattctttttgtcttcattttttttttcaaattttaaattttcactgttaaatgtcaaataaatttgttattgtggcaagtttttattgatacatataatattaataatttaagtattataaaaaaataaatttaatttggaaataataattttaaaattaaaatatttttttcctttactttattctttttctttttattcttctcataaccacagtgctaggagtgttcttataatccgcaatatgtagttccaaacctcaatcaatctagaccaaaccatttgagaccggattaaatgaattgagggtgaatgatttgatcaatccagaccattttaaattctttaattttgtcacagttttagaaatcttgtagtgttcaaaccaaaccaatccgtataattattatatatgtacttaatatattttttttgaacgaaatgttaatatttaggaacaactttaggtagaatattgatattaagtttatattattgcgataataatttttttttgtttttgttattaatctattataaacttattaaaagtaaaaaaaaaaaaatcccaaaataaaaaattaaaattattataaaaaaaaaaaaaattagaataactacgaaacacaaaccatggttcgaaccgaaccactccgtttttgagtggtttgatttgtttggtttgatcatttaattggtctagtttggctttaaattttttaaaaatcgtaatattggtttggtttaaaaaaaattgaaaattcagaccaaacgaatccgtaaacacccctacacatcaccaagacctccactaccaccaccacaccacgacatcatagtacaagaaaaccaacttttgtctgcacatttgtgcgtcgacaagtttactaaaatgaccaattaacttttgctgacgagtgaattcgtcgacaaagttgccggtgttaaatggtcgggaaagtggtttttgctggtgaatacagttatttcacagatgaaggtcacttttaccagggagttaagtcgccgacgtaaatgaggctttcgacattgaggcgacgactgagccttgtcaaggaagtcttgctggcgacaaaagtcgacaacaaaacatttcccacgtatttcctaatacccagcaaagttttgccagcacatttaacttcgtcggcaagacttttttaatgtatttttaaaattattttaataattttactagtgatataatgctttggtaaaacatatttttaattaatttatttaatatcttagtatatataattctaatttaaatttaaattataacttaacattcactaataataatgcaaaaacataatcctgattgcatattatatttatactaaattcaagtaaacactaagaataattataaagttgttttcataatttatagaaaatagtaatatttacaataaaaatggtaaaataaaaatgaaactaccaatcaacaacatcatcatcactctggctgggaggggtggcttgtgactaagatccaacgcgaggaggacgcactggtaaaaccaaagacatcccgggcatgttgaagacatgaatgatgccagaaaaatacatgaattgctcatggaacgtatgttgggattttatgccctaaataaaactcatttcaatacaatctgattttttatcaatagaagattagaaatcatttatgtttacatgt

SEQ ID NO: 15672 - DNA, 17016 bp, Cannabis sativa
  modified_base (13721)..(13724): a, c, t, g, unknown or other
ttggttttacatcaaactttatttgcaatccctgtggagacgatcttacttatcactttattacttgtgtgactacgtatacttgcgtacataattttcacaacacacctcaaaattaacagctaaacaatttgtaaatctaaaattaaatcaataagaaaatattacaactagtgctacgttttcttccgtttgctttatagtttttatgcacagtaatatatttaaaataaataacaactttgcttccattataaagtccataaacgtaaacttttaatttttctttttttagaaaaaaacaaatcttcaaagtgaatacgaaattacagtgtcgtcgatgatgcagcagcttctgccggcgacatgcatcgaaaaaaaatctaagaaagatggagagtgaaaggaggaagaaagaagaagctacgaagaacactcaccattctcaacggctctacgatgctttgagagagacttacggcaaacaactttcaaacttaggagatggcgaaggagctttcaaataaagttacagtaaatttcagaaaccaaattacatgtgaaaaggaggaatcaatgggtgtatggctgagatcattggagaagaaaaaatggataagttgaagaatacttttttttatatccattaactaaaaatgccattatattatattttattaaaatatacccacttttatgagtgagttgtctaatatacctttactttctacttaagtctaacatataatttacattaacttaaaggatctaatgggggatatcatctataaaagtgagtatatcttaaaaaaataaaaatgaaggtaaaaattaaaacaagtaaaataaagtgagtatacgatgtaatttctccaagaaaaagaagtggaaggggtctgtaaaatgagattgtaattttgaaggaaaatcaataagatatgggctttctaaataattttacacaaatacaaaactaccataaaatgtgtacaaatttaaaaatatcatatttaagtaaatatttttaaaaactcatatttaatgtaattttcacttttgtaaaaatgtgtaggttataattgcactaactctcatttttatacgataatttgtattaatttatattatattatatatattttttgaatgaatattttattatatttaattatgtcttaccacagatttagttatggaaattgtattgtatacccattttattttatttgttttcatttttaactttatttctattttctttaaaatatatctacttttataaatgatatccttattatactccataaattaatataaattatgtactagagcaaagagcaagagtatattaggcaatccactcataaaagtgagtagattttaatgaaatataatatgaaaatatttttaattaccctataccaaaaaaaaaaaaaaatattcctaaacttataccttagtctaagatgggccatgtgcccaacctcaagctccagcatcacaaggtttctcggccctctctactcaacaacaacaatttattgattttcctaaggcgctcaaccatgttcttccaatcacgcttgattactccaactttcttttatggcatactcacatggagaatgttattcttgcaaatggcatagatgattttctcgatggcacaattattgctccggatcttactcgcctccggccttcatccgtgatccattcttccatggatcattagatgaaacagttaacactttgaaacccttatgaccgtctgaaacaatctccggaactactctcggtcattttaatgtagagattgtctcttataagtgatttttgatcaaaccaattacataacttcttttgttgtcatttggacctagattgtgacgtccatctcttcttatcatgagaatttcccttttcaaatctaccacctcacatttagcattggttggaagtaatgaaatgaaatagaatgaaaaaaaaaccatttttattcctctcatttgtttgtttcagactattaatttccctattctattcttattctcactcctattcttaggttttcatttcttccaaacgccacattaatccattcgccttgagatcaagctctttttttatatgtggcacctccgcacctgtaagttcttccaagataagtgcattcttaccatgcttcatagcgtctcacaattgatcaaagtcatggattgaggaagataatttatgggagggtcccaccccaagtgccttaggcaagtcatcatctacatctctacaccctccacaaattcattcatctagtcaaactttgtcaacctcaaatcttgcagaccaagattttgcaagaaccaccttcaacctttttgttttgttcatcattttatttacgaccttgaacctactctgatatcaatgtgttgggtccctttcctgtagaaaatcatgcggtgtcgagccaagattgtaatctatcaagggtatattcaattcaaacactgcactgaattaaaccagccaattctggatgagttggaagaaattattcccaactatattgtttgatttcatgtcctaataatcaatccatttataatttttcttgcaggagatcacgtaatctcatggattgatccatccagtgtgcattgaatagaaattatataaataatattcgatggacattggttgcttccttgagcaagaatagactgtgaatggggtaccatcttaaaattaattggcaatgggatgagtagcccattcatcttatatatcacaatttatttctacacattagcaatgtgggactaactcttaatacaatgagttaaactttttttcaaaatagagaagagaaaagtagaaacatgataaaaaaattagctccatcacatttatgtttaaattttaaaaaatgctacattcatactcattgtatattttatatatactaaaaagaatatatttaaatgaatgtagaaaaaaaaataatgtataattaatgtatgatgcaatataaaagtttgaaataaaataaaaaaaaaaaagtaaaattttttactaggtatttagaaaatagcgtagaaaagctcatctgagtgctctaagtagtcaaccaagggcgagggagtgagggtccactcactagctgaacagactctatctatattgtgtctaatcagtcccctttgaattgcttcagtgacttttagccattaatttgttgtctggttatggccaattattgtcagctgcttcccaagagtattgctaagcactacatattgttaattctctcatcaacatcaataatttgttgtctggtcatggccaactattaccagctgcttcccaatagtatttgctaagcactacatattgttagtcctctcatcaacatcaattttccggtattggcacccgacataatttagtcgatactagttgaaacagaatattaaattaaacatcctctggctgttaagaatgtgtcacttgaattatatcatacctacagaaattgggtttctagcgacaacgtgtgttgtcgttagatctggacgatgaatctgtcatcgcaagaaattgcgacaatatgtgttgtcactagatctaattgcgagaaaggaattccttttctctcgcaatgaacttttagagagacaaaattgagatacaataatagaatccctttgtttagtagacaacaaattggttcattgcaagaaaagaattccttcttttcttgcgatcaacttttagagagacaaaaaaaattgaaatacaatgtagaatccttgtttagtgttatttattgtaaaatatcaacacttttaagaacttgaagtagtcaccacaactaatatgtgaatgatgtaagatcaaagtaataatagatcctatttatcccacaaatttataaaacatgccttttttaattcttttggctgacaagacaaatagctttagaaaacaacagtttaatcaagtccaaaaaagctttcacattgccgacatctgctaacgactgcttcttaattgtatcactgaactcaaatatataggtttgtagattaaatgtcacaacggtaatcgaagcttaattgcaattaaatgtgatttgagtacaggaccaggatgctcatcttttagatttggaggcatgcaaggcttgggaccttttggggtcaacagcgatggaaagacactacctaaatcagtatggctggaataaaggtaactgacttattgacaaacattttcagataatccaataacatattctgtcaaaatttcaagaatagcaattagcagaagagtaacaaaaggtacagagtatataactttggcagtggcaaatgtgaacttcttggagtccccccctgccgttggattttcatactccaacacatcatccaattacaacgtcggcgacatacgcacaacagaggactcgtacacctttctggtgaactggctagaaagatttcccgaatacaaaactccagacttcttcacaactgggaacagctatgctggtcattacgtacctcaactcgcttacacccttctcttgaacaaagtaacaaatcaaacagttatcaacctcaaaggcatcgctgtaagctcccttcaaatacagaatactctgttcatattgattaaactcaaatgggagttcaaactattggtcaactaacttaaaaacgctcatatctttgtattgactagttatatagattggtaatgcttggatcgatgataacactggcaaacaaggtatatacgaatactattgaacacatgccttgaaatccgatgaaacccatgcaggaatacagtaatgagatttcgttacaggtaattattccagtacctgtgagcaatatttaagtcaaggagatggtgaactgggagacattgacatttacaacacatatgctccattgtatcattcatcagcagcatcaaagcaatccgtaagtagttactactgaaaactaccaactctcttttatatacatcgtataatattttaagttttggctatgaaatatggacagaatgctacagatcaagcctcaaataagctaaactacactacattcttgcatgtggtagatcaatgatgttgatccatgctccgccaattatgttgaagcatatctgaatcttggggaggtacaaacagctcttcatgctaaaccaacaaattggacaggttgcgggtaagtttaactttttaaatcaaatacatatatccataacatattcatacttggttaatatgaagttgatttattgattgatattttagaaataatattataaaaaaaaaataagtattgatcaggacgactcattccaatggtattagcgtcatgccgtgtaggtcatacaaataacaatgtgctacgcaataggaaatttgagcagttaatcgattcaaaaattgtagatcaaacagcatacatatatcctaatttatcaatgaaaacaaaatcgaaaattccgggtaaacagctagaaatttcagagagcttaaatgtattactttctgtttattttatgtgtagcggcgtttcttggacagacagtccggccaccattctaccagtaatagagcagcttacaacaagtggaataagtatctgggtatacagttgagtcttatttcagcattgctcttttcagctcatttaaacatgtaaatattatataattgcaactggtattatgttttcaagtttagcacgacataagttaccaaatgtacattgtattatataataaataatctgcagtgtggggacactgatggccgagtaccagtggcatcctctagatactccataaacattttaaacttgcctgttgtgaaagcttggcgcccctggtattctagaaatgaggtaataacaattgatccatagtgatggagtcacttctaactaaaattctttttcattttgctattagcatttcaataaagccaaaaactagatctcaaaacaccacttctccacatcttgtgaataggttggaggttatgtagttgagtacaaaggattaacacttaccacggtaagaggggctggccatatggttccgagctatcaaccaaaacgagcactgaccatgatctcatctttccttgatgggaagcctccgcctccctcctgagaaaaccaatctctccaataacagacataattattctctcattgtgagagtattactcagtggtagtatttttacaaaatcctgcataataagaggtcaagagagaaatctaacagtgaaaaacattagagaataaaatatttattttcccaaaatgtactgccattgtaagcttaaaacgtacgaatgtattatacaatgatgtatatttagaatatgaattacattatactactattaccttattattatcaactaatggaaatcatagaagtaatgggtgtttcagaaactggctttgaaaaatgaatgaactactggaactcaggtacaaagaatggtattttatccacaacatcacccagatgacctcttaatgattttatataaagaagacatgcttttctagattcgatctcttcagtgcaatataaaattcagcacctttctgattctgctgctagcatgcggttaaaccctactgcaacttctttgaacagaaaattgaaatcttagcacatttgcagtggtgtcctcttaccccttgttagcctgcctacacctgtgagaaagctaaggaatatctttaaattagaaaggattgaaaataaaattattcagcaaagcggaaaggacaaagcaaactaccttaactggttgtcattcctctagtgatgattcattctcaatgcctctaagattttatccacccatctgcaagccaagtcacaagagagttctagtgtattaggcaataactaacaaaagcagtatcagacaatgacaaatttgtttcaatatctcaccaaatttatcaaaagttcagagaaacctatatatttcgccaagtgaatttaaaacatatatatttgttttctgtctatttgcacaagtaattccaaaaacacggtgaaaactgtctcaaaatgttccatattcaaatatcaatgtgtgaacaaagaaattgctttacaaatctgtgctcaacaaggatataaagctgacttagatattccagtgaaaggttaaaggaaacaacaattacccttcaagacctggatgtgttggatagaacacatttctcaagcctaaattttttgcagctgaagcagttgtctcaccaatacatgcaactgaattgctccatttatcaggttttggaatgagattgacccaggcactattgcaaaacagagcacataataatgttttttagtttagactagagtaaaagaacttgaagaacatatcaagtcaaaaagtgcaaaatttgcatgttgacactggtagttgactcaatgaaggaagagagataagttcaaaaaacttcattacatcacatagagcactgaacatagttatagtgaacggaatagttgaagcaatatagtattctgtgtgtaaatagcagcaaatatttgttttaaatgaaatgtagaactgttacaaaagaaaaaactataactccggcaagaaaagataatataacatttaacgagcaacttaccgaatggcagaaggtgaagctactgtgacaacaggggctgacagtgcctcctctaaaaccatttggtcaacatcatgaacaggtgcctgcaagaaattactagaaattgtgagcttacttaagtaaatagcacagttagatgtcaagtgagatcacacattctcccccacctaaggtatttacttctttgataaaataataataatagtagtttaaccaaaaccttaactgataataaaatttgtttaagaattttatatcagaaattcccaaagagactaaagtctgccctagccatcaaaaccgtagcataccgttgaatatgtatttagcctcgtgactacaaatccacgattagaaagacctgcctctgaaaacataagtgcattcaaattaaacttctgaaaacatgagtgcattcaaataaaacttagtacttgcaacaagaaatccaacaagtgctaaaattgatctaaatcaataatttcaattgaaaaggaaattacaagtctacgtgattgcattcaatgcaaattcttaatatcaacataaataacaatagagaaggtatgcatactatatgttacacataaataattaaaatatactcatgacttcaatgcaaatacataggtatttaaaaaagaaaaccatttaaaatggaatggagaagaaatttctaatttgtcaacagataagaccatttattagtatactaggctgtctcaatgtgtatcagttccatgtttatgaaaaaatcttcaaaagtgtctgagtagaaatgttctccataatttaatatctaatttcattagtctgaaagaacaaagagggtgacaaaacctctgacaaaccatatctcagttgcttggaggtcttataatcattcaataaatgccttgagcaggttttcatagcagatatattgtttattaatattcaattggtacaattatacactccgtagtgcattaacagtccactagctaaaaactcctagatcaactatacaggatgaaaattagaccattcagacttcattaatagagtgaaaaatcagattgctgagttagctttattgtaaaaagatcaagaaaaaaaaaaacaaataaaaagaatcacagtgtgcagaaaaattccacaaacctatctcatggctggcctttactgatgcagggtataaaacggtgcactttgtgttgctatttttgggaagctccgaagccaataccttccctgttgctgaagattgacaataagaaaaagatattagttttacaatgtcagaagccaaacagtgccttttcttttctttctgtggattgcaatcataacaatggccagagaaaacaattttgaagagaaaccattaaagcacccaacagtaatgctttgaaaacagtttagcaaaagaaagaaaacattaataaatgcttcattataaaatccagtagaaaagtaaactttagctaagctaacaaattattacattgcaaatttctgcttagtggaattaaacctcaatactcaaatataattataagaatttcaagtctttcagtaatcaagtgagccaagtgacacacaatgtaggtgctaaacaaaagccagacacatgtatcataagtaccttttgaaggcatgaatgaaacattgagagattgttttgatgattgcagtacttcgttaaaaatgcttgctgtaccagccccaacaaccgctattttcacatttggggttccagaagccctaaggaacataaccaaagtcaagactatcaatactaaatcataaaaataaataaataattatagcaatgagttagattttagagattatttgttggcactagaattaattgataatcatatagcaagaccttaaacagcatatccattattacggaaaagacaatatatgtttgaattattgtacaaagacttttctaaaagggaaaaaatactaggaaacttcaggagagagcagtagagaaatatagaacagatatattatattatcattgtaatctctcagataaaaatgcatgatcacttgaaccaataaataaaaagagagggaatacaaaatttaatagcagaaaccacagttcaagtcatgtttaagcagagcagagtaaacaaaaaactagaggaaataagcctgtataatggaaagtgtccagttagcaagttctaacccttacttccatacatctaaaaagactgaaccagcttcgggagatgttatgacaatccaatcgaaggttgtatctgctaccatgaagaaccaaaaaaaatcagcaaacaattcttgcataataattgtgccaaatttaatgagctcgtaattaaagagaaacatctcactggagaacatgttttcaattagtaccctaccaaaatattaataaaaagtgaccatgcatcacaaagaaacagaaaagcaattctaccattagaacgactgtgtaatgacagaaacttatgcggatctaccatagccagcatatgcaaccattcaaaattgtaagtgcaatgacataaacaaaatattgatagataggatgctccacttgaattaaatcagcataagagaatcgatcgatagaatgttccagaccaacaaaaaaagggggcttgatttaaaccacaacaatcttttggctacaaaacttgtaggtgaaatttgtttaccccaaagaaaagaaaatactaggggtacataacgacttgactttttataagaggaaaacaaccatcatgtgcacctattatcaatccaaaactcttccaatcggtgtccatacaatgaaattacgaaaaatattgctccgtatcactatcaagcagagagaaatctgatgagattaccacttagtacagcagaaagcctatccagatcaggtccctttgtatgctgaatgaggggaagctccaaacagctaattccatgtttagcctgtaatcaacgtgtgcaattctcataatcacaccagggtgtatttaaccacacaaacaataaggtatatatatagtatgatgtgcagacttatttatatgtcaacatagcatgttcatacataatgtatactaataaagatgacaccattgatgtgtagttatagaaaacggactggagtataccccgttagtacattacaaagcgagctgcaaggcaccaccaaagtcaacatacatggcaataatactgatgttgctacatgtcagacagaggagccatatgactactacctctctagtttagccacatcgatggtgctttcgacatcaatcatgtatttttacatgtttacaaattatagagtttttctatttgaacattcaatttgcattcttattactggatcttaaaattttacaagtcaaagagtatctattagacgaagtgaataatttggaaaagtccaatcagcttaaaccaaaccagcccgttcgaatttattttcaatatcgatgaacagagtttcagcaaaatgtaattatatgctgacattttgcagcaatgcaaaaggtaaaaacgaaaaatcaaacagcaacaattttgaaaaataaagtgaatttaaataataggtcagcttcaaggtgatgacttaaaaattcatattaaggaaaagtaaaagaaaccctttaggccaaattgaattttcttaattactctttttcaaaaaaaaaataattttcttaactttcattaataagaacttcacaactacctgaatataaataaaacaaacacttttcgcagaaacatagctactaacatgagagaatggtggggaaaaaataagccatgcctagctgaaaaacatgaaatgtcagtgtgggatgggctggtgacgcgttcagcaaataagtgataaactatagtgccgtacagtaaaacctcgggcggtttcaacacattatatattgcggcttaagattttaataaaaaaacttcaagtcaggattaagtaattcatcattacttcgtcagactctaatgtacattgtaagaaaactttgaatttagatacccacttttaaaaaaaaaaataaaacaaaaaagtcagtataagaatatagaaacgcacaacaacaaaaaaaaaagaaagaaaacggaattcaacagataaacgataacactgggaatgtgcattcagcttaacatttgatcaaacacctaatctggaaacttcacatgcatgaaccgagaaacagatatgcaaaaaaaagcaactccaatacaataaggagaccgatgtggttcaaagcttttaatcattttggatccaaagcacataatacaaaaccctaatcatggaaaagcttgcgaacactggtcctagaatcgcataagacgaaaacctggaagaaaatataatccaactgcgataacaaaagaagaaatgaaaaaaggaataggagaatcaccagggcattgatgagctttccatttttaccacgctctctggtcactacaactttagggcttgaagtcaaaacagaagacgaagaagaagcaggttgaatagtggaagaatgagcaaatattcgagttcggcggtgcagtaatggagaatgaggaggaagtggagctgtaaatggtagagagagagaggagagagaaagtgcagccattggtgtggaaacgtgttgagctcacaggaccagctatttatttcccaattaagtatagcaagtagcattattataatttctgtgtaccaaaaagataatattttatttatcgaaatttgattatcaaactgtgctgattggtttattattttattgattcatctacacgaccattttttaaatatgtaataacttgaacgctgtgcttaatattttcgtatccgactcaaaaggtcacagttggtacacctgtagacgttagtggatgccacgtgaaagattgtggtagggccgtgtaatgtggctcgccgacactctagcatccccaagaggcatcgaccgcccaccaatcagcttgatagcttatcatgtgctttctcttgtgagcaatcatcacacgccacgtgttatcagatcgcttctaatgtggaccgtggatttagttgaatccggacaaaaattggaagtgtcatcttaatcgtagggtgaggagtattaaagagcgggcccatgattacttggtccattgtaacgttggtccctctgcatcccaaccgctggattgggtgttgtgcacccccggtaccaacattttgagtacgtcgtcgctcttcatgactcttctgggactccagaagtcatctttttctttttcttttttttttttttttaattaagcaattataataccaaacaataattgattattgtatacaactatatatgttttctccagaaatatattcatcatatgtgagtctctgatcaatatatgagcaactaatattccaaccattttaaaaaggataaataaataaactagcattccaatcaaattttcatttatttgactttcatgtcttatcttataattaataaaagggtaattttataaatatgaaaaaaagaaagttagtttatataaatatggtaaggaaacttaataagataaaatgtgatatttaaaataaaaacttaatatatatatagtactgaattaccataaaagatattaaaatttctttcatattttttttaaaaaaaaaaaaaaaacaaatgaaactacagtgatcgccaaagttgttgtcggtgtcagaaaagtcaccagagtagctccctgtatcagaaaagtcatcagaattgtcactgtcaccggaaaaataatttcttggtgattttttcagtgatttttttggcaacaatgccaattctgacgaatttttcggtatcggcagcaattctccgacgactttttcggtaccgacagctactccggtgattttttcgacaccaacagcaaactccggtgacttttttggcattactaacaaataaaactacctaaacaaataaaaacattaaatatagaatttgaaaannnnatttacatatatatggcatatcaaataccataaaaatctaaaaacaaaaaaatatcatataaattggacaaacttaaaattatcatatttaacataacaacttttaaaattcaaagtataatttcctcataaattaattagtattgtattgattttgatttgtaaagaatatattatacttgattttttatttggctgaatgattatattttttcttgatttaactatcatttttcaaaagaatatatatcacatataagtggtttttttgattttctgatttattatttttctcttatggatatttattgcatttttagttttccttttaaatactaatttatttggcaacactatttcttgccaaatacaaatattattaaaattgatttttaaaacttattacaactaaccaaatcatttaaagttaaacaaaaagaaagataaagaaaactaattcaattatatcataattttttaaatatataaaatttagttaaaacagggtattcaaagggcatgcataggacctaattctctcccgcaataaagaagaagaaggtcactcgaaagcttgtatctcgagctaggcttcaggagcccccttcaaccgaagaaaccacatgcatgattgaatcttgcaatcaggtacaagagctggtattaattctagagttggattgctttcacaattgattgtagagaaagagctataggaacatcctaaaacgatgatgcttgaatcaactcgtgctaacctacagagctccaatgaagagttacttgttaacccaaaaacttaccccagtgacgtggacattaatgtttgacacatcgtaagaaagaaaacattatgaagttgagtaatcctgagtcatagcagttgacctgagaggggtcccttgctatgtccctaggttaacttcaagaactccagaatagtgtttggatcccgccaagttgtttccaactagctatcttttgatgttctataccatgaagacatgaagcatccaattccaagtcccaagaacagaaaatacacgaaacaacacctcgaaagtcaacccaggtccctagggtttcacccagcgtctaagttgacaacctaactagggttttagtttttcgagatcgtcttagtgaaaatgggtcaaactttgtactgggacatgaattatacatgtcacgaacatatttgaggcattagaatcatattcggagcactttcatttttgagcaccagagcaccaagtgcctcaggcactcagcgcccaagttgacattttgtcaacctagggcacttccaagcatcaaactaaagaacaatcctgagcattttcttcgtcttcattaaaaacaaggaaacaagtgctttcggggaagaaatatactaacctggaggccaaaggggggctcattgcccaggtagccattttgtcaacctcagccatttccaaggagcttctctaagaattcttctgggcatattatcctattttgttaaaaactaagatacaagtgtttttcgggaatcaaacataaacatttggtggcctgaaattggacccagcgcctaggttgacacctagtgctgggtctagcgcccatgttgacattttgtcaacttaggctgtttccaatcatatttccaaaaaagtgttatgaggatttttttttcaatcatcaaaaataacaatgatacaagtaaactcagggagaaaacgagaatcatgagggacaaaaagttgagcccagcacctaggttgacaatcaacctagtgcgctagtttcaatcatctaaatgcaaattttgctctaagcattctctccaaaatggtaaaaaaatggggtaggataccttgtcctcaattttaagaaccttggaagtatcaaaatgacttcccagaagctccaaaaggagcactcaacaccaagttgacatgtgacctggtgcgttgggttctgcttatctgattctgattctatattgagcgttcatttagcttttcatggtaaataagagttatgaactcagacaagtcaaattcaaaacttcatattttcacttttttggcaagtgacttagtcgcaaatcgggtagtttcgagtctcccgattttgcgaaataggaacatctttgaaaactggtgaacaacttcaccaaaacacgacaactagctaagtgatgtaaaaatatcacttaggcatcaaaaagtaaatccttaacacgtttttttcttggcctagcgtctaagttgacatcatatgtcaacttgggggctggatgtcaatctaggcattggtatcagagcagcctttagtaaaacagtcataactcactcaatattgatctaatttacgcgattcaacttgcattttgaagctatttcaatgatctatcaagttatttctcacacttcaatcgtaattctgaagttatcaagtccaaattgtatccttaagagagttatgaatttaagttgcaacttactcaaaatggatcctacaaacgcgactcaagctctagaaattgaagactaacctccagagtcaatttcaccattagatcatcatcaacggtcaaaaatagcctaaatgtattttacatattttttggaatattttattacctataaaaggaaaggtcatctagtttatttttgacattcagaaaagtactcataagatgagagcatctctctctagttttctctctagaaacttgtaatcaatccagtgagaataaaaactcgaagtagacgtagctctattataattgcgacactgagagtgaactactataaattcttgtgtgtgctcaatattttacttagttacttctaactttcatcttgtctatacatacgagcgagttggccaaatttctacatcaatattttggtgctttcattgagagccacaactcaagaagacacttacaagatggttgcaactcgatccacaagtgtggaaagaagcacaactgttgaccaacagactaggggcatgccagtcactggaactacacctacatctcagatgctaggtggaggcctcgaaaccaactccatagctcatgctagtttttatggtccttatcagagttataaaagtggaagtagaattttgataaaataatttttatctaatatgaaccataagccaaaggatctcaacataatatatatagattaaatctaactgctgaaagaaaataaattacctcttgaagcctatcagggtatccttctttcttttcgtataacaatcgaacatccaatccaagaac

SEQ ID NO: 15673 - DNA, 3362 bp, Cannabis sativa
  modified_base (2094)..(2096): a, c, t, g, unknown or other
cttggcactcctcaacacttgagttttgcaatattgattcattccttgtaatcctaagggtactatagcagatcccacctatagtgatatggatagtaattccctcggtattaatacaactaaaaggggagtaggtcattacccgctatcataagggggttgaacctctataaaaaatcttattgtctatagagtttcattcttatttgtgcaaacacatggcaagcattggatctgtacgaccccgctgtcggttgatcactttttgaggtcaacactaggcactttagaaaatctttggcttttgtcacatttttttacataagcttttgaatattcaatcatggtcgaccaaaaacatcattgttggaggattttcttagacaaattttgcccccagcatggatgccacaaaacccctcattaactttagtaagaagttgtgtagcttcttcttttaaaacacgccttaacaaaagtagagagaaaccttgtcggtacattatttgtctacaattaaatactatacaaccttcctcatcatcttttgagcctcatttttgtcacttggaagatttctagtttcaagataagctaaaattggagtcatccaggtaggagtattgtccatcatttttatttcttccgtgcatgttatgccagggtcttccaagaactgaactagcactagttttccttatcagccactatgttgctcgccaaccgtgccaatgcattagaagttgcattttcctctcttagaattttcctagtggtgtattctttaaactgagctaggatgtcttgaattttgctcaaatatgccattattttttctccctagccaggtattctccaaagatgtgattgacgaccagctgagaatctctacaaatatccaggtaatcagcatgtacttcctgagcaagttgtaatccaactatgagtgcttcatactctgctacattgttggatgttgtgaatccaaattttaatgctccatgtagatgatgcccctaagtgtaatgagggctattcttgcactggataattgatcagtggatgattcatccacatgtaatttccagactagtctttcatcattgctctgctctagcaggggatccttttctttctttggctcggtgtcattttctaactctgttatttcattgcgtgtgcactcagctacaaagtcatatagggattgaccctttattactatccttggctgataagtaatttcatactgccccaactcaatttcccatttgagtagccgctcagaagcatcaggtttttgcaatacttggcataaaggctggtcagtatatacccgaatagggtgatcttggatgtatggtcataaattcattgatgttaagagtaaataataggtcaatttctcgattagagggtattgactttcaccatctattagccttttactgacattatagaccgaatgttgggtgttattttcttcttaatctacacgatatttactacaaatttggttactatgaggtatattcctaattcttctctgtctaagggttttgatatcccaattcttctccgtccaagggtttcgataagataggaggttgttcgagttacttctttagctcttaaaaggctctttcacactcctcggtctgttcaaactttttacttcctcgtaaaatattgaaaaagggtacacacttatttgttgatttgacacgaatctgcttagtttggctatctgaccagttaggattcaaacttccttgatttttgtgggcaatttcatatccagaagggcttgaatcttctcaaggttggcttcaattcctcaggcattcacaataaagacaagaaatttacctgagcttactccaaaggaacatttgaggggattagtttcatgttgtactttctaaggattttgaagcatatgtccaggtcctctatatgaccctagcctttctaaatttaacgagcatatcgtccacatacacctctattgactcaaaatttggtcaaccagcagcagagccatatttatgatggacaatcaccacgtgtaaataagaacaataaatgataaannngacacaaagatttatagaggttcggcccccttatttagcgggtaattatccacttcccttttagttgtattgattttagagataataccatgcaaatcataggtgaaaaccttatgaattctagctatggctctctttgattgatacaacggtcagaacaatgctgggcagatcaagaactaatgagttcttgttaaggactaaagaagatatgacttagtgtcttggtggcatggatgagatatgagactgaagagagggagagagaggggcacgtgtatgaggcctaagaaagcctttgtagcagaatgacttaggtttttagagagacctaatgccctttatatagtgtagggcttacaaaagatctaattcaagtaggtagagatatccctcaaaatgaagagatatcacctctttttcacatataaatatacaaaaaaaaataaccaattaattgctcataaaaaataggtaaatatatgaagttgaaccttatgggttgttgaagcaaactcgtagttgagagtgtttgtccaggttgaaagctacagagacaccaaaagtgtttgctagaagagcagttggctggtttatgttgcaccgtggccagccaggtattgatcctacaaccccaagatatgccttccagctttctatgtgcttgtcaacctttccatgtgcctgtcagctttggtacgtgctggccagccttaatatgtgttggccaaccttagtatgtgttggacagtcttagcatgtgttggccagccttagtatgtgttggccagccttagtagcttctttgtataattatccttacaaaggtcaggcttccttagtcaaacaggcccttcttgttctaacagataccttattggttggccagcttatactcaaaccttggccagcctataaccttcctctggccaacattttaaatttgaccagaagatcaagagcactgatttgaggtgacaagggtgatcctcttgttcggtcgagttttacttcggtgagttttagatcagttaggatttgtacgaggctctttagttgatctatttgggttgcaccactagatcacagcaaaataaatgtttatgattatcatcataccatatctccaagatcaccatatgtatgtgttggaataaattttactaggatctagatttactaaaaagtatgcttactaacatcctaaatatgaatttctaaaataatagaatttaaacacatataaagttaagaaatcttacattg

SEQ ID NO: 15674 - DNA, 7745 bp, Cannabis sativa
  modified_base (7582)..(7583): a, c, t, g, unknown or other
ttttttttttttttttttggtactgattattatttattattattattattataggtcggttaaggaagcaacaaaggcaaagtcaccaaatcttcgggtgctacagagaaaagaaaagaaaagaatgatcgtacattcggccacttcaagtgctgcttccaatatgagatagataaaaattgatttgtttgcttagatagatattctttgttattgtagatacagctaagctactagggtgtagctgctgctgtgtacaagatcatatgtacatcaaaaatcctcctaattaattccaatcacttgtactgaagcaactatgtaataataaaaaatataaaatatgatttccattgtaaaattatttataattctgaatttccatcaaaaatcatctacttttgcaccattgtccatcccttgtattccatccaaaaaaaatcatttgtacaaagatcatataaaagatgaatttccattgtgaaattatttataattctgaatttccatcaaaaatcatctactcctgcaccattgtgttccactcccttgtgtccatccaaaaaaaaaaacctccctcagtaatgaatttttattattttacaatattatgcagaactagccttgaaatttgttaaattcctccttttattattccaatttgtactgaagcaaacatgtaaaaataaaaatataaaatttgaatttccaattgtaaaattatttattattcaatcacctcccttgtcagtaatgaatttttttatgaacaacctttttcactatattttatgcagaaccaatttgttgaaaagccttgagatttgttaaacacctcccttccgtcgatacccgagtatctgaaacaacataagaaaaattattattgtgatttcactagcaaatatatcctcaagttttaaaaacattagggcctattttcacctgtgcatgtacagcttattagaccaaattatgcttaccatatgatctggactcgaactgcaatgtgctttaaccccagccaatgtttcttctgcttccaaaacttgaaggtcatctctgcatggatcaaccaccagggacgttgagtctgtcatggaggctgttttgtcatctttgaagatggatttttgtcctttaaccaccaaaaattcgacttcttcggctttcagaagtgtctggtgtgcaacatactgtatacatcacatcattatatgctttctgtcaagatagactatacagaggaagaataaagcagtagagtaacattataaggagaaaaagatctgaagcaatagcatctcatttaagatttcaggagtgtttgaaggtggggtaaagaggttaatcttgttataatgattagttttatcatggtatgagaaaatgaatgcatctgtattgtatttatgacaagtaaaaagaaaagtcagcattaggtttttgtcagcttatattcagcactctctccagtttatcgagcaagttaaagagctcattgtcaagaatcgagcaagttaagagtaacaacaatggaaccataacgataatttacaaatggatcaacaataaagttccaaaaagaatcttacttcacatagatgtttaacagataaacttggccgacagcaaaggtgagactgctgcaaacttggtgtactctgtttgtccaaagaaataagcacgagatgtacatctaactgcgcagtaataataactttttattaaggttgaaattagcaagggaaagtagtattagcactatcagattcccataatgctactggacaaaaatcatagtttatcatgatttattgagaagctacagaacagattatagaaattcatcagcatctttatacctcatcactgttttcctctaagctatgaaggtaatcaaccaatttggttaaacgagtgtttcgagaacttttattgttgcaaccaccagcatttccatgccgggtgttactacgggcaccacccctgccccaagcaagcatttcagagttccatgcaataacaggagaaattccccgtctctctccattcacctcaaagtcattttcagtgtttccatctgaattggccactgatgacgaaggctgagaagaccgagtacctgctcgtctcttgcgtcgtctatgtctggtttctatatgattctcatcatttgaagattcacctttccctatattgttatcatttctttcctcattgtcttcagattcttgaagctcaacagctcggctatttcttctccttgaataagaattccgatggttgcgctgtgtccttgctgtatatgtatccggtgtgtctttcccaagtgtgcgtctcttaattaaagcttcagattgtctttgaaatatttgggcaattgatgcttgaatctacataaccaaacatttaaacagaacaagagcacacaggtgagaaggcaaattatgagcccataccaaaatgtaaaatccctttcagaattctctggcataggaattgaaattgaattattatgttcaaaaatttcaaaagacatgaaaaaacctggcgttccttttttttttattatttgtgtgtgtgtgtgtgtttccaaaagtgatatcatctcaaaaacataaacaaatacagaacattccaaatagtgacaggttaaaagtaggcaattgtccatgataaaaaaacacaaccagggttgtcacaagaaaaaggagcaaatctgtatttaaaaagtagagtcatatttgcaagtataacatattaagacaacagcagaaagtaatgggcgtcaagaataatgcctataaatgtccacatttataatgaagtcacatggaaatcattctcctcagaataatagtctttaatgagtgatatatgtgaggatactgcacacaagcaatgaactagactttttacgcaaacaaccagaaaagaagtatccctgaaacttacctgcttatttctagtcctctcgtcttcgtgaaatgctaattcctgaggaaactgaaagtgaataatgctttctttggaaaaaacatcatcaaaaaaacatacataagaaagtaaataacaataaacaaagaagctaatccaattctacctcctcctcatacttctcaatatctggatataaaatagcaataagggcatcatagtttgggtcatctctcagggaacgtcgactggcacaatgtgtccggcaagcagggcactcattgttcctggttatgcatcaaacgtcaaaattaaatcagataaaattttctactacaattttataactttattcttttttctgatattctcacaattaataaaagccaaatataataacaatcaggacagtaatacaaaagaaagccacaaaaaagataaactgttatagttcaagactacataccccattcgcattgatttgtcaatgcattccctgcaaaacctgtgtaggcattccattacagtacgtgttttcttaatgatacctgtccgaaccaaatagaagtttgttactttctctccatgaacacaatcaagacaatacaaactgtcaatactatgacttgacaaactcaagatgtcgtaaaggaaaaagtcacaacaatgcataaaacaagtatggcatccatgcttgaaaaattgatatagcttcaactgctgatcttttcagtaatctaaggttagttgtactggctaactagtttcttcagtgattaaattgctgatcttttccataattttattttgacattttttatatatgattatctcatgatatcaaaatatgaattagagacggattatatgaaaaaaattcatgaaagaaaatcaccaagacaaatcgggcattgcacatctttacgtatttctggcagttctacagagacaaatctgcaaagagaaacaaaaagtaaatgcgcgaaaaacaatatagaaattcataaatataacagggacatctaaaatggtcattaatggcactgaaaccataaccaagaactgtaaacaataacgtacgatcccaagaaatatgattaagataagatagtaacatgactgtgctgtgcagaaagagttcagagattgccattgtgggaaataaaccacatggatactggctagaatcataagcgaaaacatggcctaaatcctagcatgcaacactctccactcatcaactaattgataatataataaacaaaaacagtactgaaatgcataaacgattatgcaaactacgaaacctctataattgaaacacattatcctcttctaagaaaacaaggtaaacccattaatatcgacaaaatgaaacttccaaatataatcgataatggtcgttaagaaaaattcaaaaccagctagtacccagaaaagatggcataaaaaaaacaaacacgaaaatgggtagtaagaagacagggcagagtaagagaaagtactctggtttcagctgagagctcgaagatggagttccctcggaatctgcaaatataaaaaaagaaagatagaaaaaacggaaaaacctcagcaaatcggagaaaacgaaactcgacccaggtaacaaaaatcgatcacaacccaatgatacacatcgaatataagaaagaaaagaacaaaaagtcacgtaaccctcttcatcttcatcctcatcatcgtcttcgtcgtcgtcgtccgacgcttgttgtttcacttgttcttctccttctgcatcttcttcttcagtttcctcatcaagtgactcttcttgctcttcatggcgctgtaaaataagttccgggtcgtccttagggtgggctccggaccgagattgcttgggcctgggatgaagcgcgggctctgcatcgtcgtcatcttcgtggtcgtggggtttttccggggaacaacgcttctgagcaggcattgtcggaagcgtagaggaagagaagattcggtggtggtagttgatatggggatatgggattatcgggtttggagatggagagaagaaaaggaagcagtaacacaagtaggagtagaaggagaagaagaagaaagcgaagacgatgtgagattttggctgcttttatttatttatttattttttttaataaaatattcaattttaatttaatttaaagaaataaaatatagatttatgagagaaagaggttacggcaaaggaaagtagcactacatgtcgcctaggtggacgcccgcctgtccccgccccagggtgttttagtcttttcactgccctttaattatctttgctaatgactatggaggaataattattagggtaaacatgttactacttaagcaatgtcattaaaccatattggaatattttgatgtaaggtagtatgaatttttaggctttcaacagtgtctcaaataaatatgtgctgggtttcatgagttttattactatttcaatatgttgcaactagtaattgaagataattgcaagttttagttatgaaaaatactaaaagatactagtagtgtttagtacttttttagttcttatgtctcaatattgtcattagtctaactaagtattgaatctcatataatttaatataataatttttaggaaatatcactagtcaattgcaagtcaacatgtttagaggtactactggtgcccaatagcaatattctttaattgtactcggacccaacccgtgaaatgattcgagtttgggggtttcgtgctcgcgcgtttgcgggttcgttaatttatttatttttataaaaaaaaatcaaaatttatgtgtgattttttttatatattaaattaagtatatgagttataaacttacaacgtcacaatctatattcattagattaaaataaaataaaaaatgcattaatttcaaatctaaaatacaaaattcaagttccaaactatatataatactatatggatgttacgtgtcgaaccacgtattgttagttttatttaaggttttggttttttaagattttgataactaaagtagtatgattatttaaacgatttgttttataaaaataaactgtgtttaatccgtttgtctaatcttttaagcacactaaaaatattacatcaatccttcctccagaagtacttggcccaatagtgttcttcaacttcgtaatcagaggggggaagaaacccatttagatcatcttgtccttccaaaaacagagcttcagtctctcctagcagtttcaatcgttcacatctatatcatcattgtgaatcaaaataacttgtaaattaagatttcttggtaaaatattagagagaaaaataaataaacaaaaaagaattgcatctttagagagtgacaagaggatcaacaaaaccactctgatttgccatgcttccgtgcctagaaacaagtccaagtgcactctgtcctgtgacaggtttggcaatccatgagcgaccttgatcaggtccatataacttgatttgatccttctcatcaggatggatccaccttgtcagtaagctcattggctgaaccaattatgtattcctctatagatgtgtcacttccaactccaagattaaccaacaaagccatctcacctattcatctcacagaatttagtacaatgtaacaacatatgagtatgagatttaaacttgcaaaatcatatacaacaaaagaaatatatcagaatcttgacctgcaacatcctctcttcctcttagcctctgaagaactttcttagcctcaatcatctgacatttacttacaagccaatgaagagactcaaacaagaaaaataaggtcgaaaagaaataaataacagatggaattgaaagaactccaagcatcaagctctagtttggtttggcataagggacatggaaaacccatacaataagagagaaacattccaccagaaccagtaaactgtgggagggtattaaatgatcctctaatcttgggtagagttgtcttagatattaaactaggactaaagtaacagctataccaataccaaaaccatcccaaagccttgccaacagaaaaatatagatattaggtgaccataacattacaataccactaacaaagtaaagcatagatgagataatcaggaaggaacgacggcttagagaattagctatggctcctgaatcagcaagggaaaacacctaaaagcgattggaatatgttaatgcttaaaactttttatttaaatcttttaaattatgtatagaaagacaaacttgattgactcatcatcatcaacatgagaaacaacttgttcttcctgttcatccgatcaggagtatgattctgctcctctgtttgttgatgccgttggcggtggtagtggtcgtcgtcaccccaaacttgccattgctgggagtgttagagccttggtcgttgtcgtttgggaataagaggattttggggaatcgaatccagatttggggtagtcgaacctggtcttcattctcctttccttagattgttcattttggtgtatacttttttttgaaaaaaaaaataatgaagctctcgtcacgaatggttggaataatctttttccagatgcaaggttagaaaatttagaaatttctgcttcnnatcattgtcctattttgttgaatcttaatttatttagaaaaaaggtcaatttaaagaaattttagtttgaaaatgcttgggtgcgtgagcctatgtatcgccaaattgagcatgatgattgggatgttcatgagtcgaattctttgagctcaaaaatcaaat

SEQ ID NO: 15675 - DNA, 9161 bp, Cannabis sativa
  modified_base (7392)..(7399): a, c, t, g, unknown or other
  modified_base (9125)..(9135): a, c, t, g, unknown or other
aatagctggaggtatttcgatcctatagttttatagtgtatgtatttgtttattccgcatgttatctacacatacatatatttcattttatacatataaaaatctaacaattcggacttagtgcaaaaatctaacaattcgcacttagtgcggatggatgctgtttgactaaaaaagtatagattggatcagatgaacacccctaccagaagacattgctcaagagcaatgatttctaaacatactacactttaggagtggtcatctaacctgagtactagtttttttttccaaacatttgagcgagatccactaaaaaagccacctacttaagagtaagtgttcaagtgttgtgcactttatggaatcatcaaccttatgcacttattggtagtattttcttaaatgtttactgttccaatatcttggcactagaactagtttcatgttctcatcataccgaccaagtttgtatgctctaaaatctgtaagttctattacttgatatggtccttcccaataaaatccgagcatgccagctacactgtcttttatatttaagaacactcttccaaggaccatgtgaaattattttacaacttcacagtgttcacactaattttataggatttataggacacgtccccttaaactagtaataaaagaagcataatggatactgagaacaatttaaaactgccgtcgacatctttttctcttcaatgtaaccttgaacttcatttgacagaaatttaatcagacctagtaagttaaatggctatacacgtgctcttaaactagtaacaatagaagaataatggatacagaacaatataaacttgtcttctacatattttctcttcaatgcaaccttgagctttattcaataataaattggatttgacagagaaatttaatttgacctagtaagttaaggaaaatggctaaatacaagtaatagtgttatacagataaggttgtacaaaccctttaaagctagcccccgaaaaattcttaggttagcttgatgattttgtagacggacactttccacaagagacgaatttcaatagggagcgaggtctccttgctctgattttaaagcgtgaaagctgcagatagagcaaagttgtgagttacatcttcaagcagcgacaatattattgtcattatacataaactaactagctcccaatattggaatctatattattgtcattataaaacgaaaataaacgataagcaaaaaagttagattgttcagaaagaaaaaaaaaaacaaagtttattgccaaataaaatactaggacaaccagaagtcgccagatgaactgaacaaagaggtcaataagcagatccaaaacttgcatactcttataaatctagtacatccaaataatccagtaatagcttggcgtacacaagtaagcacaacagaagttttcagtattttaaggggttggtcttgaagatatataattcgaccaagataatcaaggcaacgagttacggtttgtatacgggcaagaagaattaggctaaagctacggccttcacctgttgccccacacacaaattaataagacttaaggcaagtttattgtaatattacagtaaccatgctttaccttccggcgagttactttagatgctttccagcaaagcaaacttctcgatcgaggttccagtctcctgcacataaagtaaatccataaatcaaatgaaagggaatagagcaacaacattaaagcactctacgatggcatagaaattgagaattctctctttatttgccgacttcaatgtcagtaaagattgtagatgaagtgagaaagataatggcaatagaataactcacagattttcctgttccagcttttcagcaatcgaaacagctttgcgctttgaccacccattgcgttgggaacatccctctgcttgttgaattacatgtgcaagagatactttgctcctaactatgctctgactctgacatttttccccaaccttccgcctatctgcaactgaatcaacacctgatttctgttgggaagttgctgcttctgctcccattgcaccttttaaacctcttctaccagattcttcatggttattaacatgctcatcacccttggtttcccttggagaagcagctgtttcaacaatctcagtcttacccgttttatctgctttgaaaggcaatgcctgagcttcaccgctcattccattcatatctctaatctgcgacgagccatccatagaagctggcaacataagaggacgcacccctgttttgaagtcttcctttgattcacatctaatttcaattgtgacagcggatcccagaactgactcaaatgcctgtaatatgtggcctcgaaatttctcagcagtagatttagttagatgtgaactgaacactagctgcacggtaggagctgcaagagagaacaatcagatagcaggtgataatagacactaaaaataataaagtactttgatgtataagaaaacggtaactaaatacataaaaccacaaaatttgaaaggaaatgattacggtaaacagtacaagaagaagctactcatttcatcagtacaattagatagtctaagcataagttaaggaaaagcaaagaaaggaaacggatgatgccagtgagacacctaaggccacccaaatgaaggacatgacagttgaactcatctaatgttcacaagccattacaatagataatcatgaaaatgcaaaattaataaataaattacaagagagagagagagagagagagagggaatactagcatacatctttataaacaaaaaaaacaagcttattactatcaaaacagcaatcttattattatcaaaaaagcaaggcgctgttcaattctcgtcaagagaccaacacttttctttttgtagtattagtatgttgtataggaagaggtaaaacgcaaaccaataatcaatagtgtccagaaaagtttggctggaatgacaaaactagcctaaacaagaaaattggttgataaatatacggatacatgtctttgtacatctaagtatcatattggggtataagaggcacctataaatgacagtaaatgcagactaattgtacctgcaccgaaactgacagacatcagttttccttcttggtacaagaactctttaacaccaacatactgaatgttgtgaagcacctccaaccaaatttcttcaattttacggctttttccagaaactggcctgccactttctcttattgtatcagtagaacgtgtagatgtctgttgaggggccatagaactaccattatgtcttttcctatccaaagtagcatccttcattaaactattaccatgtaaaccagaagttcctgcttgtcgagcacttgttgacaaacctctctggctatttagcaaatgatcttgctcacttgcttttctaacaacatttcttccccccacattattaaaggccaagggactatggttaaaactagtgtctcctgaggaactaggcaacaaatattgttgatcaggtgcaagctggagcagtgcagctgttagccatgtcagcttgtcgtttgaagttcgtagctgtttttcggcttcagacagagttttgagagcttgacgtaacttttccatatcttctttggatactgtatgcatcaaatttagacataagatgtttaaaatcatgatgagagtaagtagattgagctggaaacattactgaaaaagaagagtatttgtccggcacaaaactaaaaccagttaatttctttcaaaacaatgaaggttattattattttctcctttcttctcttttcctgtcattttctcgataaataatgagatagtttacttcttttaagaattgtgacttgtgacgagaattatataatagtgattttaattttatataagcattaatttacaaccaaaaaatccaaatagttaggtcttgatgatgataataaacagtcatcgtaaattaataaaatcaataaactttatgactcacgtgggtggcggcgaaagaacttccgtcttggcctctctcttgtacaatcataactgccagcaagtatatctgtaataattgttgctagttgggacatcaagcctaatggctcaacaccagtttccattatgactctcaaactcttaacagtgttaactgtatcggcagataatgctaaatcaagaagatcaaccagtttctcatcacagatgagcccaacctgaaaaatatataaatgattttcagagtgtgacaagcagtatatttacattcacaaaaagaagattatgagcaagtagataaattatagcagcaatgtcaatgaaaatgtgcttgcaataactgctcgatattttcgaaccagcactattttcaagatttaaatatgtaataagaaaaaaaacacacacagtaagacattgaaaagtataatactgataagaaacaccataccagctcctgaaccagaggaacagatattttctgaccaagcaagcttagttgctcaagagtcatctcggcatctcttaaagaaccatctgatcgtgaggcaataagttttagggcatccttatcaatttctaaatcttctttgtgtgagatccactgcaaagtatagatgatatctgcatcttttagcttcgggaaaaagaacttttgacatctagatatgattatatgaggcaacaaatctaggctcgaacagacaagaacaaaaacaacccttctaggagcacgatcaataacctttgatatagcactccaacattcaggggacaatgtgtcacagtcatcaaatatgaaaactctgtaatgtgatggcagctgagagataaccatattgtcaagtagatccataatacgctcaaagtcaaaattacttacagggccaacttctcttatatttttattctttcccatatcatgtgctatgcaagaattgcaaaacccacaaggtttatgatgttctaaagacaggcaatttaaagctctagcaaaaacgcgagcacaggaggttttccccgtcccatgaggaccataaaaaacatacaacaatcctaccttccttctcatgacagcatttgaaagagcttgagccaccaaattctgtcccacaagttctcggaaggtttttggcatgtatttttctgtcagattttgatgtctactgcggcagcgccctcctaactttcgttgatcacctgatctagcttcagaagcaaggtcagaatcaacatcatgcttaaacaaattttcagcataaataccaagttccccagaatagcgacgcacccaatcagcattttcagtgctcagctgtgatccagaggcatcaaccaacaaaggcagtgcctccccatcagatttagaagaagagctagagtactcagatgctacagggatgttcgaaatatctctcccctggccacttggacctcctttccttaatcttgaatcagacaaaccgcaagataaactttttccagccatgtcaaggattgttttgcctctatgatgaattcttgaccaattccaagggattccacacccatttctaggagcctttgtcacgttttgttcatcaaactcttcctctccttctacattatacttggagtgtactgaaccttgggctacagtattagaagctacagacaactcattttgagcattgatatctttagatactgcggcagctctacgtcttcttgcccctcgaaattttcgccgctttaccctattcaatccgctgcagtaacctcggatgctttcttctgcttccagaacagctttctcatgagtttgtcctccacgcaaatggatgttagaagaagctacaccatcactatccatcttcatatcatttaactgctccgaaagggtttttgcatgagacacttggatatgcttccccttttgtctaactttccttgttttagatgcagaatttcctgaaacatcattagaaatgaccttgctatcttgatctactggaggttcctcttcaccacccacaatacctatcctattactcttccgactagactcttccctccttgttcttcgaacatccctaactccactcttactacttcgttcgctgattgctgccatcaaatcattaaccccggcaatctcacccggagcaacttttgatgttagcaagcttacaaatggtggagagttacctgaaagcctcttactatccctttgacgttcaatacctattgaccttcggccctccctagccaatccatcattttctgctttcttaggatgctggtcgacaattgaaggtgaatgccacgagggaggactggctgacgggtctctgagagaccgagacctctgaaggacaatgaggtccctaatgagcgacctgtctgtcaatatggggctgtgcttgtgcatatgattcttcaagtgaatgcagtttgtcaaatggatgtggtttcgtagatgatcaccaatgtcaccattagcatccttaagaattcgatctctaacagctctggtcatgatcagaacggtttatgtctccaatagcagaatctctcgtgtaataaagaaagaaatcaaaatgtatagcatcttttattgcaaagcgacccagaagttatggccttactttagtaataaataaatttcatcaatccccagaaataacatccccactaatttttcttgcagaactaaatataacgccaaattccaccaatcaaagatctttcatcaacagataaagtaagcagtttcacattatgagaccccatttccagtgataccgtctagacacgggcaacttcttttattcacaagataacccttcaaaaagataaaaaagaaacaaaaacaaaatgaatgtgtcatagtccatggtttctccttaaaaaaaaaaggggtcaacagaatacaattagacacatcataccaaataacatagtttttaatcgttgtactcaaatggcatccaccgtgaactcgatttaagctaattgaacttcaacatgcaaaaacataaggaccgaatggacagaaggaacaaaataaacaaaaccatctttatgaaaccttagaaagaaccaaaaatccaatctttttttttgctttagaaacctgaaaagcgaaagttttttttttctttatttcttcttcttgtttttttttcccaaaaaaagcagagacttaaacagagaagatggcaagaaaggaagggtagtcaaacaacctgaaatccgaaaaggaaaaaccacccgtttcgatcattaaaccccagatctcaaaccgaggttcacatgcacttcatgagctttccttccagagaaaacgatactcaaagagagagagagagagagnnnnnnnnagagagagagagagagtgatagctcagctgaacacagtagtagaaaatgaaaaatagtagagagagagagtgagatctgtaaaaggacagttcacagtcacagaccacctctgagagcagagtgcacaactcgccaataaagcggtgtgtccgtttgtttgagcatgcacatactatcctatattttattcttcttctttcgttttgttattaaaaaatttagaatttcccaaaaatttaaatcaaatcaataacaataaaaacttgttcttgagacttgccttattaataataggtaatagaactcgttcgttgtgcgaaaacataaaataaatcttaattttaaaaataaataaaaaaataaagataatttaaatattgaaaaatggtgggactggggaccaacggcttcatgcccgttccgttgaaattgccggtttttctttttgttccagttgtaagttgtacacaaaagactcataccctttttaaaaccacgccgaaattagaagaaaaaggcccaaaaaaaaccttcttcttcttttttcttttatttatttatgtatttatttttgtagggttttatttattatttgtaattttgttatatttttagtgttaacatagttcactttcactcattttgtaaaccttaacaataacaagtttcgcaaaatctatgttacagctggaatcttttttatagcaattcttaaccaaagttagtaatggcctcgttacatcaatattgttcattttcttcattcacgtaattcaataattaattcaaaagttagatttcccaaggaaaaattgctatttttatctactaaaaatatgatagcatattttgcaaaatatacttgttgaaacttaggaaaaataaaatacgagagaaagagaagaaagacagggacaaagaattgcaattctcattagagaaataagagtacagcagttgattatatactaacaggaaatagagcaaaatataacaaactaacaactcaacaataccataaaactaaccaacttctaacagatttgaggctatcttattcttatctataacagcccccttcaaactaagtgtggaaggagaaaacacactgagtttgtcacgaagataagaaaaacgagagctggaaattggtttggttaggcaatcagctacttgatccaaagcaggcacatgctgtactcgaatatgaccttgaagcaccttgtctcgaacaaaatagagatcaatctcgatgtgcttagtgcgagcatggagaaccggattagcagccatcatgacagtgctcaaattgtcacaccagatcataggaggcacagtcaacggaaaatgaagttcctgaagaagacactaaatccatgtaacttcagtaacaacacttgcaaggctacgaaactcagcttcagtagaagaccgagaaatagtggactgctttttggatccccaggaaacaagtgtgcctccaaaatacacacaaaaaccagtcgtagagcgacggtcatcggggttcgaggcccaagcagcatcacagaaggcctcaagatgaaattgtgaagctggagtgatgacctaaggagcgatctgagcagaaggagaggagtagacgatcagattgttacgacgatcatccagcccaaagcccgtgctgaaatcctcgctcagaaagatactgatgtgattcaaatcgaccagaatgtcgagcaggtnnnnnnnnnnntacaggcacagctagacgaactgaaa

SEQ ID NO: 15676 - DNA, 4699 bp, Cannabis sativa
tctctctctctctctcatgtgtgttcattattcatagcatttaggaataatgttgtagttgtttctacattgacattgttatctgtagagaatatggagaacagcttagttcattgttttcaagtataaattcaaaatatatcatatggataacagctcagtttcattattttcaagtcaaaattcaaaaaaggatacttttccttccaaagtcaacaaaataatgctttttgacagttgtctttctgccttggttaataatagaaactacttaaaccattgaacatgactcattgatatatcaaccatatgatggaagaaagtatttcaaatagatgcattggtcaccattaatactggtgtctgtttttgatgcatagataatacaattgtttagattgactgaattgtaaactgttctataacgagaaaatcaagttttatttcattgaaattaatgtacaaaacataggaatctatattggataacttgtacaattgggaaactagaattaagattaattatatacttaatatacaactaacacccccctcaagttggagcatagatattgatagtgtccaacttgttacatacataatcaaccataaccccattcaaagctttggttgaagaaatcctctagttcttcaatcttcacatgtttggtagaaatcaagcatttttgaattttctctcaaacaaaatgacaattaattccaatgtgcctaactcactcgtcaaacacaagattagatgcaatatgattaaagaattaaaaaaaatgtaatttgtattgacaacttctaattatttagtgatagattttctttagttgtgacaaaaagtaatattcaatgacaaaacatttattaacagaaaaatagaaactcaagagcgattatgtcaacttacttttcaggatattcaaagcaagggtcttttgaagtcttaaaaagatcagaagtgtgtgcaagacatccaactggacagtagcttccactagctgaagcaacttccattgcttgaacgtgttagacaatcatatgcttgcagttacaagatgaagaaaacagctgctgtatgccgcaaaattgcacgcaattgtataattgcctgggaaaagaatatgaagagaatgcacaaaactaggtccctcttgctcttagcaccaacatttgagagtaatgatattaatttatcaagggttaccgaaaaaatcactcagccttgtgtactaatccaactgcaaccaggtattttcttaaccgatttctctttcattttgttcctcaccagggaaacatccaaccaacggtctgtggcagcatagatatttgaaaggagaacataattaccagcattttgaggttcaagctcaatcaacctactggcaactaactcacctagctccatatcacaatgtagcttacaggccccaagtagagcaccccaagaggtagcactaggctccatgggcattgaacataaaagctcataagcttcttttaaccttcctgaacggctgagaagatcaaccatacaagcataatgatctcgtgaaggaacaatggagtactcattttccattaaacgaaataagtgcctaccctcctcgaccagcccagatcggccacaagctgtcaggataactgtaaaagccacctcatcaggaattaaaccttcatttagcatcatattgaaaagggaaatggcctgttccccacaaccatgtacagatagcccctgcatcaatgaacaatacgagattaagtctcgcttaggcatctgatcaaacaagttttttgctctctctatgtttccacatttagcattcatgtcaacaagagctgcaagaacatgagctcgaccaagatcaattgaactttgagtgacataattatcaacccattttgccaactccaaacttccttcctgagaacaagctgacatcaagctcaccattataaactcatccggtttaacattacaagaatccatttcaagaaaaatgtccacggcctctctggcctgaccattctgagcatacccagatatcaatgccgaccacgcaactatatctctatttggagcttggtcaaacaaaacccttgcagaagccatatcacctgattttgcatacccatcaattaaagtggtaaaggaaaccacattcttctcaggcatctcttcaaaaatcctcctagcactacccaagtcacccaatttcacaaaccctccaattatggcattccaagaaggcacatttttcaacggcatctcatcaaacagcttctttgcctccaccaagtctccataaataacatacccaacaaccatagccgtccaagtaaccacatttctctcagacaaacaatcaaacagcttacgggcacaaccaatctctttacacttcccatacaaatcaatcaaacttgtactcacaaaagcatcacactcaatcccacacctcaatgccaacccatggaaggtccttccttctctaacctttccctcacttgcacatgccttgatgacagaagggtaagtgtatctatctggaacagcctcctctctcttcattcgaataaaagccgaaatggtttcagcagagcaggacttttggcagtaccctttaatgacaacattccatagaaaagtgttgggggagaaaacacagttgaaaacgctggcagagtaagatagagtggatagagtctgagagaggcaaatgaattgagatatgatagtgtggtcttgctctaaaccacttcggacaatttgggcatggacttgttgaagatggcttggagttttacaggccttgatgagagcttgaattgagggcaacgagtgtagaaagtttgggtatggcatgggataagcgactgaatttatcattgaaaaaaaaatggttgaattcaataatgtttgaataaaaaaagaaccaagaaaattacagagagaaacaagtgaccacaactggcagcccaaaattacaataaatttattcttacagaacatcaaatttggtagcagcaacaagttccacacttccagtttttaaacataagaactataaatttattaaagaacatctatttctattcaattttgatatatatatatatatatatttatatatacataaatgtgggatcctttttacctttgaatcaaatgaagatgtttccgactgcgatggagaaatagagaggatgaggttgagcttttcggctgtctttgtttattaattacaaagaaattctaaaaatattgatgttacttgatttgggagaaatctttgaaggtggaaatttgggttttttggagctaaaaagattaaaataagcccttggcgagagccatttcaacattttcagatactatttcgagcaattcagagaaatgtgactataagactcttcatttccatctccccaaaatctagggttattgtcagttcattaccttcgagagacgaaggaaatagatcatattttgcagaaagctcaaaaccccgccccaagtccatgccgaaacagagcaatttcggaaatggcgttgttgagttggagtgacgtttttcagtaaaacgacaatgaatccaaaacgtctcttaagccattttgatacagatgaagaagggtcatgcaatcaattgcaagtgcaaacaataaaaatagaaacttttctccttttgtttgtcttctttgttttcactttgattttctgtttctcatgtcatctgggtcaattcgaaggtggtttcatcagtgatgatcactgagaatcaatgatattcatttagaataataattataataataatatatcagaggtgcacaacatacttttattttgaagattatcatacttgtacttgtacattgctgaaatggatagaattctaatagtttttgaggcatttagccatataaagatcatacaacttagaagtaacattgttgggaaagacttttctttatcagatcagatactataaagacccttttctttaaggctttcaacagtgtcccttaaactcacttccaatggtatggaatgtaaaattcctaaacttttctctatcaaatttgatacttggtaagtttgcatgagaggctcatcgatttcgcatctgccaaccaataagaactatcactctaatacatatttagtgattaataattagctcataataagtaaaaattatagtgttgttacctttgaggaatggtgatagtagggtagagctgttgtaaaatctttaaaagctcagaaatgtgtgcaatatatccacttaggaaatatcttctaccaactgatccagcttcatatgcttgaatatgtgcacttgctacatctctaacatcatgatataaataaactttattgggaaatgtctcagctcctgcttatgaaaataagttagatttaaatcttaaaacacagaaaatggcaaataaaaatagataccatttgtgagattcatgatgagattaacactataattcatggtaggttgtaagagagggccaagtgttactcctggatgaatggtgattaaatcaattccattctcttttgcaaattcccaagcaactttctcagctctggtttttgaagctgcataccacatctttaaaaacaaataaaatatgaaagattagataaaagagaagaagagatgagcta

SEQ ID NO: 15677 - DNA, 2457 bp, Cannabis sativa
ttttttttttaagtttaataagtatagaaaatcaaatttccttttttagtattctatcatttttctctggtgtgattgttgtttatgtcaagcatacaactaatatgattgctcacaatttaactaaatatgctctaaggatagatgaaacttatttttgattggagaatattcctccacctatatactctcttataataaatgattcacacctttagcaaactattttccctaaaataaaaaagaaaatagacaaataattttcttacttcattactacaattgtagagttttgtttgtccctcaatttccttaaaaaaaaaaagacataatttttttctcaattcattactaaaattatagagttttgttttgtccctcaattatttaattatttattttttgtgtggcaaaaatctcccaaactacagcaattatataaaatggttgcaatacaaaaatctatttaactaaaactagccgaaattaagcttattagtattgaacttacaaactgtacatattcttaaatttgtcattaaacttgtataaatacattttatatctagactctcaagtcgtgctatattaacattacatcagtgttacattagtacactacttaagaaaataaacaaaatatgccacacgaagtatttttgctaccaaaaaaaaaggtcaaaaacaccaaattgggaatttttgctacaaaaaggcctgaaaaacaactctcaaagttaggaagaaaaaagctatgataatgtttttcattacaacaaatacaatattattctcatcaattagtccccaactatataaacataggctaattctccctcctccaatgtcagaaagagaaggtcccaagttcgaaatctccaaaatcaatttttaaagcgcattagatgaaatttttcttaagtagtgttctgctattgcaatatactctcaaacttgtaatacaacacattacttcctattatgatccacaatatacacggattaagaacatattccaaacatataataataatagaataaccaaattgatttgcaaacctctcgtgaaaaattcaagatgatgtaacaatacaggaaccatcaaccagcagagacataatatataattcttaccctaacatgcatgagatagcttcttcattttttaactaagttcttcgcctaataccacctaatcctacaattttcggggactaaaaaactacagcaattgctatgtaagtgctctagaggggacttgaacatcagattttgtaaatagcaaaccacatacatgagatggttttcgagcttctcatccaaccatggtgcgctttcgacctcgctgtctcactatataaagtcgtagattagtaaaggaaaccaataaagtggaaactgaaaatttaatagtcaaagaatcaaaatcataccttgagctaacttattcaatgttgatgaccactgctttgaggacttcctatacgcagcaagtatctgatccatctacagatttttttgcattttttcactatactagtaatggaaaaaaaaaaccactagatttttcaatttatttagttatataaacttatgtttttttaattagaaaaataaataaaagtagtttagcaataatacttcaacagccagggcttaccacattcccacacgaagaatgcatagagagcaaagctctctccaatacgtataaatcaacagctttgtcttctggaagtgttgatgtgaagctcaaaccaaaatcaatgagcacctatcaaaaagaaattcgagcttatggtacaataacaattgaggaatgaataagaaatctctgtgtctgcttgaattaataatcaaacaattcgagtttggcagttgcctatcaagaaactcaccagttgattggtagcatctttgactaacatgtttgatgtggttaaatcaccatgaatcaagccaccatcatgcagtttggcaattgcctcgccgatttgcttcgcaatatcgtccatctgttcttttcggataccatgtgctccaaattcaaggaatacatcctttactgaaggaccctccacatattcaaatgtgagggtatgtaaaacggggtccacaaaaaacaatactggtgtatagaccccaagtcggcgtgcctttgtcatgcacctagcttcctacacaaacatatgtgcacatcaatttaataaagttagtttccaatgacagatttttgaatctgacatttgagttgttaattttttcactaagcagcagctagaaaaaacaaatgaatgttgttttaagaaaaccataaacttggtttcgaaatgtgtactgtaagaactattagagaataatttcaaaatgagtatttaaaagtcaaaagtcaataactacatgtatgcagacatcaacaacacgaaagagagtagtagtacactgagaataataaga

SEQ ID NO: 15678 - DNA, 3484 bp, Cannabis sativa
ttttactcattaaggttaaatacttcaacttttcagtttagatagttactgaagtaatggtcaaaatatctaacataaatccttatgcaattttacatgcgaatcaaattagtttaaattcaaattactctatacacttaatatttgaattaataaaatttgcatttacatgcatgctcaaagaattatctaaatttcctggctggtccttctataacattgcagaggcttcacagatagtgcttccactgcccatggctgctcttgtgagtttaaccattacttttaagcttgacaaaagtctcgagtatattcatgctgtgtctgggccagccttggagaattgtagctcaagttgcccttggcctagcattcccgtaataggctgtctttgggcccaaaagatccgtcgttggcatgacttcatcgttgtttcatgctctcgctctgttttcagacaaaacaaagaagctgttgcacaactcctcagaagttgtttcactgcatttcttggatcgcagcttgctgcaaccacatcactgtccaatcaaagcaatgtgaatggtctattaggatttactatctcagcttgtagcattcatccttttgtagccccaggatttctttaccttcgttcttgtcggacgatacaaaatgttcaatatgtgaatggtgtaattgtagggcttgttgcagagtatgctcagaaattatctgtcagatgggaacgtaaggaatgccgtcgcttgaagtctagtcaagcatctctttgcctggccactacaaaggcaaaggagattgctactcttggtgcaagtctgttatgtattgctggtgggtttcagctggtccaggaactgtacaccgaaactatcccaacctggttactctcatcgagtgaagcagaatcaaaacatggggaagtgagtgccgtttcctgcgtggtggagggatatgccatggcatatctcttgattctttcagggtccatcatgtggggtgtacaagtgcaacaaccaaattggttatttacaagaagggcacgcattgttgagatccacatggactttctggctggcgtattggatgggaacatatcactgggatgtcatccgtcgacttggaaagcctatgtttcttgcttagtgggtttactggtgaagttcgctccggcttggattcagggagtgaacccaaaaaccttgagaacattggctagtggcctgagaggttggcatgaatgcgagctggctttatctcttcttgaaagaggtgggacagcagtcatgggatcagcagctgaattagtgaatgttactagctgaattttttaaaatctaaactaaatttactaaaatgtagagtgtagattgtgttggttgttctctttctcagtgttgaggatctgagttcaaattaactttttaataatactaataacaacaaaaatcgttcccagaaaaaaaaaaaaaaatagcagctgttaccagaaaaaaaaaaaagtaataaactaatgtagcgttgtattttttttttttaaagatagaaattgaaatatattttcatttttgtattttgacttttgaaaaataaaatgtgtttggtaatattttattttttgtttttagaaaataaaaattataaaggtatttggtaatttcatattttttagtgagaaatttaggtgagtgagaaatagtggtatatgttcgtgtgtgtctggctggcttcagtggcttaacttatatttattcgtgttttttaaaaaacagaccgtgtcgtgctgtgtcacaaaaaaatataggttgtgatgtgttgtgttaatatttccagaggatagacctgacatgacctgtaggcttggtatttttgtgtcgtcttcggattcgtatcgtgctttgttagtactggctcgtatttcttaaacaggttagcctattttcatattcgggtttaaatttgtgttttattttttcatattttttttttacaattactaaattatatgtatattttaaagttttaattatatttatataacttttgaataatattttataaataattatataaaaaaattattaacatcattagaatttgaatatttacttatcgatactcaaatttttatatcacaacttattaaataaattaatatataattttaatttattatgttttaatggttttaattataaaattataatactcagtataatatttaagttctattattattttaacttatttataattgatagattcatatattattattattattattattattaataaattagaaagttttttaatatatcgtgccatgctttttgggtttgtcgtgttttgtgctttcgagctagtctatacgtgcttacatgttgtgtcttttgtgcttctcgtgtcgtgtcgtgcttaaggacatttttcgtggcgtgtcatggtgtcataccaatttgtagcatcgtgttgtgcccaagcccgtattttttcgtgccttgttatgctcgtgctttctgagctcgcaccgatatcatgttgtgtcaaaaagtctgacccgcatttacaacactagtgagaaatggtaaaattataaaaataattttgctaaacatgttcttagaaaatattttgtgttataggatgaatttttcacctagaaatacaagtacaattttgtttatagttgatacgcggatccaattccaagttgaaaaaggatgaagtgtcaataacagcccttgtagggctatcctcgcttgatcaaaatttgcgagaaggtgtgattgagacagggtctaatcgcacactatacatattatagtagagtaaaagcatgatacaaagagaagttagcatagtcgcacatatatcaattatatacggtgaccaaatgtaactctcttgcgccttacgtaaagactgcatctttacaagcatcaggtttgaccaactaatgtaagcgacaacttgtctagaacctgtgagctctatgctgtcgattcataaatgcccaatatgtgatcgatatagttgcaagcattctattttataaacccaaagaggttcacgcatcgataaaaatccaagagatttttatgtgttttaaagggtcaaaagaccttatatgcgagtagcaccagagagccccacgagttttcgtgttacttaagaatgtgaacgaccaatgtgtgacttcattagttccactcgtttgaatattaaataagaacggtcaaaactgctcttatatttattttatagatattttttaatcttaattaaatgtaattaatgttgtaatggtcatgtttgatcggttatgtaaactgagggatcacttgctttctatatgaaagagtgatccaatccgaatgaaactaatcgcaattctctttcaaaagtggactaagcagaccgagctctaacttaaccactataattgtgctcatttgtttattcgctattaatttgattaatc

SEQ ID NO: 15679 - DNA, 3206 bp, Cannabis sativa
atagagtgtaatttcctcaaaaaaatatatactagagttaaaggagtgttatggtaaatgtaaaaccctataaatttcgggtaagttttttctttacgttgtgattgtttaggataatttgtaaatttttttaaaaaaaatattaaataatttatcgtgtaaattaagattcaaccaattgtttagcaaaacttgatctttctttggatgatcactatgtttggtggtcttgctaccctagttgtattagtacatctttgcatatccatcttgatttgttaaatatttttgacactcttttctatcttgatattgttttcattggattaactcaaaaaaatttaataagtcatttttttcaaataataataataaaaatttgtgcaataatacatttaaacttttttttgtgcattaattgatcatgtcatataggctcaagtaagacattcaattgtgtcatttaaattattgaataaaaatcttatatatatatattatgtcaaaaaaatggcaattaaatcactgtaaactatttgaaattttttaaaaaaattataaatgaccttaaataattacaacgtatacgatcataaaaaaattagactaaaattttttcacgttcatgaactacatacacagaccatacatgtactctcatccaatatcgaaattttatctgaacaattatagcatatttaattacacttttcaaattttaaattaaacaactgaaatcatataaatggtgatcaagcattcacaaggattaaacataaatgacataaatgataataatgaagaagaaaatcaagaagtcgcattaatctataatcaagagactccattaaaaccctagaaaaagtatttagttctaataagcataattatatccatcaaattaaaattaaaaaaatattaatggaataaattaaagaagaaaataagaaacactcttgaagaagcttctaatcttgattatccctagcctccaaatatttttcctgagtttttcagaggtaaaaattgatgaaaatcacacttaaatgtatttatgtagtagccctagcgattctaggtggaaaatatacatttgccccccttaaattgagtttttagtgacatgtacggacgatagtgttgcggcccgttacttgggcactgcaactctaaatttgattttcaaactctggcatcctgtagcgacaaccaatatatttttgttgtaattctctcgatataacatataatttgatgattaaaaatgttttagaaagatagaaaaatctctacacattttattcaaaaaagtttcttagaaaatgaacggagaatagtcaaaaattggcttgaaacttcaaactagatttttttatcacaaatagagcgcgttaaacatcccaaagttagaatttctactcattatatcgtacaactccaaactccatgataaatctaccatattaatttttaacatgtttcttctcatttcaacctatatgatgtatttattgaaacttatattactaggatctatttactatatgtatgttgattaacaacctaaaatatgtttctaaaatgatcaaattcaacacactaagtttaagattttcttacattgagaacacagcagaataaatggctcctcccattcagtactctaactctcaaatccttttagtagctgagtatccccaagtactgaatctgaatcttttcttctctaaatatatatgtgagtaaagttcatcatagtcttcctcaatgctatgagtaccactcatcattagtgtcagaaatttttcaactcactaggatataatggtggctgaaatctctgagaaagagataaaggaatttcgaaaccaatggtaatagccacattcgaaatttacaatagagaaagaggaaaaaaaaaaaaaaagtgagtcattagaattttttaactttatctttaggcttaggtaataaatttattatattaaataaaagaataaaatattttgagtggccaagattaaatctcactcaaaatttaaatcggatcagattaaatataattatatcatataattaaataaaaatttattatttattattaattaattccataatccttataagatacaattattagttttaaaattcaaaactttatacatattataattattattattatatttttaattaataaataataattaataattcaattctgaataatcattaataactataaattaaaactctaaatataattaattactaatactaatttatcataattaacaaacaaattcttcttatcttctcaatttagcccaacttagtgaaaaattctcaaatttgacatagttaatatttgaattttaattgattaaatatatcaattaattgagacatcaagttgatattatcctaagtattgcggggatcatgagcctatgtaatcaaactcttaataagttgatttaaaatttaccgagtaaattttctaacttattaatttctcatgaattcactatagacccagaattacactattgattacatagaaggctccatatacctaatataggtacgctatgaattgtccattatttcaatcaaactaatcaatgatcctgtacagatggtctacattgagtaaggataaaattattattttaccttttattttatccttaaaatacttaggtcattgtaaatgatatttcagtaactaatataattacataaatgagcgctctatcatttatcgtcttcacccaaactcaaaggaaactatcattttacttctagataaatataacagctatagatgttcatatctatggttaacactcacactcaattgaaccactatgttgacctcaaaaagtgatcaacggacagcggggtcgtatgaatctgatgcttgatgcttgtcgcgtgttacacaaataaaatgaaaaagtagtaagcacacagatttgttatagaggttcgactcgaccctctgtgatagcgggtaatgacctactccctttttggttatattgatacctagagataatactattcagatcaatataggtgtcatctgatatagctctctatatgcatacaaaatatgaatcaagttggaagatctctaatgagagagatgaatagccttagaggcctgtgagagaggaagacagatagagagagagagagag

SEQ ID NO: 15680 - DNA, 10400 bp, Cannabis sativa
ggggattagggtttcttaatcatattgggtagcgtgcctaaatcttagggcgttacatcaaaggtaccataaatgaagggattcacatcagtcctgccaaatgattctacctctaagcttactaagatactgattgggtaagttgcccagatgacaaacgatcaataggtggatatgcagtgatttggaagaaatttggtatcttggtctgcaaaaaaataacaggtagttgtaagatctagtactgaaagtgagttccgagcccttgcaaacacagttgcagaagtaaaatggttatatgttttgttcttgttgaactaaacatcactctgccatctcctgtaattatttacgttgacaaccaaagagctgcttcattagctgtcaatctagtctttaatgcttgttccaagcacatagagattaattttcacttcactcgtgatcaaatactggccaaacaaattgaagtaagatatgttccatcctttgatcaaacatttcatattcttacaaaactgctatctactgatcgatttagctatctcaagcagtataagctttaagtgtgtacaacactttttcgtttcagggaagatgatagagtacctaattcagttacttattgttttgagttagtattgttagttaaaccgtttaaaagttgtaaattttgttacaaactataattatctagtttcatcttttataatctctctaaataaataaaattcctcacaaaggctagatctttgaattactttctcatagagtgagtaatggtaaaaatctgtattaataaactctcacagaatataataatagttatttagtcttcagaattttggatgtatagataatattagggtcatactaggtcccagtaggggaaacaataataatatttgtggaggaggctgctggtgacatgtccaaaaaatatgtgatggtaattgaaactcataaacaaatcattcacgttatgcatgcatatagtaattaaaatgaatatatagagcaatgcatgaatattatataatacttattctaattaataaaaacccactgaataatttgttggtaaaaaattatagtaattgagtacttaaattggaatgttctcatatcatataattacattacatatagtaaaagaaggatatccgttccaaccccacaccacaccaaacaaccatatattatatagaaacttttgaccaaagtcatgtgtgaaaataaaattttaaaatttgaagactttcaaatacttctggaacttatttgatttgaatctctagtattatgcatatttggttgacccaataacttttatgtgatgacactgctataaaatccatcattatgttattttactacttataatctatgcatataaaatatagtttatggaacaattatatatagatttattgactaccttttgaatgacacgaacactttaaatatatattatatatttatatcatatcacatgctgcttagctggcaatttttgtattattttacacttgtatacgcataaattttggtcaaaagttcctagtagaatattgaagcaaattaattttattaattaattttacagtatcatgagaaagataatatgataacttggtgacgatcaacagatcaagtagatttttttttttttttttactttttgctttactagaatattttttttaaatgaccaaattagagtttgtcaaataagtgaaatttaatgtgggcagtcgaattaagtgactaaaattgtgagtgaatggatcgaattgaatgaataatagtactttggtcactgtctaattattcatgctatgtgcaaattgctataaaataagtaaggaaaatatacaaattattgttatttttttcttttgtaaatacatgattatgcatggatataagaatggaagattcacaaaaactctaacatcatcaatcttggctgcatgcaatcagggtactacttttatattttggttttcctcttcatttttatttaatttttttttaagtaaaattttaaatatgcatattaataaactctttgtcctgttgtgatgtgaatttattggacaaatacattgcatcacatgccctattttgatgcacatatatataattgaagtaaaattaacgcttgccaaattttagttataagaaccttctaaagtattatgtaaaggctgttaaattgggtcaaatataactccagctataattatatattaatatttttgctttataaaagtttcaatttgatcacatgcagttatgaccacagcattatatatatttctcataataaagatgtgttcttctgtgatgaaataatatatatatatatatatatatatataatgtggacacgagggctactcgagtacttaatcaactttgcattaaatcaagatataatataaagttaagaactacttattgagtcaaattaaaattttgaaattgtcatgtagtacttatcatcaacaaactctagattaatgtgttttaagctaactgatggcgtaatttaaaagaacaccaacaatatcccaaatatggccactttagtagtttgttagtggtataaataaaatataaaactaataattactttctaatatacgactgaagaatcaagattaaacgaagggttaggcaaaaacatatataagaaaatgtgttcacacttttgtgagcattatcaagtgactaattggtgcttgtgagggacctatgatttttgttctgtaaatgcttaattgttatcaaaattatttatatatattttaaataaaattataattatatattttactattttgttataatattatttaattttttaaaatataattttttttacttggggttgtagccccacacacaccacatccactcagagccaaatagggttataaaatagctctataaaataatattttataaagaagtgacaaagaaaaaatatcccctattggcactggtgctcaaataaatttttaatttttctttttcgttattatttcttttttctctttacctttttccttattagtttgcccaacaaacaccaaagtagagtgcctccttttgagttacccttaattattagcttattttcggaatatacctaaaactacaaaatgtgagatacaagcaccaaatacccataatagctacacctatgctaggaatctttccaaaagtataaattttaccaagtcacaatatgtacaatgtactgtaagcaccttttttttttccgaagcacattgaaataatgttgaacacgagggaaatgaacccaaattcacatgccttcattatattaatgatttaattttatatttactcttatataaatgttttaatttaataattattagtaaaatattttcggatagtgctaatgagctaaacgcattgcttaactattttggagtgcgttaaaaaaataagctccaacaatacaaaaattaaccgattataataaataattaatatgaagctcacgattgtaaaaaacgctctacttttttgcctaatgtttttaatatatagtattttaatcataagtaatactacgtttcattattttatttaattatataatatttaacaaataaaaattataaaaaaacattgttaaaataattaattctaactatagtagagaacattattaaattcttttggagatacagtgctctcttaatataaatatatttatatattataacaaaatgttaataattacaaataacatttatgtttgaaaaagattgaacgtacttgttttagaattgacatcgatatatacaggttcatgcataattcataagatgttttaagaatatgtattttccttcttaattttctataaatttaaacatatattacaaaaaaaaaaaaaaaacttcttttatagtcatcaaagctatagaatatggtaattctttcatgatgataaaatgcatatgatgtacataatatcaaagaatataaaaagaatattttttattttcaataatgatagacataaaaaaatatgtcttgtacaaaattattggacatgacaataagatctgcaatgattttttttttttttcatatacaacgttgctcgacgtgaagtgtaataatttaatattattatacttagtgtaggcatgaaatactttttttttattaattttaaatattaaataattaataaatataaagttctaagaaattgaattttatatatataaaaaataaaattaatattattttagattttgtatttcgtaaaatttacagatttgaccttatgttttgttaatttataatttaggccctatatttttcaaaataatacaaaataaatcaagagcttaattttttcgttttttttaaatataaccaacctaaaattaatttctatcatgaacagtgcaaaaaaatgtaacaattcttgtcataatacctctatgtcaggttattattaagttttcatttgacgaaaattaagctcaaggtctattttgtaccattttaagaaatacaatgtctgaattgtgtcatttaacaaaatagaagactatttagtaacttttacaaaacatgaaattcaaaatggtatttgcattaattaagaaataataaactaacaatattaaatactatttctttcactatataatattaaacactatttctttcaccaataaacttataaagtttgaacatttgaacaagagtaatgaaaaaaaatagaagaaatcaacaaccaccgctgcaagccgcacttgaccaacctcagccaccacctgtcgacctagaaaaaaaagaaagagaacaatattacacaagtaaaagagatctaagaaaaagaaaagaaaagaataaagaatagagatgcaatcagagtcaagaagtctcaaattcggcaagttgaccttgggattgggtttcggtcatcgacaaaggtcatggtggacgtcgacgaaggtcgtttggcctaacaagccccggagacgtccaaatctaggccacatgatttggatataatgggcttaggaaacagtgacatggacagtggggacctagaggatcttgtggtttcggaggccaaggaactcatttatggcctctgtttggaccatagcaaagcagaggaggccaaagccgcgtcaagccaaagaaaacgaaaaaagaagagagagaaagttgaatgttggtggtgaagctcgtgggacctaaggtggccggagaagatggcgctcggggatggggtggatgtgggctagagtttccattggaaagaagaagaagaagaaagaatggggtggagtggcattggtagggttcttgaagaagaagaagatggagagagaggatgggatagaatgttttttgcatttgttttagctaataataaggttttattgcaagtgagtataaatgttatacgcttgattcacatatgcagtttcaactttagtttttttatagtaagattcacgtccaactttcgcttgatgcagtccacaagtcacgtccaacaatgtaggacattaaccgctgtaccaaaatgaaaaaaaaaatgaattattaccttatcacgtcctcacatacttttcatgtcaagtattgttggacgatgaaattttttttatgtccagcaatactagatatgaaaactcgttataactttttcatgtcctacactaatttttctagacatgaaaaatatatattaaatgagttttttgtagtagtgattgtttaaaaatcatacattaacattatttttaagtcaaaacaatttttgttgtacaaatgattgtgttttcaatatttgaataaattataaccttaattaatcttaaaatgtctaaaagttttcattatttagaatattttatgaagtgaaaatagtgttgaaacacctttaagtgcatttggtacgagagttagaattggtaaaaatgagaatatcaaacttaactcatgtttggtaaattaaatttaatgactttgcatggatttatattatccagtctcactttttaactttaattaattataacattaaatccctttaactttactccttcaagtcaaattcccattattttgtacaggtataaaagtatgagcaaaatattattcgaattgtattttggtcacatttagttagttataactttattgaaagctggtaaaaaaatatactataactataatgtcaattattatatagaataaataggacttaatgcgccacactttcaccaaaaaaaaaaaaaaaaaacaacataggactttcctcctacattatgacaattttatcttttaaacttttttatgtcgcgaaaatttttcgtgaactaaaaaaatcgttacgaatatccctctttaattacattcgactcatttcttcaaaaatattatttatttggctatgagttacatgtataagtgtactatgatgatttatttaacaactttaatctatccgaaatttatttggcattaatgtagaaacattagctataaggatgtgtatatataatattctcataatttatcattaaattgttatttgtatatttatttattttctctgaatttttaaactgagccaaactaatatcaattagtattacatcaacaattatgaaaaaaaaaaatgaccaactacgaaggtagctaaaaatagatatttacaatgatttttatagtttagaaagaatattttgtaacaaaaaaaagttcaaagcaaaagtttactaagatatgaaattaggggcacaaatcctatatatttcgacaatgagaaatgcaaaaaggcatcatagttgtttagtaccctcttaggttttatatcgctattggtgcaattaagtatcgagtcccatataatttaatataatagcttttaaagaatattattaacctatcataaagcaccactcttctgggagatactgaacaccactagtgccctatattaatgctcttctactatataacaaaattaaagttataagtttctctactcttgattcacctcccatactttgggattttgtttttttcttctatgaaattgatgttttgtagttcataaaaaacacgaatatgattgtcgtccaagtcacatgagcataagtcgcattatataacgagtattattattaggtaccaatagtgtttaatattttttataggtagtgctctaagattaagtagagatattttctaaaagcttacattaaataatatgagatttaatacttaattaaactaataacaatatcacacttaacagattctaacacaatataccttttaacattgctcttatataacatctctataaagaaagcagcaaagtaaagcaaaacaatttaattattattattaatttcgataaagacatgaatttgacctttctcccttttccttgagagaagggaaagttgtataagttaagctagctagtaattaattaattaagagaagaaatgtgtagcaatattcttaaattcgaaattaaatggctatatatctgaagctagagctacttaattaatcagattacattataagtcttctccattaattatttatttcaccatcattatcttatatattttattaatttcgtgattaatggatgttcattcaaaataaattatttaattatatgaaacaaatttgaggtatataataggaaatactattccattatataaattatagggtaagttaacattacattttgtaaggagtagtctctttcgccatttaggagaactttttaatctaatttttttttttataatcatgtatattataattatttaagactattttatataaatttttaatttttctttataaataatttataataccaaaaataagattttttttacatatttttttacccgactattttttcttatgatgggccccacggggactcatccttaatagagtggggatttcccatctaaatggcgaacaagactagaacgagcattacttttgtcctcgaatgttaaacggaacagacacggagatgacactccccaccccgatagggatccgtttaatattttattttatatttctagtaacattttacattttataatttatgtttgtatttttagtatattaattagtattctttttatgaattataagttgtattttagataataattagttcattaagtaataattaatgtgtaatattttaatttttatatagtttaatatttttatatatttaaatttttattataaattatttttttattaaaggatttcgcgctcccttcccgtctctattaggggagtcctcactccatcctttatgaggaataaataggaatggagattaaaatctttaacgggaatagaaatcggaggagcactcgccacgaaatctccatcccatgtgcattcctactacaacgtacgcaatcaaaataataaaaagaaatagactaattttttttaaatgacaaaacagatataaaatcgacctgtctactacataaatttccataattatataataaatactgcaagttggttgataaaggtatattattcttgcaagttgactaagatacttggaatcgagtctgtattgaaaccattaattaagcaccatagaaactataaagctctctactgccaatactgtccacatcactcaacactagctggctagtgaacaagcactctttatcaatatataagttcaaattatctttcttatttttcttcactctttaattaaatattagattatgttatgtgtaccatatatattaaggcaactatgtatctcaaaatttagtagttgtttgatgcaaaaataaaaacacaacttatttaattttaaaattgaagggaataaataaaaagtatatatatatatattcatatctttgttatattaaatgtggttatcaaacggaaattgttagtttaataatattttttcgttaaaattattggttaaaattaatacggttaaatcaatcaattaattattttttttgaaaaaatataattttaaatatctaaatttaatttatttaataaaacataactttgataattatttaaaagtatcactaaaattagataatttttttaaataattttaatttaaatttgaattaaatgttaattcatttaattaatcttactttataacatggtgatatataggcataccctaatggacctgcacttctcctcaccaggaggttccaagtttagatcccccctcccccaaagtcaaaaaaaaaaacattctttataacaaattaataagttatattattaaaaatatttaaatgtatttatttattttattttttaataaaattggtttgacatatttttttataaataaatttaatactaaattacatttaaagtataactgaattgtgttagattgaatttttattattattaaaatttataattaggtaataataattttaatacaaatttatgttactaatacttaaatatatataattggtttttcaaaaaaaaaaatatatattaaattgggtacaaaaattttatttaaaataaaaataagcactgaattagttcggatttggacgtttgttaaattttattttttttctttctatatatgtatatataaaggaaattggatttacaaaaacaatataatactccaacaaaaattacaaaaagcatccattcctaagaacttataattaatttcttgacaaaaaaaaaaaaaacttatagttaatttatctcttgcaatatgaagaattctgaatctgattctacgacacaactcacgagtgcttcaaaatcacttggcttgttaaacacatcttcactcttggcattgaactaaatttggtgagctacccaaaaagattaaattttctcaagataaagttgttgcgttacatgctagtttttataatccatatcagagttataaaagtaataacagatttaataaaaaataatttttatccaatatgtaccataagttcaaggatctcaacataatatatatatatatagattaaatttgaaataataaaagaaacacaatacttcttaagcctatcagagtatcctttctatcttttagtacaattgacgatcatttaatctgagaactattgttgaagaattcacactttaatcttctaagccaaccttaacactcaagaatagagtgggttattacattcgatgtgttaggaaagtcatgattccataattataaatcatgttcccaaccatccatattattagattttgaaaacaaaagttgtaagaattatcttctctga

SEQ ID NO: 15681 - DNA, 9315 bp, Cannabis sativa
agagagagagagagagagaacagtgttgaagccaaatgttggagaagacgttcaagaattctgcttctgtctctacctgacttttatcttctcttttataatttttcaaggtatcattatggaccttttctaatcaatcaataatctctcgtaaatcacaccgaacaaatatataataatgtagaggaacgtagcgaaaatgacactcgattttatttttaaagaaatagggttctcaggattcttctagattgatgttagggttggaaaattatttctgtgattgtaaatttcaaattaatcaacttttcctcttttgcttttgtgggaagctgtgttttttttatctccattttttttttcttttaatagaaattctgtccttgagttttatattgtaatggcaattaaatttatatcttataataggtttgactaattgaatcagttctttttcatcaagtgaaacttttatcatatggattagttagttgtatgttttgtagtgactgttaatgtcaatgaggcattgaataacacttgttttgggttttgaagcttttgagagaagggtttaatggacaacatgaatgtgtccgagtcaattcttgcttggcgttggctcattgaagcaatggcaagcttcaaagaagtggacctatttcttttatgtggtaaagttgaaatcttgtgttcatattttatctgaatattagcttattttgttgtcatttgaatcagtttgcaagttaaaaggatggagttagttacttattttggttcctctttccagatgtgatggaagcggctccggaattacctgatggtttgggaaagaatacaagagaaattgttgctttgagatgtttggaacaattatcttcagtaaatgaaattgcttctgatgttccttctgcacagggtttgaaagttgggtttgatttgtcagaaagttgtgaagatgttcttcaacgcatagtggaagatgttagttccatttatttatttattgttggtatacaagtgctttggattcatttcagaactgatggagtttgaaatcgtaacctataagttgtgagctttttatgtttttctaacacagaatttatattgatttcaagtgtcgcattccttggcttttcagacatcaggaagaattttaagaatatcgagaatggagttgtcaagatgggatattcaaccattcgttgctcacaaaagagcttgtatgcccaaatgtgctttggagcaggtaggagttgtcttcatttgcaccctatttttatccatcaattttgatttttaatccactgtttgtatcgggcttgggtctctctttacaaacagctgaaagatgcaattcttgatggtactcatccatatgcggatttcttgagagataagggtcatttggcaacaagtttggaagatgctaatttgatgggtgatagcaatcatgattctgttactactaggcctagttttactggaactgatgtccaaaatgaagtgaaccctgatattttgattcctgagaagagaaacaaaccgctgggagaaaatcatcatgatcgagctatattacctacaaagagagacaggtctgggtcagctagggaagctatggcttgtaatgttcatgaagattgcaatggtgaacttaattccgagcttcaacatacaaatgcaaaaaggttgaagcagtatgaatcttctgacagtcagtttgttgaacagaaccaatttcctcttcatggaaatgaggcattagaagattcatctggaagagatgctccagttactaccagagagttgcctgaaaacgagctggcaaccatggaagaaagcagggttttagagaatggttttgatgatgaatctaataagaacaacgatgatcactcaaataaggatatggtgcagactccttgtaattcccctgtgatgcctaaaattaatagtggaggagatgaagccaatcagcctttatctgttgatgaagcaaatgttgtcagcaaccattttgctcaattaggtggtgcttttgagccagtggagcagaactcagttgctttgcatggaaaagaaccaacaaaagattcttctaaattagaagttcaggtccctgtggaggaaccaaagcttacagaggatgattgtactgtctcaaacaggtctcagccgattactggtgatgaaatttataagaatcagtcagagaatttttatgatgcccctagtttgatgcaagacgctaccagagatgacacccatcaaaatctatctgttgacggcaccaataatgcaagtgatccttccactgaaccaattggtgttccttcccacggtaccgtggataaaattcccactaaagaatctaaacgtagccgtgagcatgattttccatttcaagagcgaaatcctatgtccaatgacagatatcaacagaatattattgctggtgaggccaaagagaacacaaatgattgtggggaagaagagatgccatgtgatattgatggatatcgtaatgagatggttgatgtagacaagaaaaaacttgaatttttgcaagcgcagtgcactgttggtcgtgattccttgattgttgactggacagagaaatatttatgcatgaagtgcaataaagctggttcattgttggtttgcagtactaataattgccaattggtaattcatgagaaatgtggaggttctttagcaaaatttgatgacaagggcaacttctactgccctttttgtgcatattctcttgctatcatggaatatattgaagctaagaagagatcctcagtggctaataaagaactagctgcatttattcttatgggctccaaacgttacccaaaagaatccgacagaagtttaattaaggaaataaatcattctcctggaggaaatgcagatgaggatgttcttagaaaaaatctagaaaatgaacacttgggagcaagagagaaaaatgaaggcaatcttgtggaacttagtgtaaatgaagaagatgatcagcaatgtcaaaaaattaaagtcgaccaagcagaaatttctgcacagcataataataatgacagtaatagaggtgggtgtcatggctcagaaggtggagaaaagatggcgggagagtgcccatctgcaagaactgaaggacaacagaatgaagttccacataacgcatatggtagaaattctgatgtaaatcttgtgaatgaaggaaagtcaaacacaggaattcaaaggaaacttcttaaagaccaagatatttatacgaaaaaaaggtctgtaactgaaaatcatgacagtagtggggacgattctgaaaatgatgatcacgagtccaacatttctgattactgcatattatttcgaaagagaaagaaacctcggtaagttttgatgtctaagtgtttgctttcaaagaaacctatgagattctttttctattcgattgattttaaaaaaaaagtacacacatactcgagttaggatttgaaccactttcctctcacattgcacaaaccccttgaatcctaactaattgagctagcttcattttataagattcagtagtgtttgccttatcataaaaagagcttgtaataagaatttagtgaagttaaatgctcattaaaagtagtaatacaagcatgtttaagttcaaatgcattattctgattcaaagcattgattaaattattttttctgtaaaccgaggtcagctcagatggtatgggaggggtgtgtgtgagttcaggggaagggattcaatccccatatgtataaaaaaattattttttctgtaattaaatattgaggataatcattttgttgcatgcattagcagctcagacccagcaactcctcagaaaaggcgtaaaaaagttccatggacaactgaggaagagcagaagttacaggtaattaaatgtggggcaaacactgggtatttctataatctgatttttatattgttcttctaactgtaatttatttattgcattgttgcgtttagttatttgtttagacagtactttacaattgctaaaagcatgggcgtcttacaagtgattttttaaaactgcaacacttttttcggggtagatatagaatctatcatattgttttacttaattctgccttctatatttctgacatgttataggataaaaaaattgctgcaggagggggtgcaaaagtttcccgatgaaaagaatatgtggaagaaaatcttggaatttggagactcggtattcatggaaggtcgcaccgcgatagacctgaaggataaatggagaaatatgtgcaaagggatgtcaaaatgaaagtgtaagtatttttatggttaaggtcagtgtaaatccaaaaggcatagtaagtatgattttacatatttcttgggataaatgtacttaatataaactaaggtatggaatacacaattgactaaatacttttgtattattacaataaactagtatttgagacttggttctctctaacaaagccaaacctcacaacactagaaactaccagatgccctctccagaaaaccttaccctttctaaataggcgaagcacacacctcactcgcacctctctaggcataactagctacactacatacatcctcgtaacagaatgatgccggctcgatattctctaatcaccttgatacaagcttcaaataggcacgtgataacctttcttgcgcccacgataggtgaagtgtagagggggcttatcatatctatatatacatactttataagcatttgaagcattttcttgcagttttcttgtttttcatgttagagaaacttctaaatgctgaatcaatttttaggccccttgtcttaaagcccttttggaatttaaactttggaacaaagaatatgaaacatcacacaaaaaagtttattggttctatttctaagaattttgtattgaagattatatgatatgatatttactgccattacaaataaatagacattgctaacttatattcatggctaaatcctcaggattcttctatttaaatgatgaaaggcttaaagacctcaaggactcaagtttcaaaagataaggtccttacttggtttttgggaaaaatttagcatcagtagtctgaggtaaattactaaaaaaaatatatcagccacaatatttatataataagagtttgtaaatatcataaaagtatagttgggaaaatctttagctggtttactaatgtggggtgttttctattgtcaactgttgtatattcctctctctttaaatatatttcttctccagaatagtgttactgttactatcactgatatagttgcagtagtagcagcattaaaaacttagatctcagttttagtattttgtccaaaatcctctgtatactgaaatacacacacatgggataaaggtgatgggagagagtctcgggaatcaagctgtgattgccaagaaaacatgtgaaatagtactcgtgaaaatggaaaattttgaggtggctattgtgggcatatatgcaacttctcttacagaatccaagggagacttgaattgaagcaatgtctcattgaaagctttcacttctttctatccatgactcactctacttagtcaaagtcttggctcaccaaaagctccacaaaccaccccaaaccatttaatgcttcccactttacattactccttttctttacttttaaaatttacccatttctttggttttattattttcttttctgtttttatgaaaggtgtaaactgcttctcacatattaagtaaatattatttggcactttatgttttgtaaaagttaagttaccgattagactttctattttgtcaaatgataaaatatatcttgtatttttcaaaatggtacaaataagattttgaattaattttttattaaatttaaatgtaataataacttgatctagaggtattataataaaattggttacattgtctgtatctgtttatattaagaattatcttcaagttggttatattaaaaaaaattgttgaaaaattgagtttaggttttatttttattattttgaaaataaatagtttattttgttatttaataaaaataaaaagtctaataagtatttttataaaatacaaaatctaaaataatatttacccactaatgaatgattatttccaagtgatctcaaaatttggcatgaatgatttggcatatgcctcatagagaaagtaatatgtttttttagcatattaaacaaaggatgattaaagaaaaacctaaagctgacaatggaattattaaatgggtgttaagtgacaaagttatcaagtcaatcaaaaatatttaatagaactattcttacaaatatcacatgtttacaaattacatgacaactgtagttaatgggataacttgaaaaatcatatattctttaataagaccacaagccttttacatatattttttttttttttttgaagaaaagcgtctatatcatagattgaaataaaattagacctctcgttacacaaaatattgttaggtacaagccttttacataaaatcatcaaactataaatattgtgaaaattacacattttatggttttcatacaatttgtgaaaaataatttttttaaaaaagttaaaaaatatgagaaaaataacaaactaaggagataactggttaccctaaattatttttaattcttcaaattttttaatttttatcgcaatatgtttttttcttttaaaaaacaaaccatattttgtatactttgcccaaaaaaccacaaaaatgaaaacaaaactcccataaatatatccatgcatgaattcataccccattagacataacattcttttgtttttttgtgattaaaattaagtataataataatttattaccaaaaaaaaaaaaaataagaacatggaattcacaataaataaatactgagaaatccgagagaatattatctagttctagccttgaaaagaaaaaaaaatatgaaaataaaaatgaagtgtcacatgagatttgaaaaaacattttaagcaaacgtgaaaacatttaaaccaaagtggtttctaactcttacatatcccgctcctttgaactcatgcatttccattcctcactcactcactcactcactcactcactccttacacttcactcttcaccactctcactttttgttactatggaaaactacaagaaatctccattgaagccatggaagaaaggtccaacaagaggcaaaggtggacctttaaacgcgtcgtgtgagtatcgaggtgttagacagaggacttgggggaaatgggttgctgagataagagaaccaaagaagagaacaaggctttggttaggctcattctccacagcagaagaagctgcaatggcttatgatgaggctgcaaggagactatatggccctgatgcttatctcaaccttccacacctttatcatcatcaacaacaacaacaacaaaactcaatcaaatctcataactttaaatggcttccttcaaagaatttcatgtcaatgtttccttcttgtggtttgcttaacataaatgctcagcctagtgttcatgtcattcatcagagactacaagaactcaagcaaaagtcatctcttactcaaatttcaactagttcatcttcttccagtgatacaaaatctgaaactcatcagatcaatacagaggaaaaaacccaacaagggaatttaacagagaaggagaagaatcatgatggtggtgataatgagaagcctcagattgatttacatgagtttcttcaacagataggagtaatgaaaggagagagagatagtaagttagatgaagaagaagaagctgatgatgatgatatgggaaagcatgtggctactcaagatcagacctcatcatcatttgaagaaattcatgatcatggtcatgagcttgaagcttttactgacaagaatttcaattgggatgccttgtttgagatgcatggtatagctgcagatcataatcatcataatcatcatggtggtgcagaagaagaagttggtagctttcaagtttgtgatgttaatgaagacttgatttttcctacttcaatttggaacttctgagataatcagctgattttggatcaaagactcttatacatatatattaaagaaaaaatttaagattttgttaagggtaatgtgttttttgcattacccttttatcactaaggtagaaatcagctgattttgatatatataatatatatatatatacatatatatataaagagtgaaagagagagagagtgagagtgagagtgagagagagattttctttctagtagtaaggagtgagaatagattaagtttgttgttctacttgtaaacttatatggtttaatagaaataatatggttttgtttagtttattattataaaatgattttctttttggtcacataatcatataatacatattggtcacgttttgaaaataagattggattagaaaaattattagaggaaaacatataagaatgaatgaattgattgttttgccaaattagaaggaaaaaaacaaaaagttgagatgcaaagttgtcattttacttttccttcatattattgagttacatgatgaaagtagattggatatggtaaaaagttattgttatttctggaaggaagacacaagttattgccaaaacaaaattaatagattaaggctccctcagaagtccaaagattataggtatgatggatctcacaaccatcccagtactagaaatttgtgcccagaactggatgtcactggttccgaagggcaccttgtcccacttaaaaggaaacggtcaagatcctctatatgagcgtctgggatacatctggaagggttctccaaagaaacagcccactgaggcccatgctcgggtctaatcaagtccacaagttgaatccatcaagagaactagactcttatatgtccgggtgaaaaatcaatcatatcttgatccgaacctcttcggatctggaagggcatctcgtctaagacgaagaaggttccttgaaagccttccgaatgagcggaagggatacatccaaaagggtaacccaagaggcgctctggaagcccctattgacgtggcgatcctctgatattaaatctcgcaagatcagggccttgtccccctaagtcaaaccaaaggagttcgcataccaccaagggaaacataccctttgttcgacgaccacctctctgacgcaaaatttagtcaaatcctttga

SEQ ID NO: 15682 - DNA, 3951 bp, Cannabis sativa
  modified_base (2462)..(2467): a, c, t, g, unknown or other
tttgttatttatatgttatttttctttatgtttttttttttatataaaatactgtaaaaatatataaaaaaaaaaaaatctttaaacttaaaaatgtaaattttactaaaaaaaaattatgttattattctaatatataattatgtcaatacaacatttttcgtctatttatcccttaggcctgtatagtagtaagtacaaagtagtaactagaaaatgtcaccaacctccaagtttaggttgcaacaaggcccaaccaaccactccctttccaagaaggaaaaaaaaaaagcccaataaccccacttattagatgaccatttctccctctttttcgtagttgcaatatgagtaatttgccaagtatacagcagagacagagctaggagtttataatattttaaatagattttttcccacacaacattattagggtttttacaccacatatggaaattttcaattttttgacaattttattgtggggcagaatttttttcaaaagtactgtattttttaaaaaaaacactgggtaagttttatattatgtactgtgttaagttttcactgttattttacgattttttttttttagttgttccaccgttgttttaattattctgttttattgttttataaaaacacagtatttttgcaaaaaaaaattctgtgtgttagtaaaattataaacttttactcaaaatgcagtatttttgtaaaaacccttaattattagaatttgtcactttttagttccgtctgtccatttctttttctaaaaaataaaaattaatacaaataaatatataataatttgtcattagatcattattatgtatatatttgttgtttaaacttttaaaccgagccaaattagtattacattaacaaattgttaagaaaaaggaacataatacaatacaactaaagaagaatatttacataatcaatgtaaattacttacacatttacaatgatgtgtaagtatataatttgtgatcttactattatatatatttagtagctagtctttaattttaccataatattttaataattagataaatgttatgtttagtgtaattttttttaaaaaaagttattgttgaatgtaaaaaaaaaaaaaaaattattcctataatattttgatgtaaatgttggtatggaaaaagtaggtgatataaagtcaagaaatgatgataggtaccataagaggataggatatgatgatcgagattcggattctgtgtaaatatatttatagtatacgtcctcagaagtgagactatatatataaatatatatacataggcttgctagctaagctagctctagctacagctcctactttattactactagtagtaaaagactaatagtacaattacattactactacgtacggcatgcatgttactctcccatactctccctcattatcatgctcccaccccactatcttaaatatatcttaccataatatctcatactcatactagtttttgactaacatacatacttctcattagtgttttgtaaattcatactgaaatatttgacacgcgcgccacgaaatcaacacgagtttagaaggtacgagtacaacttgacacaaaaaaatataaatttaattatgttataatacaatgttataaattgacatgacataatacgaaaaatatatgcttaagcacgacacgcgacataaaaagcacgaaaaagtacaatacgcaagcatagataggctaacttgaaaagcatagcgcgcaacaagctgaaaaagcatgacacaacacattgaaagacctataataataataatactcatatttcgaacaataaataacaggtatagctacatgacacgtgtataacaaagagaataaattactcggtgaatttaagagtaaaggcataaatagcctcctcgaaatatgaagcccatacatgttcttctcggagtaaaatgacattcgcaacattaatcgtgagacattaatcaacaaatttttaatatataattaaagttgctaagcttgtcaaggcatttaagtatatgtctattgttgacattgttcacgttgagaggcataacttgcttatgcttgctcttgttcatcgcttcgaaaatataatctgtatgttatctgaggaatatgtactcgaggcatgcaaccaaaggttgtggaattttctgaggatcttatatcaaacaatcaagtgcctctgcaactgcgtgttgcaaaatacaaatactaagtcaaataggatagttattttatttggaataaaagagtttgcatgctatttctcgccaattagataaatgttaacgtcgatttttgttaattgtatttgagcctaaacaatgatagatttgcatagaaaataaaagcaaaaaaagtaaggtatgagcacaaaggtttttacgtggttttgtagttaaaattctgcatagtccnnnnnncaatcttattagatttctgatacacctctcaagtccttttttctctaatgttttttcatccctttttttagcatatcccgcctttatttataagtgcataggagtgcagttaattactcagttgactgatattttacaataagtatcccctgaagctatgggatttgattctacaccacgtaaaataaatgtggttaatatttgaaaatcacacagctgtaataagtctacttttaccgggtcaatgtaaacatgcactaaatgcgttgtaatcgtatcgttcttagacacctcgttaggaacgtagcaacaatagcctttatagcgagctagaacttttctcatgcctttccgaggttggtaatataggcctcgtcgctgctgcgcttgaagacataatgatcaatctaaaggtcgcaattttttagcgataaggtgaacttcagcagtcaacatcatttgtacgtcagtccctatctgaaagggttgtctcgccggaggtatgaaccccgttgaaagatgtctggagatgattagtgaaggtattatgagcacgcctacctgtagcgagatgaatgccttgctattagttgtttgggtttacccgtatattataagtcgagtgtctttagcaaccatcatgtctcgcttatgtcttgccttcttctctttctgcacagcgaggttgacgcctcgctttgcacatctgatgtcgtatgatttctcatcaatgcatgagttaacagtttgtatatatttatctcgcgtaagaccttttagtcagtaagttgtaaatattctctgttgattctacatttaacgatttcttccatctttaaatataattacatttgttggttcgtattctttccaatttgacacgtgtcctcctccgatgtgctagccgaattttgggtataacaataaactatatgaaatgtgaggaatgtccatgtttcataacttttgtaaagattggatcaataataactgctatcttacttctataaatagcagtgatcacattatgaaagggaaactaattttctaacctagaagaaatatctgccaaatattatatgttatcaaaggacatcagaaataaagtggactcatggagtgtgtagattttgttagggtttatgccctaaaaaacaaatatttaatggataatatattatagaatatatgaaatacaataatgagataaaatgaatacgttaatgatagaagtataattaataaatatctgaaaatccatattcatatagagaatgtatgatcttgtaaggtagtaaaagggaattaagatcatataatatgattaaaataagtcggtaatttattaaagtatggaatctttaaaatagaattaccaagtatgatttactatgtactatactctagtgtgtgtgattttaattcgaatcacatatgtggatagacatatggtaaaggtattgtgtataatttgattatacatg

SEQ ID NO: 15683 - DNA, 10693 bp, Cannabis sativa
  modified_base (48)..(93): a, c, t, g, unknown or other
ttcttaactttatatgtgttttccttttatcgttttagaagttcatannnnnnnnnnnnnnnnnnnnnnnnnnnnnnnnnnnnnnnnnnnnnntaaaataaattccaacaaaaacttggggagtggtcttcccaagttggaggctaggtattgggaagaagcactacggctccagggaaaaagggtaagatctaggaacgatccctgaatcgactaggggatgttaagactaatgggaaggtttcaaacactggccattggaactaggtttttcaaagacgtaaacatcccctaacaagtcttccaaaacaaatcattagaaagaaatgacaaaaaccctattactattacatccagcccccatagccaaggcaaaataaattgtctcagtgaattaaaaagtatagcaaaaaagagatatataaaaaaaacataacaaacaataagtaaagagtcctactagagtttaaggttgggcaccaccagaagggttggaggactctgtcccagacaaccgctccatcgtctcccatgaaagatcatgaacggaccttataccatgtatgacgcgggtctgttaggcatgattggtatccaacagctggctctccttcttcaagcctttgatttaaagcttggcctcaataagttcggctagaagggtattgttagcattgcgcaagtcacggttgtctacaatggcttggtcgagctccgtaaccagtgtgccagcctcctttcagtcctcccagccagcaaagccaactgttgtaatgtgcagaaatgaaagagctaagtatcaggacagaggtcaaaacataataaaagaagaggaaaagaaagtttcctgaaactttaccccaaccgcctgttgcttagctgaatgggccaatgcaaagacgtccacactactgcatgacgccgaagtatccatgggcagcttagagacattcccaagcacttggtccgaaagtttagcagtgaaaggggctgcttctctccccaccttgtgggctaagcgcttctctaggccctccacctccacggttggtccagtaggggtcaaggtgtgaacattgtctaaaatttcagccttctatatggccaaaagcacggtggcctgtctacgaattaacactttctctgcctccaagcactccttcaaggctttgttcacttccctatctattttcatgtcaagaagattgaaggcaaaagcctttcttcgaaatatgaaccccagagagggaattttagggatggcagaagggtagtacgaatgacgctagcccagcctcattggtgcatcataacatggaggatgggcccctgttttagaaacaaccatttcaagccttctccttttcctgtcgaggccactgtcacacgcagctttagaagaactggttctttccatagcagacctaatgtacctgccaaaaattagtatgacgctaaacaggttagcatgatacaagatcccagctctctcactgatagaggttgcatgcacggtgccaatgttcccagaacaaataatcgcacacaacatgcaccgtcttaactcctcaaaaactctatgtcaagtaaatgatgataaagagaacttactagttggacgggtgatcgttgtgatgtgtcttgtcaagatgaatgcctgtttgggatcaaagttgctagaaagtcttgtgagaaagaggaagagatggaaccaaacgctaagactctagtacgacaggcaaaaaaagggtgaagtgtaaaatggttgttgtaagtatttattaggcacctagaagttgtgacttccacgagaagcaaacggtttaactcattcaaccaagggacgtctgacagttggataagtgggaagctaagaaggtgtatcaactcccaacttttggcttccaccactgtatccttcatgaaaagtgctcatcaaatggaaagtttgctcaatccaattgcccctatttttttgcatctcaccaaacacgtacccgtcacgtgcacaaatctcaaaggtcagcatttaaagccctgaggagaaaataaaggaaataataccttctcacaatgacacttcaattggtggctgctgaagtgatgtaataaagagcctatcttaatcccacatgctcgagatcaatcaaggaggaacatggaaacctcccagaccgtgttacatcccgaaagcttgggggtaaatgttatccacatttttgtaaccatgacacatggattttaatcaaggagggttaagaagtcgttagccaaccaacttaatggtttgatgctctaggaggacctaactcaaggaaagggcttccgtgatcgagagttccttggctgccagtgatgcggggggtatccgtgagctgaagtcttccccagtcccaggagccaaagccatctactcccacaaagagtatgggtttttcccagaagaatataggcctttttggacgtgtgtaactaggctacactcttattacgcggaggctttgctcgtacatgtcaggctacaaacctagtgaccaagcctttataggtacgatgtcagaggttgtcccccatgacacgatatcgtacacgccctggaatgacacacgtatgaggcccaaccagtacaatctggtacccttaaatgcgatataaggaaaaggccacctaccaaatttttcccaaggatggtcaatctaagccaacacatgaattaaagttgtcctataaatacccctgtgaaacacaaataaaggagggaacatcatttgggaaaaaactcattcttccaacttttggcaaacacacctgtaatgagctaaataatattatatagagaaactctagaatatccctactaagcttcctcttctttaagaggaaccttctttaatgcctaaatcacgtaaaaatctcttatttttattctattttttattccattatttctttcttaagctttaacaatatctaattgtcaaaaaaactcagtaaacagggagtttatagtaaataacacatttaggctatctcgcaaagtccagcttacgaagaagaagatgtgttgactaggtaggtcacatttggcttgatttggtcaacgatgtgtgctttgattgtgggcaattaattgtgaattaattacttcatattcatttcaagaagtttccccatttaatctaatatagtacttactcgagatctagaaactgttatttccttatttatgtgcatgaataaaaagggaaactagtagagtcttctaggaatattctgtctcaacccttcggtctcatggtactggacttgcttttggggataattttccaatggtggaaggctctatatggacgtgtggaggttaaaggataaaatcattaatttctaggtgctactcgatcgtagaaggtggcttccgtctttcagtgtagaacatccacgtgttagttgcatggtgatggaaagggtgcatccatcgaggagttgctttcaagaaacaactatatattgatggttgttcactttttggcacaaaaatcaaaaaatgtcatcttcatcattactttgcgccttaatcttggggagcattaattgtagagatgcacgtggattgtggaaatccctgtccattggattaaacttgtgtttctagtgattatattgtgaaccatctatattctttcatgtggattgctctttctaggtataaatatcttttgtgaactcttgttacttttttttctctcattttcaaatttttaccattcaaagtttatactctactctacatcatttgaagttgaaactcgaatttagaacccagtcgtcttcttcaactttgaaaacgtcgtggactttttcctttgtctgttgttgaggattaaggcacgagaattcttgcatcatcaacccccagtgatcaagacttttacactaagagaaattgcaaacctggatattaatgcaaaaattgattcgctgatcgctttcacatctctgctccgtgaaaggttcgattaacatccccaaccagatccagtgacaattaccatgacatctccactttcgataccaggtatgtggtttcttcgtctctgaattgtgttctctagattttctataaaatgttttgcatgttttgatttaggatgtgattagggttttttatttgtgtgattattttcgtagataggtttaggcatcacaaacaataccattttttgaattaagaatttcttaaaatcgagccttttgcactagtcatgttggcaaacttttccccacgtccaaaattcttttgattttgggctctcgattaatctccattgtgcttttcctctttgctgttcttgacttcctatctagaacgaaggactcctagaagttctcgtttctggatagttattctagttgggacctctccaatcagttcatgggggaggatacgtagctccctttctatgttatgtatttagggtggctgaatgcttggattttcttcttttgtatagaaatcatgcctagactgactcggaggaggcatttatggagtaggaaaatgctccaaaattgatcttgaatgataatccatgggagatggaccaacacataaacaagttcaagatcaacaataatctgaggattcaacccagccatagccacatctatccattcttgtcttactttaacaactttatatgtactttttttatcttttgggggataaggatctccctctttatgtgtgcggacacaatattttatacccttaccgtgggctttctaagtacgcagtactatttgatttactctatagacatctgcatttttatctatagagtttgcgaagttttaatgctcttagccttgtgaggttttagtttcgaaggcctaaacctttagatttttaattaaatgcttaaacatacatatttttcttatttaacaagtcatctgtactccttggaatatgattccaatggccttcaccttggtatcgacttgttttgaagatttttttttaaaagtgcttttacttaaaggatttttgaaacttaaataatcaattaacttgagctaattatttactttagaattagaccttttttggtaaataccatttggtttttagggttttttgaacttatatattaaattaatataaataataaatttattttagtagcctgaatatcttaattgtgttaatctgaattaaccatgaagccataacttctattctaagttaacctagattaactgctaatatattaaaactgattccaagcataataaggtagtggcttacttctggctccttaaggttctagtttcgggcgatactcattactctttacttggttaattgcaagattaacttcaaatataataaggtagtggcttacttctgattccccaaggttctagtttcaagcaatactccctactcttatactttttatttaatttttttgtttcttgcaaaagagatataactttataacaatataatgtatgctacccccaagtgattgaaagttgagacttttgatcacttgttacatcataaaactttcaaagacaaaaaatgaaatgaaaactttttcttttattcagatacttcctgccctaaggcgtacatggaaattaaaaacaaaaaataaaaagtaaagaatgacagaaaggaatctgaccacccctagtttattgatagtatcgacacaggttgtcagtgttccatgctcttgggattcttgttctatctagtcttttcaaatgatcggttccatcagaaattttgactataacttcatatggagcttccctgtttggtccaaagaccccaactctgggctctagagaggctggaaatacccttctcaaaatagggtcgctgatttgaaatcttttgcttttgactttagaattgaaatttctagaaattttgtgtttggtacatctggagttggacatgtgactgctctcgaagctcctcaattaaatccaaggattcttaaagtagagcatggtttcgggttgggtcataggtgtctttcttatatgtaggcattgtggattcaattaggattactacctttgcatccataggtcatggagtatggagtgtggcatgtagaaggtctttctttggttttgtaggcctaaagaactcttaaaatttcctcggaccagtgtgctttacaagcctgcagcttcttttttaaggtagcctttaggatcttgctaacgacttcaacttttctattttcttgttgtctggccacagtcgaaacacttttgatttttccatgcttggcacaaaatttacgaattgatcactattaaactgctttctgttatttaacactatcttgtgtggaagtccatatctacacatgatagttttaattacaaagtccagggccttcttggaagttactatgttcttgggtttagtctccacccatttggtgaagtagtcaacatcgacaatggtgaatttgacttctccctttccagttggatgtgatcccactaagtctattccttagacagcaaagggccaagggctattcaggttatctccattggtggggctcttggaactttcaagtaatgctggcattattcacattaatggacgtactcagtgaaatccttcttaataataggctagaaatagccttggcaaatgattttcttagaaagactgggtctgggtgtgtgatctccgtaaaaaccttcatgtatttcatgcatgacagttattatcttcattccagctatgcaccttaggtacgacattaacaatcctctcttgtagaattttccattcatgatcacgtgtttgggggcctaatactggatcttctgcaaagcagctctatcctctaatagtgtacccatttcaatatacctgagtattattggagccatccaagaggttgagtgatcaatggcaggcagccccagtgtttctgtgcttggagtgatgagatgtgcgatggggactagtttgtatttctttatctctggctctgttgctaatttttctaacatgtctgcaaaaccattcttatccccagggatttacttcacaaagtagtgcttaaaatattacaatagctctctagtttttcctacataactagaaattttttctcctttgatatggtactccccagacacttggttgacgactagttgtgaatcgttgtagagctcattgtttttggctctttttccagttgtaatctagcgttcataaccttatgctcaacttcattattggaagctctgaattcgaaacaaagtgcactttggagctgtagttgttgaggagagattaaaatgattgcagcctcagaagcttttttattttatgctctgtcaacatatattttccacacttctctttccaagattgatgtttcaagattatcatttatccttgtgcaatccataatgaagtcagctaaggcttcatcctaaattgaaattttaggctgatattgtatatcgaattagctcaataccattgcccattttatgagtcccctaatgactttggtttctataatattttatggagagggtggttggtcaaaaacccttatagcgtgagaaaaatgaagcaattagtaagcaaaatgaaagcttctcgatcatgggatatctagactttgcgtccaaaaatattttgcttatgtagtatacaagaatttgtcttatccttcttctcgtactaaggcagcgcttatggcttgatctgacactgccaagtacaggaacaacaactcttcatcaacttgtttggacagtattggagccttcgctagatgttcttttagttgttggaaggttggttcacatttttttatccattcaaattagctatttcctcaaagtacattgacgaatggtatccagttatctgtgaatttggagacaaatatactaagtgttgctattcttcttatcaaattctaaacatctttgtgttttctaggtgaaggcatgtctagaagagctttaattttctctgagttttccttaattcctcgataactaactatgaaacccaagaatttccctgaagaaactctaaaagtgcatttctatgggtttagtttcattccgtactcctaaattatggtaaaggcctcttctagatcttagtgatggctctttgaagtttctgattttaccagaatgtcatcaaagtaaacttccatattcttcccaaaacattcttgaacattttattcaccaatccttgatatgtagcttcgacattcttcaacacaatggcatgaccttgtaacattagattcctttgttagtttggaaacttctgtgctccttgttagccacatgcattttgatttagttgtagctggaatatgaatctaggaaggttatgagttggtatcctgcgatagcatcaaccatcttatcaatatgcaaaagtggaaaatagtgttttggacaagctttgtttgaactatgaatgctatacatattctccatgtcccataggccttgggacgtgaaccaaattggaaagccatatgggatatgtgcttccgtgaggaagttaatgtttgtcagcttgtatacctctgtttttactacttccaacctcactagatctagaggcctcttcttgttcagactggatccgcgataggatcaacgtttagtgcatggaaaatagcacagcgactgattccagacatgttagaatgactctaggctaacccgtcactgtttgccttgaccgttgaagaaatcttttccttcactgccggagataagttcttccccactaagataaccttggagagatatccatcatctatgcatacttcttctacttcttctattggttcgattacacgttccacaccaatttaatggatcaaactcatcttcttggaccacccccaatgctggctgggtagatgttctggatttagagatatttctttcctcgaccatgagaacaatcattgttgaaacaatgtagaaactttgctcacttccttgatctcgtgtgattgtcccaatgcttcaggtatcacatggtaactttaagcataaacgctggatagattttacaactttgaaatccattaaaaatggtcttcccaagatcggattctaagtagtagggcatgatattaccaacgtgatgtacttgaatgatgatagtttgttacttctggaaatatgcccatttattggcatcacaagatttatttttcccaaggggattagtgtgtctccattaaactcttgcagttgaatcggacatggtagaagattggcttccactagaccaatggcttggaaggctccttcaaaaatgatgttcacagatttcaatatgttttaatatattctcaagaatgattaaaatgaaatcatgtggttcatattattgtggatactgtgtttttaagtttattttcttaatgacaataatattatattgacttattttttaagcatgttttgtggtattacattatcttatttatttagtaaatgtaataattgattgtattagtttatttattaaccatcttagttttagtgaagtgaggactaataaagatattttattattgaaatttaaaattagtcacatgttgaccatagttccttaccatactactagacttattcaccatattgatttaatactttagtttttatggttatgaatgtcttttattggcttaaaagacaatatgattttcatagttcgatatcaaaggttaaattggatcggtatgttaagatgctatcaaaaaaatattgtttttagagtggctacaagtattttcttgtcttcaacccatgatttttttttaaacaaaactattttgatatattatatgtatatattgaaattaatgtagtcctggatagttctttactatgttagcccatattgttagtgatcaattttgtatttgtgtgtgtaaagtttagttgaagcataagtgtggacttttctagttaactgaattatttgatgagtaggcctagtccaagtagaattatgtagttaagtctcctccttaactctataaatgtatattgtctcatcataattgtatacttttcataattaaataaaataaatttactgctttgttagattctatgaaggaaaacttagttgatagtattgcacaaccaaaattgagataatttctacgtataaattaggtgtgaatacctaattattattgtgttttaaattatgtacaaattttgtatcttgatttatttaattttttaacaaagcagtcgagatactttagagcaagttatatttttgtagtagatgatagcataaccaccttaagaatcttaaaggacccatcaaccattaaattaatagaaagaaaaaaattgatgaggatgaataaaataaaaaaggtagttatctgcaactacaacttgcaaaaattctctcactttctctctttcacgtcctttttgttagacatgatgttgccttcacctcttgcaaacagtaagccaaatggacgccacgaatggcttctccgccttttattacccttatactgcatctccctctctttttctcctaaaaaactgcaaatctggtggttcgtctcctgtggtggctagtggattcctctcccctctctctctc

SEQ ID NO: 15684 - DNA, 3206 bp, Cannabis sativa
  modified_base (42)..(60): a, c, t, g, unknown or other
ttagaaagttcatatttacggtgttaataaacatacttgtgnnnnnnnnnnnnnnnnnnntaaaataattccaacaacaacaagagtagcagtaacaacaacaacaacaacaacctccgccacactctacgcctggtctgtcggccctaccgcaccaataacattagtctctatctcctaaccatttgcagatagtgtcttcttaatctactccacctttagcttaatctcaaatctaagcccaccactgctaatctatcttaacccatctcaagaggtaaggctccttcattgggattttctttcctcatgatgccacctgtttgccacgactacataacgaaggctgccattttgaggaatagccatgagcgagaataggttactctccaaaagagggccactcaaatgtcttccattaagatggacaagattgcagaggggtctcgccgacctttaccccaaggccctgtgttggatctgcctgtggtgagtcaatatctggaacctatagtgggtagatcatcgccccttatgcggcaaaaatgatagataacataggtcacagtgtgagggagctaacttttgagaagtgggcactaagtagcagcgttgatttgtttactctatcaagaactgccaaacagtaggctacaggggtaagttctaacccctgatctttcctttacttgtgatatgatttttgttctcgggatgaattttgtaacttgttcttatcttcttttctcaagatggcattgttcgcggagagggccgctaaagaagcatggaatgtaaccatggagctaagccaactccgtgccaaggtccaagccctgaccactgagaatgaggctttttcgtacaaggtctgagcaggtcaaagctaagataacctccggcactcacatgtctcgggaagagtgggaagccaagttgactactgaggaagagaaatgggacgccaaaaacttgaagaagtattcaaactacaaggtgcaaattgagcagcatgcttcaaggttggcaaaagaggttgagaagaagctacgctccctctaggagtagttagccaaagccacaaaggataaagacatcgccgaggcccgtgtggtggacaagtttgggaccattactacccaaattcgacatattaatagcctccaagaggacttgcgcaagaaggactcaaacattaaggacctcgaagacgaagtaaaagaggtgaagaagctggtagctacttgggaagtcaaatgtgacaaccagacctttctctaccaaggagcctgtaacaccagtaacctcgtcaagatatcgtcgacaattctacaagcaagttaaccgaccccttaaatggcataaagacatacattgctttagctgccaagcgtcagatgagggagactgctccccaactagttttggatgtggctaaggcaactaataatagggcagttgccagggcaaagagggatcgcctttgcccttagagatgtcctatgtcatcgtcttcacaacttatggaaggtggatccttccatactttgacacatagataagatggatcgggagaaggttaccaggaaggtactttccatgagttgcagtagatacctcaaagagttgccccgtaaagtagacaatgatagtgaggaagaaactagtgttgaggcctcaagttcttaagaatccgtaggagctaaggtgtcttctagtagggtcaatgaaaggcctgcttgagatgctgctgatgccaactcgaagcctggggaaccatctaatatcttagctcctacagacctggcagcacctttaccctccccggaccattagccaactttctgtttttgtttttcacctcttttacttgttcttttaaaggcaacgtgagctgagaagtgtggatgtctccaacttccttgtcgcttgtttaaaacaaaactggtggcctaaaaaacctaaagtgtaaaatgtaaacacaaaatacttttcgttctcattatatgatgcccaaaggccatttgtccaaaaagtttattacacagactattttcacaaaaactcttcaaattgtgtcactgactagtgtccaccgcctattgataatatcggcacaaatgatctgcattctaggcattgaggactcttgatccatccatctgtttcaaccaaaaggtaccatgtcccaccttcttgagtatctcataggggccttcccagtttgggccaagcacccccactctctgttcttgggaagctgggaagactcttcggaggacaagatcaccaatatcgaatgtacgacttttaaattttgagttaaagtgtcgggcaatctttccttggtacattttgtgcttgacttgctactgttcccgtagctcttctattaagtctagtgactcctggagcagagagttgttgcgggtagggtcataagtatcccaccgatgggatgggatcatggtctccactaggattacagcttcgcatccataggccattgcatatggcgtatgccccgttgaagttctttctgtcattttgtagacctagagaaatcgaggaagttcttctggcaagtgggtttacaagcctgcaacttcttcttcaacgtggtcttaaggattttcttgactgcttctacttgtccattagcttgtggccgggctacaacagagaagcttttcacgattctgtgctgggcacaaaaattgatgaagtgttcactgtccaattgcgtcccattatccaacacaatcttataggggagtccttatcggcacacgatgtttttaacaacaatgtcttgtgccttcttggaggtaactgtgtttaaaggttcagcctcgaaccatttggtgaagtagtcaacagcgacaatggcgtacttgactttacctttacttgtggggagggatcctactaaattgatgacccataccgcaaaggctaaggactactcattagtgtgatttcagtgggtggcgcacatgggactttagcgaatctctaatatgtatcgcacttcctcacatattccatgcaatccttattcatggtgggccaaaaataaccctgtcccaggattttattagaaaggcttggtctggaagtatgatctccgcagaagtcttcatggacctcatgaatcactctgctaatctttgtccctgcgatgcacctcaaatagggcatagaca

SEQ ID NO: 15685 - DNA, 4864 bp, Cannabis sativa
  modified_base (4831)..(4837): a, c, t, g, unknown or other
tctaatcttctattgataacaaatgagattatatttaaatgggttttatttagggcataaaatcccaacagtgcgcccatttcaatgtgagcccagctctagatgccgaagcctccttttgtgcacttgctgggcctctcctcaagtatggagacctattccagaataatcctggaacattctcgagccctcgtaaggtctcatatttcctcaggttattgtagttcctgaacatattgatgttctggtccaattctcaaggactctcattcaggaccaactagggtgtgtctcttcgctccatagcttcttcctctgactcatcctcttctcgacgaggttgcttatgcatactttttgtacaaaaagaacaaaatctaagcagttagccaccaaaactacctagcatagaaagggagttgggatcctcccccataaactgcttaaagaggtcccaactagactaactatccaaaaacaattgcagataggaagtcaggaacaacgcaggaagagagatgatagaaattaacatcaaacccaaaacaagaaggatttaaggagaaaggaagaattttccagcacttctaccgcaaatcgatttactttagaaatttttatgcgcaaattttaaaagattatctggttcgtggtgcctaaatctacataagatggcaattacataatcaaaaaaaccgaatctcatccctggataaaccatgccaatgcaattcaaaatgacaaattctaaaaatacaacccatgtgcaaaaagataacacctgataatgatattgaagatgctaagctgatcgttggtggatttggctggggaagttgatcgcactgatcacaaagccaagatacaaaagcgatcaatgtgtcgatatctgcatcgaaatataggcttgcaatttcttctaatgtaacactcttaatcaccagaaaaggaagatgtgggaactctcgtgccctgatcctcagaagtagactgaggcaaaagtccacgactctttctagggtgatgaagaaggcttagctttgaagataatttggatttttggggattctagggaaacatctacaccttgaaagttgaaaattttgaaaaaagaaggaaaatatgtaattcgaagttaccagggatatatatacccaaaaaggcagtccacgtgaggaggatatagatggccacgatcttctctctagaaacacaatttccatccaatgatcggggagtccaatgatctatgcatatcctagtatttaatgcattctagaatcaatttgtgatacaatgataaaaatactctttttcaattttcatgccaaaaatttaatagacgtcaaaataagctgtttctggaagaggactcctcgatggttgtgccttatcacacacacacgattgatgcatggacacatcatcgtcacagacagaagccagctttcatagtcgagtggcatttgaaatatcactattccaatcttcaatttccacatgtccaaattgagagagtggtgcaagcttccaccatacacaacattctagaagctaggggataaatattatttgcatttctggcattggacatgtggactccaaatcaacattcaagacccattagtgggaccgtcattgaagacaaaatgggtcgagcccatcttgatgttaccttcaagaaacttgtcatggttttgcactcgccaaatcatctgccttcaatcttctgcctcacgagaccgaagagacaagacaccacattccctgaagacccttctagtttcccttcatatttaggttttcaacatattattatcacataatacatatatattaatgtagcaaatatagagatttttgtatttcatttacagaatttttagtattttttattattattcattatgtttttcattttatttttcaacattattattacataatatgtgtataatgttgcaaaacatgccaatagagcttggcttttcacttttggttaccgaaaatctcttaatatatgactaaagttgatgaggaccctgtcgcagtctctcttattataataacttaaccaaaaaatatgtgttgcactaataatataaaatttgtatacaatcttcttatttatagaatttatttaaatatttattagattttttaggtcaaaaaataaagtcacagcttcttttcttcttattttataattttttatttctctttttttagaatatgtaaattttttcattattaattaatatatttaattcaagtatatatgtatatttgtaagaaagaaaatttaaaatatatatattttaacaattaatacttttttatattgaaattaaaattttaatttaatttaatttattcaaacaagacatattttcaacactaagagtaatatatataataaataaattaattaataatataaaatttatatacaatttgcttatctataaaatttatttaaatatttattagatttttatgtaaaaaaataacgtcatagcttcctttcctcctattttataattttctatttattttttttttttaatatctattttttttttcatttttaattaatatattttatttaaatatatatttttaaggaggcatattttaaaaaaaatttaacaattaatacaatttatattaaaattaaaatttttattttaatacagacttcgctccgcaccattagctaaatatcccctccaatattcctttatttaatagagatattcttttatatcatttctagtaagaaaggggaaacaatatatattttcaatactaagagtaataaatatatttataaataataaattagttactcacaattattaaattaaaacttatcaaaattttaaatttaatatattttcatgacttaagtattattaaacagacgatatctatctcttttgtcaagctttgagtggtgcaacccaaggtgttattaatctccttcatgagtttgaacttgcatctggtcaaaaggtcaacattgccaagtcttctatatttttcagccccaactctgatgatcaaacccggtctcaaattagctctattcttggaatggccaaagcttttgatggtagcctctacttaggcttacccaatatcattggccgcaacaaatcaactatctttggcttcttgaaaaataaatttcctgctcgtcttaacaattgggatggaaagtttctctctcgtgccggtaaagaaattcttctcaaaactatcatcctatctctacctacatatgccatgagtgtttttctatttccactaggcatttgtgaggacattgagaagcttatggcgggattttggtgaaagacttcatctagtaaaggtcatggtattactttgtcttcagagagaatgactgtttcaaaagatgagggtggtatgggtttccaatgccttcaagagttcaatcctgctatgcttgctaaacagggctggagattattatgtcaccccaagtcctttataggacgtatattcaaggcaaaatacttccccaatactgattatctctcggccgaacttcggaacaatcccagttttgtgtgacgtagcatttggggcccccaaagtgtggttcgtgctggtgcttttcgaaccattgggaatggactaaccacaaatattctttcccagccatggcttccacattcgtctaacaagtttgtttcgtcatctcatccgaccttatatgaacaaactattgactctctctttgtaaccgaggaaagaagatgggatactgaaatcattaatgatttgttcaatcaccattaagctaccctgattcttggcattccactgtcacctaatgcccacgctgatttctaggcttggtctggaaaacgttcaggtatcctctctgtgaaaagtgcttccactcttttgcaaaatggtaagcccaagagccggagagctgataagtcttgattctagcgcaaactatggcatctaaagacccccgcaaaggttatgaactttatgtggcgtgctacttctgaatgtctccaaacttgcctccaacttgtctcaaaacatgtgagaatctcatcttcttgcccggtatgtaactcccattctgaaacgactgttcatgctttattaaactgccatcttgcttcacattgttggtcaacattggggattactttgaacatgcctttaccagccttggttgccaattagctccatgaagtcgcttgcttttcgcagacgatagctatctcttttgtcaagctttgagttgtgcagcccaaggtgttattaatctccttcatgagtttgaacttgcatctggtcaaaaggtcaacattgccaagtcttctatatttttcaaccccaactctgatgatcaaacccggtctaaaattagctctattcttggaatggcaaaagcttctgatggtagcctctacttaggcttacccaatatgattggtcgcaacaaataaactatcttcagcttcctaaaaaataaagctcttgctcgtctaaacagttggatggcaagtttctctttcgtgccagtaaagaaattcttctcaaaacagtcatccagtctctacctacatatgccatgagtgtttttctaattccacttggcatttgtgaggacattgagaagcttatggtgggattatggtggaagatttcatctgtaaaggtcgtggtattacttggctgtcttgggagagaatgattgtttcaaaagatgagggttgtaataccctagagttaagaaatggattaccaaaaccctatgtaaagcccgcttagttannnnnnnaattagcagttaatcatgattatttat

SEQ ID NO: 15686 - DNA, 9502 bp, Cannabis sativa
atatgacacacgttggagggtgttaggcaccactagtgccttttagcatttcttataatatcatataacatagaagaatgaatttgattggtcaattttaatgagcatttattaatgtgccaaaatttgatacatgtgtacaatttgacaaaactatcaagatatgctaaccttgcacatcttttaacattgcatttgacttgagggaaagtgagagagagagagaggagagataaagaatgaggtctccattttcattgattttggagaattaagagggagaactcatccctctctatctctcctcttcctcccacttttttcttttgcaaaataattcattttttctccccttctgttttcatccttccaaaaatcaatagataaggaaggtggcatggtctaaacgtttgagtaaagtctgagagttcattatgatctaaatggacataaagcttaatcttcaaaagtttgcaaagtgttcggtaaagtaaattaaatatttgaatcattttggatttgaaataaaatgaaaataattttatcaatcacataagttatgtgttcatactgtagtaatttaaagcttaaaaatagtatggaatggtaatttttgaagtcatttctttgaaattgattagactaattcttatgtcttgtatgattctgcacgcagaagaatatgaattgatgaaagctgttaatatccaccattaacattggcaatacacaaactgttattatcttccttgtgagagtagtttgtttaattttaattagaactttagtgtacttattacttgattatgaattttatcaggtggaggacaatgtttggaatttcagctataccctctattctactggcagtaggaatgttttttgctccagaaagtcctcgatggctttttcaggtttttctctcagaagttcttttctaatgttagtggaattattaatggctttgatggtttctttaagctgttgataagtaagtaatttcatatatattagttgctcatttaattatgaaaaaaaatattatatatattttcctttggcagcaagggaaaattcctcaagctgaaaaagctatcaaaacattatacggaaaagagagagtagctgaggttattggagatttatcagctggaagccaaggctctactgaacctgacgcaggctggtttgatctatttagtacccgctattggaaaggtataaacataagttgatcgaattcttttgtccaatattgtgatgagatgaatatgcgctttagattgtaataagattcgttgagttcataattcttgaagactaaaattagagtaattcctatagattgatggggcacatattatacaagcattcaaaatccattaaaattgccacctttttctgtgtttgttggatattgttgcattgcaaataatatttttttgtcgcttttgaaaaatttgtagttcttgttaaaaattttgatactttaggaaatgtaaaatctcaacataatgcttgattgttaaattaggtttgttggaagaaaaggtagtaagaccatgagtaaaggtaaagaagaataactttcaacaaaataaaccattataacataaattgatattcatcttgcgctttgcttccaaaatatgattgcacataggggctgaagagaaactacactgacaatcaatgctgttgttttctttctttttccttgacaaatatttcttgttgcagttgttagcgttggtgcagcacttttcttgtttcaacagttggctgggatcaatgccgttgtatactattcgacttctgtattccgcagtgcgggaattgcctctgatgttgcagcaagtgctcttgttggagctgcaaatgtctttggttggtttcagtgttttctcattctgagtgttttaaattttggtttctctttgtatcatgccataaagtgcgtccaactgatcccttttcaggcacagctgtggcatcatccttgatggatagacaaggaagaaaaagtcttctaatcacaagctttggtggaatggtactgtgtttttccacatgaacttttatttgtctatagatatcgatctttgtactttgctataactatatagatatagatattcatttcatcaataaaaaagattatgctgtcttgtattttgctatagtcatagaacatagtgataagcttcctattatattaatggtttattatagctctgttgtattagttgtttgttttgcttgtttttctgttaagaatttaattgtggcaatttttaagttgttactaggttagtttcttacgaaaacagaaattagactagtttcttgtttagaatgaggaagtctatgaaattaaccaatgaagaataatattagactagtatactcacagtagtctaaccatgtaaccttgaaaacttggacactgcctaccctgtagaatataaagaaaagaaaattatatttgattactaatcgactgctcatgaatttatataataatcaagagcttagcttgtacctggccaataaggcagtgtttgaattagacaatatatggatggtactattttcacttgcctttccagttatatgaaatattgtcaaattagtgtgacagctcttgcaaaaaaataaataaagaaagaaattattgtgacatctcttaggccttgcttagcgtgtgagatgttctgttttcgagtctttcaatttatggttttatcatataacaaatgacgctcttgctgacttgtttaggctgcttccatgatgctgctttctctgtcctttacatggaaggttctggcaccatattctggcccccttgctgttattgggacggttctgtaagttcttacttctcatggcagcattcgaaaagttttgtgtgtgttctttttctctttttcgttttctccaaaaacaaatatgatatagtaagagtagtacttggactgagtgagtcccttcacatagtgactattttatcaccgagaattcttaaacttggccttttgtttcattaacagatatgtcttgtcgttttcacttggtgctggtcctgtgcctgctcttcttcttccagagatatttgcttcaagaatcagagcaaaagcagttgctttgtcattaggaatgcattgggtgagtgaccataaacaaacctcattggtttgctactttatatttaacttcttcctctgttttctatattatcagtgttttcaaaccataaataatccaatttctttgatcttgtgtgctctgcctttgatgaattttcagagactgctttcctgaaatagaaaaatgaaaaatgaaaacaagctatactctatcattatttctcttaatacatagttttaagaccacccatactgcttcagtttcgtaccaaaacaatggccttgtgtagtggcagtactcgaccctatatttcctataaatcaaatgatgtgatggaatttttcttgcatttctttttattattcatgttattttgctagttttcaagcctgtactcctctttgtattttaatttgtttccccttcctggtttctgaaaatttgattgtttttgtatttgatcagatatcgaacttcgtgatcggtctctatttcttgagtgttgtaaacaagttcggtataagctcagtgtatttgggcttctctgctgtctgtcttctcgctgtcttgtacatatctggtaatgttgttgaaacaaaaggcagatcactggaagagatagagcgagctcttaacccagcaatttgagtttaacggcaacaaatatcactgcagttatggatatttatttcagggcaaaagccattgttcttcacggacctaatagaggactatttagctctcaccacttctttttttcttttccgattccttttgagatgatgttaggcaattgtctgtataggtcgagttttggacaagaactctttccagcatgaaatttcaatggaacttgaaatgtcagacttgataagctttggatataataatttagcatgtctaacaccatgacgcaaatttatcaattagcagaaatgcatccacagtatatattttgagttgataacaaacatgaaattttttggtactaccttttatttaaaaagaataaataagttattggattacattttatttcactctattttaaatgatatatgtaaattttattaataattgttaatacttaagtaaaatgtgaaatacttcaataaattatacatgtcaagcattgagtaaaagaacaagaaacctcgaatgtataatttaaactaaatttggctataaatcaatattataattgatctaaattttatctctaatactaaatttttattaaaagtataaaaacttaattaattataaaaataaaatataaaaaattattaattacgttaataaatgataaaaaagtaaataaaaaatgtatatttattattatggaataaaatataatcatctatataaaattaagcacaattgttgttggcactgtcacaaatcactatatattatatttcaaaagtattaattttaaatatgagtggatatttaacatgttacgagcaaatgtcatgattgattgaaatgtattccttaaagatcattacaaaatcttcttgtgtgagaagtacaattttttacatttttcattttatttaatcacttcataatcaaataaagtcccggataaaaatgttgaatatgtttctcaagatctaagaaatccaatcttgttaaggtagatctgctttcagctacatccactaagctcgagagaccactttcagagtgcttccagtttcaaattaaacaacatcagcaaatgatatttacatgtttgcttttctttcccacctttcctttgtgtcgagcctagaaaaaaagcaaccaaaagaaggttaaactagcatcaaacataaaacgagaaaaggaagcaacaaagccaaaactagcttgccagaagctattaattctcaagctctaataaattaagagagaaaggaatcttatatttccaagaactcataattcttaagtttttgtgtaactccagacttatattagcattgactggttttcactttgaagatttcttatttaacagaattcttgtctctatcaaagctgaaaataataacaattcttgtaacagtataattcataatgataacttataataaccccttaaaaataaattgtacatgcacatctgatgttagttcagactacaaagttgtagttgtagagcacaaatgttaatgtttttttatcttcaattgttgacttttggcttaatgttttgttatattgttaaatactaaataaagtccattactcatacccccaatgtaacttttggtgatgctttggaacaagataagctgcaccactttcttgctgaaatgaggaactgttttcgttgtcgtagttataaccaagatcagttggttctttatcttcacaatctttggttattacgtctttgcagtgtgatttgctacaaccatctgcaatattccccaatggcaatgagttagactctgcatatgtagcagtaaacaaagcacatctagtcatctagataataatatatatatatatatatatacaatataaaagctaatgaagaacctttttgtttctttttgaactttgatttagactttatttctaaacgtctccggtgcagctcctacaataatagacaaaatttagaagtgaatgttgcaacaaagctgagacaaaaacaagaataacaatgcaaaattacaataagcaacagagcaacgtctcttcctggaaagtgctttaataaaaatgtctagattgttaaaagttcctatcgtcagagaacttgtcactgaaacgttaccttctaggttattgttcttaagctaggaccttacaccatgttaaaaccatccaaatttaatacaaaagtaagaactttaaacgccaatgaggtaattggccccttatttctttctataataaagcctgcaaagacactcttccgttttttaaccttcagaaataatggaagacataggggaaccataccacttggacaattacatagccaaaccataattgcaaccacccaattgcatcatacatcttgatcggaaaagaatcaataaaaacataaagaatccgaattgctctatatatttctcaatataaacgaaataagaaaaagggaccattccgttaacgaggagctatgggagagcccctggaatacgttccttcattcccagcttggccggaggaatttcccccatcccctagcacacatttcagggggcacatcccccaaacgccttatcgttcgtgtcttacaccgtagttcactcacttgtgctacaaaaacctaatgaagaatttctagttagctactgttacccattaagaataatcgtaagttatattctcacaattgtgtacatttgattgaaaccaaaaatgtacattgaaaatgaattggattgaagttttcaagtatggtttactcacgacagagtagagctgagtttgaaatgctttcatttcattcttatgttcaagatagataacaacgcgaaattctctaatatttcattccatggatgttttcattgcatggaataatgctttcttttttatgtctgattcaaaagaaaaaattaaaataaaccctccgctaacgcagagtccaacttcaagtagttttgaatgattttctcttgggaaagatcagtgaaatagcctttgcccacacttatcccctcttcctttgcaagccgctcaacttcaagttgaactctatctcctcccacattatttgggtccaacaaattacaagctacttcaatgacagtctcaccatgtgcaagtgccatggcctggaccgaaggaaggcctcctcctcttccacttacaccctttgcaattctgcgaatcgctgagagattggtagagaaaacaggaacattatagttgtcaacccaccgggttgctccgatgacaatgactccttttgttggaatcacatgaggtggaccctcatctggcttgagtgccaaggactcttgttttagccccccaacccactggtttccacttgaatttggcttgaaataacccaactctcttctgattgtatcaagcgttcttccctctccatgggcagctccgtatagaaaagtaggtacttgaagaccataaccaacatctgcagccaaagacttggcaatgttagcagcctggcccagagaagtagagagcaagggatggaagcatatatggtccacaataccaagccggggatgactgccactgtgcaactcaaggtcaatggactccaaagcagccttaaccatggctaggactgaggttctcaaggggcatggatccaaagatggttgtggatccaacttggaaacaagtgtgtagccaactctgttgtaagtctcatctacaaatttgttgataatgggagcttttgggaatagcttagcagctctttcaatggactctagagctgccctgtttctgctttcagatatgtacaccttacagcaaccaagcatcgactttaacattatcttttccttctcaactgcccatatcacaatacaaactcaacaacaacgttatatatttagataaactaaagaagagaacattttctaagaatcacgtgtcatcatacaaaggacattgcagtaaaagtcaagacaagagtaaaaaagcaacatccagtaaccaacatgtcgtattgtatgagacaaagacaataatctatttgaaattctaaactgagtgataattgtattattgcttcgaataatttagaactaaacaaacactgtaggatagaaacacaaaaaggatcaaatggtaatgtggtagtggagtcaatctagctgtagaactagttttgaatacaagctcgaaagctagtttgacacagatgattcttaaacgttaccaaaactcatcacaattttttttactgttaaaatcccatctcatttgcacctgaagaagattttgggtacccattgtactccaatttcacacccattgaagcacataccgccctgaacttcaacctcaaactgtccataatctcgtgaacgctctcattctcaggttccataattgggtatttctcaatcaactcttccatttgcttaatacctttttgaacccgagaagaaaactgggtcgggtcaacatggatagctgagttccatatatccacgcatcccttgtaaaatcctaactcttcgccaacctcaaacccagttttcagacccacttgtttaccgtcttctttaccagagccaagaccatctttgtaaccctcatcgaagccttctttcaaatgggcttcttctaaatttagagaggaatcaaatatgtcgtccatgaaagatggtttttttttgtgttttttctagccaatagcacaaataaacaaatcaaaaactaattatctatgttgactgttgatgagttcaaaatctgtctacccgttgaatatagaacagcccaattttcatccaataaagaaacccctaataggattgattgaacgatacgaaaatgggaattgaaagcgagaaaagaggaatttggagagaagaaaaggtgggtcacctggaacttggaaagctgggtctgcttgagggcagtaggcggcttgaaatgaggctgcaaagacagtgacgaagctatggctgattccctcctctcgtcttcgtcatcgtttatcttctccatcttaataaagtgatttatatatggccacggctgtagtcccctttccttttaaaaacgagattgtccctttttacaggtgtcaaattcttgatctttgtggtgttaattgttatgatttattccaattatttattattttttttttgaaactaaattgagaaactccattaaaatgcatcaagccaaaaaatcagcatacaaacgataagcaaatttaaacaagggcaagtccggctaccacaccgagcctcatctaaatctaacgctcgttttgctaaagaatgagcaatatagttcttagaccgattacaatgcgatagggatatgctactgaaagaattcctaatatgatgaatatcattaagaacaataccaaattcattaggacaaggacctcttctattcacagccaaaactacccgctgacaatccgagaaagcagtaatcaccgtataccccatttgtacgcagcaagaaagcccatgaagcgaggctttggcttcagcaacgttaggttccaacaatcttgcgtatggagctgcactcgagaataggacatgccccatacgattgaaaccaaagcccccatccctattttttggttctcaacacaaaccccagcatccacaaaaagattaaactcaccaagaaccatatcggtatccgatgaggtcgatcg

SEQ ID NO: 15687 - DNA, 5823 bp, Cannabis sativa
ggctgccgaagccaagcgacgccgacttccaaccggctcgttcggccgcgtgctcgaccctcgaagcaagcgcgtgcagagatggaaccgcgcggtcctcttggcccgagggatggctcttgcagtggacccactctttttctactcgctctctatcgggcgtggtggcacgccctgtctgtacatggacggcggtttggctgcggtggttaccgtgctacgcacgtgcttagacgctgttcatctctgccatctctggcttcaattccggttggcttacgtgtcgagggactcgctcgtgattgggtgtggaaaactcgtgtgggatccacgtgccatcgcttcacactacgtaagatctcttaaggggttctggttcgacgccttcgttattctccctgttcctcaggtacaatatcaaaagaataattcctttagtctctgttttcgtttcaattatgaaaaccacaattacgatattaccccaactaactgccataattataataataatctttctccaattcaatgattaataccacagagtaactgccactcattcttatatcccatattattttatattatcgtcattctattattgctatatacatgtcacttcacttcttctcttctctctctattttgcatgtgtttgtacttgcggtaattaaaatgatataaatgaattaatacatgtaactttctttactatatgctaatagtggtaagttgtccaacgatgggaaaggacattaactctggcgttttttcaagaagtaataaagtgacatggaaatgagtcatggtagctatagctatagttactttaattttcgagttgcacaaaaagttttgcctaccttaccctttataaatgacaattggcttttaattatattctgcaattaagagtttgaatgttacatatatgagttgctcacatgttttgtttttcttcgttacttattcaagtttggtaccaaaagactttttgagtataataattagatgaacttattaactataaggccaaacgatggtcagcccagctgtagtagttaagacattactttccgaaaattgataaaagacatacttttcttagtatcatattactattcgtataatttaaaaaaaattacttaatatcactaactaatcgtgggacgctacttattaaagatgctgggaaccacttattcccaataacaacgctctttttaaaaataaaattagcatgttgtttgtcaaaatttcatctcgcaattaattaatgatacatattgtctttaatgttactcaatttcaggccgtgttttggttaatactaccaaaattgataagggaagagaagattaaactcataatgacaatacttttgctgatattcttgttccaattcctgcctaaagtctatcacagcatatgtttaatgagaagaatgcaaaaggtcacgggatacatatttggcacaatttggtggggttttggtctcaacctcattgcttatttcatagcctctcacgtaagctagctaccttattattcataaaactcataaaaaatttcaagccttacaataacatgaactagtacttgtgttataacaacaggttgctggagggtgttggtatgtccttgcaatacaacgtgtggcttcatgtcttcgccaacattgtgacagaaatgtcaactgtaacctatcattgtcttgtagagaagaaatatgttaccaatttttgctgcctgccggcacagtaggcaatccttgcgtcggtaactcgacgacgattattagaaagccgctttgtttggatgttaatgggacattcaactatgggatttatcagtgggcacttccagttatatctagtaattctgttgctgttaagattctctatcccatcttttggggattaatgacactcaggtaatctttggggacttattaattctgttatgtttcaaaatgtaatgaagtgtaataatggtgtctatgtatcattgatcagtacctttgggaatgatcttgagcccacaagtaattggctggaagtgattttcagcatttgcattgttctatctggattgctccttttcacattactaataggaaacatccaggtaaatggttattagtaaccattttaatttcaaactttttaataaccttttgggatgaaaaatacgagagactgactaacttggaattttgtatgcgaaaataaaaaaggtgtttttgcatgctgtgatggcaaagaagagaaaaatgcaaataagatgtcgagacatggaatggtggatgaaaagaagacagttgccatctcgtcttagacaaagagtacggcgtttcgaacgacagagatggacagccttgggaggagaagatgatatggaattgattaaagatttaccagaaggtcttaggagggatatcaaacgttatttatgccttgatctcattaaaaaggtacgtaatagtaataataatatcttactcaacaaaataatcataatactacactctttaattcttaattaacaagtatatcctctgtttttccttttctaggttcctctgtttaataacttggatgatcttattcttgacaacatatgtgatcgagttagacctctggtgttcacaaaagatgaaaaggttagagaaacataagtatttattttattttttaataataattttgatgcatgcacttaacactatttattaggtttttttttttttttcatcagataacaaatcatactctctgaacttataaagttgttaaaaattataaactattgaaatggttgaatttaagtattttttttctaattttaataaaaaaaaagtctaacatgataaacatttaaggggtttgatttgttacgtacattttaaaattcaaaaaatatgatttgttaaatatcaaaatataaagagtatgatttattacatgcacaatcacaaaattagttagtaaaactgaacgaaattagataaatatccttaaatctaataatctcaatagtttatgaaaaaatttagagacataatttaatacatgtcaaaattgaaggatcaaaaattctaattaggctttagttaatgggtattttattttttaccctttttttacacacataaattctaagaccatattgtgcatatttttaatttataaagaggtttagagccctggtttaagaataatagttgatctctataccaatatgaatgtgaaatttcaatattaaattgcattatagtttgagaatattaattttgagtggacaaagctaaacaaaagtttgcttttgtttttgggagtaaaaaaacagataataagagaaggagaccctgtgccaagaatgatattccttgtgaggggacgcataaaacgcacacaaaacctaagcaaaggattagtagcgaccagcgtgatcgaggcaggggggttccttggggacgagcttctgtcgtggtgtctccgaaggcctttcgtggagcgcctaccggcctcgtcggccacattcacatgcgtcgaatcgacagaggctttcggccttaactcggaagacctgaagtacatcacagatcactttcgctacaaattcgccaacgaaagacttaaacgaacggctagatactactcttcgaattggcgaacatgggctgctgtgaatatacagctcgcatggtgtcgttacaggttgaggacaagaggtcctgtgattcctgatatctcccatgaagctgaaagtactgagcgtcgactcatgcagtacgctgccatgttcatgtcacttaaaccccacgatcatttagaataaaaagaacaaaacaatttttttttttgaaattttcttagttagagtactcaaaatcatgctttgttcaataaagtttttggtaatctagctatttcttgttcaccatgaattattggtgttcgatcatgtaaaaaaagaacaataaatggtgtggagggggaatcaatgttattaacatttggaatttatattgattttattaaacattgagttgatcggatagttttttactgtattaatctatattcttagtaatcaatagttaataggcttagtatctatgtttaaggtctaagtaagtttttttagttgactgaagcttttgatgagcacgcccactccaattagagttatgcagctaaatacccttcctaactctataaatacatcaatcacaattgtatataattttgtaacttgggattgtaaatttatataacaatattgtcactttttcatcacctaatactattactagtgttgtctttaacattttgtgatgagacattacatatggttttgagtgaagataacatagtgtctttttgtgttctatttaattgccctttatttgattagtaaacgacaatgaatgggtagtgggttggttcttaaaatcttgtcgttttccaaataaaatgacagccgatgctgctgctgggaatgtcctgcttgcctccttcttaagtatacatccatctttttcttttctttttggtattttcttttgtttacttttattttttttgaaaaggacttttgtttagttctcaattatttgaaaagttgccattatcatcgattttgtctggatcgtatactaataaatgtaatttgaatttatttaacttgaaaaatagagaaagtaatcgtgaaaatctcttatgaattgacgagtttgtttcaaaagaataacactagcaagttgatatttaaaaaaaataataataataagttgggtttttttatatatatataaattaactaaaaatagttgcatattaaattttttttaaaatctacctactttaataagtatactttcaaatatacccttattgctatttacagattgattgagttcttttatctcaaatctcaaacaaataaaataaaataaaataaaacattgattctgccatatatggcatatagtgtaatttattttcctttaaaaagaacgacttaaaaatggttaaaacttaagtaaaactagctaatgagtaatggttgaatatatatataaagaaagaccttttttttaaaaaaaaaaatagcaaacataattcaaggggtaagcttatttatccaaacatagcatttatccttgttcaaaaaaaaaaacatagcatttatccaataaaatatgtttatttattcatctaattaaaaatctatattagtgagataatattggaaaaattaaaatttgaaggggtacttttaaaaatgtgtaaaacttaaaaaaaaaaaaaaatagaatataaagtctgtttacaaatacaaatattttctaaaaaaaaattacaatactaaggattttttactcaaaaaatataaattttattctagtttgttgtatgtttgaaatacttattgaggagtgctaattacaacctcttattacaaccttttagtcaaccattacgtccgaaatcacatgccgaaattttttcatagcggtatttgttatagttacattatcatccctgtaaatttttgaaaacttttgaatagtttacaatactgaaaacagaatttttgatattccaatttaccacgcgcgttcaaaaaacttcaaatgtatttttgatactgtaaactattcgaaaattttcaaaaattacatggatgatgttgtaagcataacgaatattgatcccagtgaaaaaaaaaattaaaaaaatattccaacatatgttttcaggtgtagaggtgttaggttataattaacctatatttcgggtctttaaagttagcatt

SEQ ID NO: 15688 - DNA, 4871 bp, Cannabis sativa
ttgaaatgtcattccaatactttaaaatacaaccaaacaaaagaatggaatgaaaattgtttcctttccattccatttcattatctccaacacgcctcatcatttaataattttgccatcactaaacttgtgctgaaataatctaaagcaaacaatgggacaacttgagagtgttcaagcaaaactatatgtgcaaaatggcaaacgtagtagtaatatgactttagcttaaggtaagagactcactgaagaggaggacaataggagatgatatcacatcaaccaatacacagtgggatacttgctgaatttaatatcaaatttccatttgtaattttgagaaggatatttttaaatcaaatcattgttcccatcccacccatgtggcagaagaaaagggaaactctttatttagtgtacagtttacagccgctcttacacaaatgggagggaaaatcggtgtcttgaatcattttttcaagcaaaaataaataataatttaaatataggattagctcatggcgtccacaaaagaaaatgaatgctacaaaacaaaaagaagctgaagaactcactagtcgctacaacggcaaccaacaaacttgcaccatctcctggatttgtcgacttatatctccatcaagtatttgaatgcagggaacctggaagttggaacaatttggtaaacctttaaaaatgaataaacaaaattttcaactcaaactgcaatttagatttatcattatgaacaatagtatcaggtagttacttttaattaagcatgaaaacatacctattctgcaaatctctctccttatattcatatccatccttttacacctttgccacagttgctgaggggcacggacctaatgtattccacaaaatgtaatctccagaagtaacctgttggttgagagtacagtgatgaatgtgagagagtactctaaatatactctcctataaaacttgatagaggaacttgacaagtttatttgcatgtgttagggtggcaatagaaaattttctctgtgatgaagggaagaaatggacaagaaaacttgaattaagctctctctctctctctcaaacagaacaagtctgaggtttgagttctacattgaaattgctagaattttttcctcctcaaatattgtgagttaaacagggagcctagtttaggggaaaaaacatatactaaactttaatttatgttttagttttacgttactaatactaaacttctatctatacatcacaattacaatactgtcattatgagaagaaaagatcatttgcaaaacatttttatatatatatatatatatgaaaacaaaatagcaattttttagcataatacaaatggaatatattccaaaaacaataggtgcaaaattaagcattaacgcacttgtttgcatcattgctctacaatgtgcaggagtctggcaaattaaggtttaaaaaataaatataaaagaaaagaagacctacctgagttgatagctccacaggtgctttaacagctggataaatacttacctgcatatggcacaaactgttatgtagagccaaaatcaacaaactattatacggtcttaatctggcagagagacaagcttcactcggaacattcagtcacagcttcaataaagaggaagcttaaaggagaggaaacttgtgggttaacttacagatttcgtatcaattgatattccagacaatggtgcgccgacaattttgaatgatatctacagttcaaagttaagcaaacattgtgattaattcaactaagttgactaactcctcattccagaagcaaaaaaaagtacaaaatcattaacaatgtccacatggtctgccaatttggtgttctatcaatacctttctccagatccatcttaacaatatacaaaaatatcttataagagatacagagaataacatgagcacataaattagctaatcaataaaagattaaggcagtgcttgataagcattcgtcacattcctaatgctaactagcacaaactaatcatagataagttaattgcaacatttgggacagtatatttatatgccaattgtcttaactggtaagaattcaagggatgtgtggaagtgttggaggggttccaatcctagatgggcacatgtgtgtgtgtgttaccatattaataaaataaacggtttcttatattagaaggtaatgggataatatatgaaacaccttgtagttaattccaaagacatcaacagacaatgacttatgttacgccttatgccttatgatgcaaatgatattgatacaagatcccctacataatgttttaataccttggcacagttatacgcctgccaagaaaatggctcttccaaatcaactgaaggaagatccttgttcattttttccatcaagcattcatcaatgtttaccatattattggaaccatctgtctcagcatcactatcttcatcagccattagtccagaggctgagctagacataggccacctttgaatttgcaatggggcaaattgcactgttccagggaaggttgcctctatacttctcccactgaggccccgcccagttgttataattttccattccactgaatgctcggtgtttgaaactattccaatagaaggagtgccatcaaaggatataattctcctcctagggaaaggcattgtcacattacagaactccattgtaagaggagacttataaccttccatcaacctcaacttgaataaaaatgcacctttgtcttcagaaaccattgacaattggtaaaatccctggacaggaggtccaatgccacactttgattgataacgcattatgacaaaattacccaatggtggagaaaacatgacagcatgcttatccataccctgttctggaatctgggcacaaggatgaaaggataaaacttcaatgtgatttgtgttcatccctgtcaaggggaatgacagatcaggcaagccttctaactctgctcggcaatttatttgaccagaaatggatatactatctggaatttcatctcgatcatacatggcagcatgtacaacctcatgaattgtgaataatactctctgctttcctttgtaaagatatggcttccatgctggttgttttaggtctgaaggaggcaaatctaacgtagaaaatccattaaccttcattgagaaaatattggaatgactcaaatccaatggggtacctacatgtgtgaagggtgtgagacactaaccacaaacagtttaagcaagataatccctgaaagctacatcagtaaacacaataaaaaacatgtattgagaactaccgtaataaaaggtaccaaccaaagggcattgagcttgttatgaaagttcgaagagcatctttgtctaaaggccttgtaccaatcctaggagtatctgaggctactgctccagttacagcagtaatagatgggtttgacgatgaaactgtagcagctacaggttttgcccttgaggagattccagatattcctatacttccagttagcgagtccaacagtcccccgacagatggagatgtgtttacaatcacctcaggttctactacctcgccagtgattgtatcaccaatagcatgcgccaccatgaacgccctacaaaatgtggaaaaggaaattacttaacatcttcggctatgcaaactatttcacccagtaaaattatattttaccagtactcaaggttagactctcttcattcataatgctatatttgtcaaacaaagctgttaacttaccataccctgtgatggatggaagatcaagcaacaaggaagatagactgttatccactccgacagcaattccacaatcagatctcttgcataacaccgcatatgccttcagatgcctgggttcaactaaaggtaacacaaggacagagtattggccctttgtatgcaagattaaaggccatagaagattgttatccccatcctcttctttgtttatatagagaccaattatgtgccttgtgattggatcatcaacccaggaatctgaccctttagccgaatgactcatacggatgccaagcccacgaatagacccttctctagaaccattaggagaaaaatcaaaaatcagatttaaagagaaaaataacagcaagcaaatatattttcatactgattccaaataataaaattgaaaaccgctgggaatgctgaaatttttgggggccaaccgatataatggcaggcattatgacaggaaaaagaaaataatcaaaaaaatcaatctcaccttctctttctctcaacgaaagcagcaacaagctcagaatcagttgggagtgaaggaaatacggcatagttaagagtatcactatcaggtatagcgcaagtgaggttctcactcctgcaagccgctcgccaccgtttctccaccaccggaaacctcctaaattcattcaacatagcacaaagacaaggattcaagctctaactaaataaaattcgattttgacttttgaaactataaattgaataaggagaaattttgggaacacgatcgagtgaggtcgaagtcgcagtgttggaattagaggaaacaatggaaaattgatgatgaaaaatatacctagagaagacgacggtgtcgaggctactgaggatccatacggctctgatgctgcaaccacccgccatggctttcctattcctcactagaattgcactctgccaagaaccttttgtcgaaaagaagaaaaagagaggcgaccaatttaatatttggagaccaaacgacaccgtctaattgttcaaatgtcaattattgaattattggataaattttttttaggctaattagcaa

SEQ ID NO: 15689 - DNA, 9635 bp, Cannabis sativa
  modified_base (263)..(268): a, c, t, g, unknown or other
ggtaataacataaatattatatatggaaaatttctctattgttattaatgggtattagttcttaattaaatttaacttataaatattagttggtttttttttccaattttatatttcaaaacagtttttttttatatattttgatggaaatacacgtagcaacccacatagcaactaataaagtaacttaaatcacaaccaaaatccacataacaacctactggagtaaaaactgaagcaactcaaaacataaattaaaaaannnnnnaaaaagttaaaaatagtatataggtaattcaccatattaattttaaaaatattaaaccattagattttatttcaatggcgaataaaagagaaatttaaatttttatgtttaatttaactacttaattatttttacactatattaaaaatatatttatatacaaagtacttaagtcaaatttttcttttttttttgttgaatttttttttcttaattttattttaacctatggacaacttcaatcataagagatttattgaattagataaaaaaattaagcataaaaatttaaatttttttaatactatacctaatacccattatatatataatatacatatttttgtttatgaaataatatttaattgacacaattggttattttacaaattttatacttagtttgggaaatttctcaaagtgtgtctgtgtttgctttgttttttttattgtacaggaaaaggttatatttgaaggaggcttaaaatgcatagagaacaatgcaatgtaataagaagatttagatctcaagtcagagatgggtcatgtggttatagtcatgattagcatttactacaatttttaagtcttttctactcctaattttaatgtcattattagaatgatataattacccaaaaaattatgttaaggtctttggctgattttttctttttttttttttccttttttcgtctctcattttgagaagatggtgagcaagaaaagagtgttttggaagtagttttggctttgtacaaatatgtttttttatagtgttgaagaacttgtatgagttggggtggtactatatattattcatcatgttaatgtatctagctaatttagctctttcctatttcaatattgatattggatatggcttcttctttttcactcatgagctactgaatttcaggcaattttattattgtttataaattataaattaatttataatttttttttaaatagagaaaccactttattagggactagtcaaaatagtcaagaagacttacacatagtcagataaatttgaccaccaaaatttggcaacatctaaagaaagagctaaattagcaaatttatgaacaatgtcattatcagcagtacgattacaaaacacaaacttaaaatatactaattttaagatttttttccatataattaatttaaaatgaaatagctattttatgaagaaaaacaaaaagtgacactacattatatttccacttagaattactttaaagtccaaataatgattaaatgtcttatttatttatttagttttaatgaaatgacttatattttaattattttgatcaaacaaacaatcaatgcaattactacacacctaataattacacaataatgtcctaacacaccctttatgattagaaataaaaattaaaaaataaaaaattatttaaatccaatcccactagaagtctaaaattgattttcattatcttggagcatgaagcacttgagtaatattaagtacccgtggtgcctaacaccttcttatgtgttattatatcaaataataacttttaaggagtatcgccagtcaacatatcacttaaagtgctaaatactattaatacccaataacaatactctttaatagcaatgtaaaaactagaagaacatcaaacttgagaaattaccatattacaacactgttatttttcttttcttctaaaagaagcacttctcattaaaccaatgaacaaatcaaaagctatttacaatgactaaaaagaaatttacaatttaaattgaaggcttcgaatcaaaagaatggttgtgagaaaaggtaacaaatatacaaataatgcccaatctgatacctatacctaaaaggctcgtcaactgtcagtgtaataataatacaataagaattttgataagcaccctctaactaatatctacaattatgtacaaagttaccgttttgcctccatggaaaaagaatcactcgaaagctcagccatgatccagctaatgcgcttctgaaacaagccataagacctaaaatcatgaataatacaaactattgtagtagattatgagctactaacagttatactcacaggatacaattgatttaacgtgtcgaccgattgactgacgggtagagctcagtaagatctgcccatggttgggattgggaataacagtatttcttttgaggaacacccatgttccctgcctacataagattataacataaaagagtaaataaattgcttgcagtgaccaaaacatagttaccatggcaagtgtcttacaactataccatcaattcagttttgttcccatggttgattcggtcctagatatttctcaatggactcttttttacgctcgggatcaaggctgcgcacataaaacagcattgttactttttgttagagaattcgaaatattttaacactaacaaacctttatacgaaagggaaagagattcacaacgaacctatttctaaagccaagaaaagtataatgtacagcgcctgcacatgcagatgctggtgcaatagcagctgcaggaactgctcgaacagcagctgccaaagcagagcctgcgccagctccccgcagatactttttaaaaggggtcccaactaaggcagaagcagatttttccaagccattgcttaggctctcgtaagcctgtaatatgtaacatgtaattcagataagggaaaagaaattagtaaataacagacacatttcttctcagcagatggctcttattgaaacagtgaatagtcaaggtttgttagggaaaaatggatatctctccatgatgaaacacagttccagaaatatcagctctatcttgaaatacacaaatgtttgttacacaatactgagagcactgacaaaaaattgacataacttggtatggcaatcaagatatgcagaatactcacctgttgaattccttgttgggcatctttgggctgattagatctaacattttccttcattttacttgataccgcccttggtatgctaggatcactgtttgtaagcctatattctgcttggagcaaaatgtcatgagccccggctgctaaatggactccaagtccaacagcttcaactgatatacttctaatgaatgctgttatacctggaaaataactagatttagtacttgaccggaagatccataaaataattatttataacgtgaacaagccctaaaacaatgctgaacgaccaatatagataactccagtcgtgtaagcagttgtgggaggtttagtgcgtataaatggttctgtttctggctcaagtcctgtcaatgtaccttctttttttactatttctttttaaataataataataaagcagaggacccataacacaacgaatcaataggaaactaaacaacgcaaaatggacaatgttgttgatcagttcaaatatacacttattgtaactgtctgtcaaaatgtaagcttaacaacacagagtagacaatgttggtcaagtaaatttacctctttgtattcctttaattactctcttatccttcctatagctctcaactggcaaagagaccagctttgcggcaccagcaccaagagcaaccaccgaacggatgggaggaagaccacgaaatactttatgaatctgcaatcaatacaacaataaataagtaagaaccaactactatttgcaagactaccaaaattttcaagagaagtggtgaacatgccacttacttgattttgggatatatcttccaaccactcccctatgattgtttcacatacactgccccagccatagataccaatgccgtgaacatgtttgagctgcagctcaaccccctacatcaatttacaatcattcaataatcgagtgaattccagtataaaaacagtgaagtccattcataatcaatatcatgagaaataggtaaacagaaatatcaatatcctggtcgtcagacactaactctgtactaagcctttatacttatagaacttgtcaggacatgagtcttggtctatataaatatatgtacacatttataaagtatataaagaaatcgaacatgtcagtggagaaccttacaatatcaacacaactaagcagagctcaaaactctaatccctacagtggtaactacagcctgaatcataacgtgtgactaaaattcttactagtcagaacaatatactggctatttaaaccatatgatacgaaactttattgacaacgtaatcattaaaaaaaacatattcatcacaagcaatgctgaaaaaaaaatggcatcaaaaagagcagggaacaaaaacataaaggaagatgagaacaagaatatgtctagttggtaaacaacttcaatataaagcaatttgtagctctttactttaatgagggacaaaatgaactgttcgtggccttacatcttgaaatttaaagttttgcttttttctttttctgaataagcaaacttggcaaataagaaacaaaaatgtgcaccttaacaaacaaacaaatagtttaccttccagggcacaagattaacaagttccgcataattcccaccactcaacgcagctaaatcaacacggcaaggactatagtcaacacgaacaagaagaggccatatatcaaagctctggaaagaacagaacaacatgaaaaatagaagtttatcattgttaggcaaaataatgaatagaatacagaatggaagaggatgtcataaataaataaacttgcctggaagtatggaagaaatgcctcctcagcaatattatgctgtgcaagattgttgcttgtcaacgattttgaactatctgaatcttgacgacaacttggagattggtcaactgatgagctttttgccccaaagaaactgataaagaaatcaagttgggactgatgaagatgcaatagcatcggaagaaatgctatgcgtaatctggaaggaatataacatacaagttagggactgattaacatcgttccaacaaaatgtatcctctacgtgaaataacaagaaaatgcaccatcaattggttcataaatcatattactcttcttaccataatttcacagagcaatccaacatgagatattaaattttcaacaaaaaaaaaaatagaactgctagttgaagagaatcattctttacaataaaaaagctgaacagatatgacgtaaaattcaacttaataaacagtctttaccggtactcttcaagaggtattagaggatctggcctgacagcttccaagtccagcttaaatgcttttgaagatgattttcgaggatgatcctttgattgataatatcctaacaccttgtaatgcaaaaggaaaaaatattctaaatcttcttgtaaaagaaataaaaaaaggtaagatgattatacaaaagaaaactactttaccagcttccaaggagcgtctctactcaagtcatataggtgaatttcttgaactgaaagagagagcttagaaacgtgtattccaccaactggaaaaatctcatactgaaattccatccctgaaagtgaaagctccaggcatacagttgtattcctgcccccattatttgtagacttctgatcaatccctttgcaatctttccagtcgcaaccagcaaccattctccacctaacatcaatgttcttaagaagtacacatccaatagcctttctgaaaccttgggcttctgtattgtcagtatagggacacttagttccctcaaatttttgaatgctgcactcacttctcaactctgaaatgtggtcttctacaatttttaagggggctttttcataccatccgctacttcctgttccagaatctacaccataagcgccactagaactccctttatgaatcttctgcgaaggtccaccaacagataattccgtaactggctgcacttcagacgaacaatagagttcgatgaactccggaaagtcactttcaagtgaggaagaggtttgactactctcaaatcccacaacaggcactgactcatcaaaatgcaaaccatgagacaaaaattcaggaccatcaatacaggtgcccagttctccaataaggttctcatccactgaaacatatatttttgattcagaagaatcatactgggaaatttgattgtcatctatttgaaatgcatcatcacatatctcattcattaacccaaccaaaccaggttcactttttacagcctgacttgaagaattcatttcagaagtcaatggtaaagaatcccgtgtacagaatccagcagcacgcgtcaaatcttccccatcttgttcttgctgaactctattccacctattctgcaagtgcacgactgactcctccatgtctggggcaaatagtttttgaagttgagcagccaaactaattaaactggaagtagtgtcattgcaagtttccatgaaaacatgagatttagaacattctacctcccaaagaaggccactcttacagttagttcgcagaattgcttcaaaaagtgcctcccgagctactttaacatagccagtcttctgaagccattctgcattgtaattgccactaacattctcaggctccaatactacatgaataagtagtccaatatcatgaacactaattttaaattccttttcaatcgaatcagccaaagtcaaatttgaaatgttcaaggatgatgcagccaacaagcaagcaacattttctgcacttatctcttgttttgcatttgaagaacgagaatctggatccaaaactttacttttgacaaccaaattcattacatatggctcataacttaatccgatgtcaacaaagctaagaataaaagaggatccactagacacatccagttttcccttttgcatacaatcattagctgggttttcattgttggcagatggaacactgaaaaatgaggaaattgcatccaaccaatctaaacgaccccctactgcaataagtgtggcacacctgagagatatagatgtaaaatcatgaaaactttcaggatcccataggtgtataatatcagaaccagccaacctagatgacaatgcatttgagcctccaccatcaccacgtttcattgttgagttattacataaaatcaaaagaaactcttgattgggaacacctgttatggatccccacaattttccttcagcatgtcctagccagaaaaatttggcacctctaatgcctcctatatttgagacagaaagcaattcaaacttccgaatttttaatttcaaatgatgccatgatccaggaagttcactctgaattgagcctctaatattctcctttacttctgggctaatcaaaatttctaaagcactgcagtcaagaaaaatagatgtctgagagaccgaagatacatccttaacactgaattcatcagaagccaggcccaacccatttacaatctgatccacaagaccaactaaggcttcatattgaaatcttcccaactttattgtaacagcagaaagatgaacgtgcaggaaaaatgtagaactcaatatcatctcctctcgagtttgaacatttaaatcttccagatctttcgcagtagaaaaagaagcaaattcattattttctcgaacagaattataacttctctttgagtcctcaaaagtggccatgactttggccttctttgctatccaaggtccagttacattactatcctgcaaaatcatactaattgtagaaaaacaacctggtctgttggcaacagacaaaatgttctgtccaaaaaatttctgctggtgtatgctaccagggctattcacactagcaccatccttacttacaggagtgaccaggaaaatgtcaagactgctgattttcaaatgtatagaatgagtggcagttgaagaatagcttttctgtttagctgcatctgaagttggaccactttctcgaactaatccaccaccgccgcttgatggtagatgaaaatcaagagcaacaaattgatcccaggaagcaaaacttctaacatctttatcactcttgaaaggaaaacacaggatcacccttgcactagtcatcaatatattaccagccaaactttgggttgaggacaaagtcttaacacatgagctactacctcttttaacttctccaagagtcaatccatcattcctatgaaaagctttcgaagaaaattcatctcctttctcaacagattctaaaatttccgtcaccagttctgataacatatttatcaaggagaagtccacccagaaaacaaacggagccaactccacttcaaaggatgctactggtctttctcgatttccatcttgtgaacttaatttcgtagtaaattgacaatgagtgacacctgcagttgtaagcaatggaattttgaccacattgtgttcctttccaaatggaaaatttttagccgtagaactggttagctcatgtgagtcctcagccaatggggcaagcagtggaagagcaccttgaacatttgcttgcaactgctgaatataaagattttggctgctaatattttcaatgggacctttcgttcctatttctaagttgtcacctttatgactcaagtaattagcaatctctattgacttcatgaatccttcatatcttatttcttgaggagatacctgttcaccttatcaaatattttaagttagtgtagtgggatatcaggcagaacaaataagttattagatgatgtcaaaagtaaatgagaggtaacaataacttccctgtcaatcattacctgcatactgagaaggatgtctctgcactctgcacccaagtaaggaatatatgaaccagaatttatttgataacccttgaacataaatttcttgtcctcatcttggaaggacaagaaaactgaaactccagcaaaatttgccttgacattggtttcaatatgctgttgttctgtatataaaaaaaataaaaaactgtgtttcagtggaaaaagtttctttcatagaaaaacaactcaatggtttcagcatacaagattccagtgcatgtaataaagcatcagtagatcattttttaaagagaaaaactctcaaagttacctacattctaggtcaaacctaacaaaattatatcggcaaaacaaagttagacacgtgaaagatgattacaatttaattacctccctattcagcagggtcggcagttgtttactttatattgtgattttctttttcttttttttttttccttctgtcttttcatagggaaaagtagttgaaatttcaatgtaaaacatccagcatttaagaatgaagcaaaaaaaattaattactcaattgtaagattctaaacagtcctaagattttttccct

SEQ ID NO: 15690 - DNA, 14142 bp, Cannabis sativa
  modified_base (200)..(211): a, c, t, g, unknown or other
taaaaatgaaaaagccccttaattatttcaataatattttataatttgaatttattaaatataaattaatttaataaaataataactaactaatagtattttaatattattaaaaaaatttaacaaaaaaaaatagtattaatttttttttttttatggatactactattttagctaagcctattattattattattatnnnnnnnnnnnntattattagtagtagtagtagtagtagtagtagtagtagtagtaatagtgtttgaacttcaaaatagagattagtgagaagtggataacgttgtgaagcatcacctggtacttttagctgtgagcatgcctctagtgatgtcctagccttactcatactcatttcttactctctaatggcgattgcctcctctgtttctcttcatcacttctctcatttcctcatctccaactctcaggttacattctcttcccgtctatataattttatatacaaacatgtacatacttgttggacttctctttatttatttactttctctgtatatctgtggctgaagcagttaaagggcttcggccatggatgttcagcaagacccaggtactatttcagcgataacccaaacaatggggtgcgacccatcaaagcaaccacccagagtgctccatatcccttataccagcctgctcaagttgatgattcttcatctgaggtaaaaagagaattaacaaacgaaagggagaacatttggtttaaggtctatctagacccttagggagatttctttcagattatgctaatgctatgcttaaaagaaaagctacattctgtatggaattcttaaatttccttgttttgatccttttcccaaattctcgaagttggaaccggcagaccctgatttctacaagattggctacgttcggagcatgagagcttatggtattgactttaaagaagggccaaatggatttggagtctatgcttccaaagatgttgaaccacttcgcagacccagggtaagttggttaattttacacccaaagaaagtctaatatatttaatttttatccctatgccgctaatttgcaatcgagtttattgatttttttctttttttttttttttgatttgggagtttattgattattattagtgtttgattcattgtctattttctgacgataatgggatttttgtgcttgactgcacaggtaataatggaaattccattggaactgatgttaaccataagccataagattccatggatgtttttcccagatattataccagttggtcatccaatatttgatattattaactcaaccgatccagaggtaatagatattccttagtagccttgattgtttagtaagatcttcattcatttatttaaatatttttgtttctcgatgtgtctacttgattcattatctgtaaaatttaaccacattgatttattttgatatgctaatatacaaattgcttgacttattggatattttggtggacctctttgtggcagacagattgggacttaaggttagcatgccttcttttgtatgcattcgatcgggaggataacttttggcagctgtacagcgactttttacctggcacagatgagtgcaccagtcttctcctagcttcagaggtatttaaacgaacaatttatgaaactgctgcaacatttgagattgtgatagttttctgatccctgtaatgggcttgcttaactttatagtaagaaatttcgatgtagtagttagatttcatgatacatgtcctttctttgaatacatatgcggtaaagagacaaacaaacagtttaatttgaagacatacatgcataaacaagcatatttgtgtatgtatatgtcacgtcatcaaatgcataactttacatgttatttatttaagctcgtatttggtgatattaggctcccagtagtataacattaatgtgatgttcttttaggcaaatgtaaggcctagcctttacattttaatttaacattggacattagaaccttgcattttttatgatatttgtggttgttatataacagttctttgaagagaagaaccattatttgctcaactgcttgtaattatagtcatctatgtgtaatatcataatcgactccattttaatcttgacagtttcaaatcatgtacttttcatttggcttggagggtgtttaaagtctaatcctccttttagtacttcatactttacattagttgggctgcacatgctaattgtatatacaaatacaatagtaaagttgttcagtagccttgatatttgtaatccatattgcccttcatttactacaggaggagcttttggagctgcaagatgctgatcttgcatcaactataagagagcagcaacgaagggctttagaattttgggaaaagaattgggtacttaaattaccctctattttctattaatggttacaggagtttgttttttttttctctttctctctctacataatagcactattgaacactgtaatgacatgttattttatgcatgttggacctcaattagcacaacggtgtaccccttaaaattaagcgacttgctagagaacatgagagattcatttgggctgtaagcattgcacaatcaagatgcataaacatgcaaatgaggattggggcactggttcaagatgcaaatatgctaataccatatgccggtaaagttttatcctcatagattttggcaattatattgactgattgtaattcaattatatgacattctactctttattgcatttgtcaccaacaacttcataactttgtaatgaattaattattccataaagtgtttggtgcattaaatgatagaattctgtagcattttgataggttcaatagatactggcacacacacacaaacacccctaaacaaattatctatcaaaaaattacgttttacatctaggaatgacaaagacgactaccagcccaaactcgagggcaatagctctgaaacatatgcctctcaccaacttcgtgacagttctttagtttaccacctttctatcttgataatccaaactactgtcctaattacctattttctcattcatattctactatggatcattgattctagagcttctgatcatatgactttcgtttatccaattttcatacgtattcaccattttctaggtccaataaaattggaatctctaaattagcatgcaatcttttctttgcaagttaactagatttagtcaacctatctactatagctacctaatatagtaatattatgtatagcccaatttaatactgttttgaggacaactatatgcaagcatagctaagtgtaatggtattaatttcaatttttccacggatggagtgaggatcaatctctacattatgggattcttggcaatgctcatagcagcttcaatgtcacaaaatttattaataggactgtcataattagcactgagctctcttagtaacttttgtatccacatcccttctcatgtatcatgtgctagagttcatatgtacttagtgtgacaacaatttgcttcttacttcgccacatcactacttttctccattcaaaagaacaatatcttgaggtagacttgtgacttatacacttagatataggtccaataagcgtatatgaacatttcgattgctttcttagataataacctgaatagccatcctcttccttgatctcattttaaatacctcaagactcgatatatagctttaagatgttcctcatgtggatgtcacagactaactgataatacactaatagctaatatctgggtgagtgtcagcaagattgattaattttttctactagtcactaataactgcctttatctatagtcaaattgtcattcttcattcccattttagagttttgatccattggaatgacagcaagcttacagtcaagcatagcttattgaaattagaattcctttacttgacctagtcattgccatatgtcataggctcacaatttcaggcagcgaaatttccgtgcagcatcttgacttctctaagcgaaggtcagcctttcaaccatccgagtgacaatggactcatttttcgtgcgaccgtgcgcctcgtgcacacttctgtcccttgaacaactcccgtcgagttatgctcgcaagcatccatgagtgcattcatgcatcgaggctccctagccaagatactcgcattgtccataagttcgcactatggtaaagcaaatcccaacatcgtcgctcacctagtcactcatgaccaaggtaacctgtgtggccagatgtcaacaacaagctgacgtgccagcacctctagccatgactcattcgatactgtctgaacagtctccctcatggctcaaggactcccatacatccatggtccaatccttaaggcaccatgcctccacgcatgtcggcaggccctcgagacaagccaccaaaatcgtagcataagtcagacctctttctctttctagcatggtgcatctgtgccacgctcgtatgtaaactagcccacgaatgactaccaacgtcatctcgtgttgagacctgtgaccaaggcacaccacaacatctttcgaaggtgttcacattgtattatatataccatttgtatatactaaaatagatattagaaaataaaaaatatttttcctcatttgcttcaccaagggttatgctcaaacctatggcgtggactattgtgataccttttctcctgttgctaaactctcgactgtgcatttccatggcagttactcatcattagcctttgcataagattgatattaaaatacttttctttatggagattttaaggaagaattgtatatgaagcaacctcctgggtttgttgctcagggggagccgcgaatttgtcgtctttgcaaatctttatgtggattgaaacaaagtcctcgtgcttggtttggtaaatttagttaggctgttgagaaatctggtttgctgaagcaacctcctgggtttgttgctcagggggaggcgcgaatttgtcgtctttgcaaatctttatatggattgaaacaaagtccttgtgcttggtttagtaaatttagttaggctgtagagaaatttggtttgttgaaaagtaagttagatcattttgttttctataaaagatcaactgttggtatcattttgttagttgtgtaagtggatgacatcgttattattggaaatgatactggaggtatctcatccctcaagtttttcattcatacttagtttcacactaagtatttaggggtgctcaactatttcttgggagttgaagttactcggagtaaacaagttattttctatctcaaaagacgtatgtacttgatttgttaactgagacagaaaaattgggagcaaaaccttgtagtacttcaatgattccaactgtgcatcttacacatgatggagaaccatttgaagatcttgagaaataacgcaaattggttggaaagttgaattatctaattgtgactcgtccatatattgcattctctgttagtgttgttagttagtttatgtcttctccaacaattcatcattaggcagcattatagcaaattttgtgttacttgaaaggagcatgaggtattgtttacaaggataatggacacactcagattgagtgtttctttgatgcagattgggcaggctccaagggagatagacgatccaattcaagttagtgtatttgttgggggcaatctgctctcttggaagagtaagaagcaaaatgtctagatccagtgcagaatcaaaatatagagctatgacacaatttgtatgtgagatagttggacttatgagtttttgattgaattcgagtttaaaacttcagttccagcaaaattgtggtgtgataatcaagctactcttcatattgccttaaattctgtgttccatgagtgaactaagcacattgagattgattgtcattttgttcgtgaaaaaattcaacaagacttgatctccacaggatatgtgaagattggagaaaaattaagaaataggttttgaatgaggtgcgagttgattatttttgtaacatactggacatgattaatatttatgctccagcttgagggggagtgttagaatatattaactatattaattgtatttagttagtgtcatatttagtctctctaatttatttagttttttatttattctactctaattttgtatataaatacatactattatattgaacaaaatatacaatttattcactattttctacaatgatatttatcattcatgagtatttgagtgaatttctcaaaccaagcacgtggagactgtttcaggtcataccaagatttcccaagttttcatgtcttgcttacacccaagtttagcattctttgaagacaatctagaacattattccttattgaaattagaattcctttacttgacctagtcgtcgccacgctaggaaagtatctcaagtgctcttcacaaactacgtgtaatcagattggcactgattatatttatcagtcttgattacacccaagcatagcagtcttttgaagacaatctagaacatatttccttattgaaattagaattcctttacttgacctagtcgtcgccatgccaggaaagtatctcaagtgttctaaacaaactatgtgttatcagattggcactaatgatatttatcattcttgagtatttgagtgaatttctcaaaccaagcacatggagactttttaggtcataccaaggtttcccgagttttcatgccttactaacattagatttatttcaaagtcgagaggaatatctatgtatacttcttcaagatctccattcaagaaagcattctcttcatattaagttgaaaataagagccaatctaggttcacgaaaatagataagaagacctgacattgttaattttgcaagtggtgtgtgagtgagtgaatcctttagaactatccgagctttgtattgccccactcttccatgtgctttgtgtataactgaaaaaaatccatgtgcacctactgtgtttcccaggtggaaggttagtaatctcccaagtcacattcctctcttgagcctaaaattcttcataagttgctgccctccacttaggttcttgcattgcttcttcagcagtggctgggatatattatcttggtgagttgagatacaaaagcaaaaccagatactttggtgtgagttttgcataagagatttttttttctttgagtcgacatattctggagtttacaatttccaagtttcaatgatctatgatttttataaaatgtattagttgaagttcagtaatcattactattctttaaccggaacagctatttcccatctcataagtgtttacattttatgttagggcgacttttggcaaacatttaaagatttcctgtttctattaattttttgacttgaatttctttttttttttgttctttaatctctttttgtggattgatactcctattttccctttcgttctctctctctctctctcgtttcctttcattgcataatccctctgtttttatatacatatacttgttttatgttttttatatacatatttgttttatttcagatatgctaaaccattcattccagccaaattgttttttccattggcgttttaaagatcgcatgcttgaggtgatgataaatgctggccaacgaattagaaaaggagacgaggtattcttagcaatttattatatttgaactacggaaactatctagatgcctatacgagatcaactactactatgatgtcaaaatcatgatatttttttattattattagtcttgtggaaacaaaacctgatcatgtactttgtcataagaaaaaaccccagctcgtattaatgaattgcgaaattgcaaggaaaaagaccctacgggaaacgaaacctccataactagaattacataaattgatacaatctctacttgagttagacaacgaagcattttcaaaattcctaacattagaaagccatgttgccagccaatgttagttctgtcccaactgatctgcattatctccaatttcttggaagattcttttattaatttccagtcatatttgccaccaatgtagagactatcctcaatctccataacagtttcttggcttttttataacaaatacagtggtaattaaataggcctctaaaaatgttagggatgcaccactgaatatttaattccttaaggaatctgtaccacaaacaaagagaaaaaaaacaccgtgcaaaaaggtgattgctgtttcccccattcttctagcacatgatacacatctcttccctggagttagcacaaagtagggtctcctttcttgaaaagaggcatggacattgtgtttctgcaaacacagaagccaaataaaagatgtaacacatgaaaatatttatgacaaatccctcaaccaaattccctgtcctccaaagctggtataatttcagattctatgaattaatcaattaattctaagatctctcaataattcaactgtctcactagatgtaggttccaatttcctttctatccctcttcaatgtaaaaagcagtaatacaatcgtttctcctcttcgacaatcttgctaggatagggagtgcctcttcaaaagaaaatcgaccaagccaggtatcttactaaaagcaaatgtttttaccattatcaactttaaagtttaccaactgcagaacttgttataaagagaagcaacacccttccaagtgtccttccaacggattcttgaagacattctcttccccaactttgtatcccaaccattttcttccaacctttatttgctttttataattttatgctgtagagatagattgcttctctttagggaaccgccaatgccaattcaaagctttgttccttttctttgagttgccaatcctgagacttccttgaaaattcgatttacactgtctcccagtttactagatgatttcctccttaaatatctctcccttctcagagaagtttcctcatcagcttttgtagttgctgtttccaatctgtccagtgctgcgtccatcaacttcagcttagactatgtcgaatccaatccaaccacttttgattccattgtcgtagtcactggcagtcaccaagaactttcactctgataccaattgataagacccgaattctccaaactcaaaaatacaataaaacagtggccaaacagtaagaaaatgtattgaatataggagaaaagttaattacaagctgttggagcccttaggctcctttgatgcaaagagtgactactcaatacattgcatacccaccaattctccttagtatcgtatatatgctattgtattccctcccaaatactcctcttaatacaatgacccaaattcccttttatttaatatatgttagcacgccacactaatcctagagcctaacaatttccttatatagatacatcaacacaatcccttaattcatacctcactttcaattttgtgaatatttcagatgactgtcgattacatgagccaacagatgaataacaagttcatgcaaagatatgggttctcttcacctgtggtaaatttgtttgatggtttcaacagttttaattcatgttttatcagcaattagtaaaagaacatcattgtttattaaacaataaacttattatattgtttgtcttttatgaaaattgaaatttgattaagaggctagcttggtacctcttttagtcctcttaagcatcaataaattatctattgtacaacgcaagaggacactaggactatggcatttggcttttttttttctttcttttcttttctatgttttttaatttctttctggaactaacttaaaaagaaatattacagaatccatgggatgtaatcaagttctctggcaatgcacgtattcatttggattccttcctgtctgtgttcaacatatctggtcttcctgaagaatattaccacaacagtatgagttgtttgtttatttttcttttcagacattgttgcaatagaatcatttaattattaacaaaggaatgtagcagctcggctatctaaggttggcgacacatttgttgatggagcggtcatagcagctgcgagaacattgcccacttggtctgatggggatgtgcctcttatcccaagtgtggagaagaaggctgtgaaggaattgctggacgaatgcaaacgaatgcttgctgactttcctactacctttaggcaagaccaaaaacttctaggtaacaaatgcttatctaattcttatcttatgttaataaaaggacaaaaaagaaaaagagagaactcttggctgactcacacactaccggaacagtggtcattcttttttcctgccatttttaacccctcagattttcttaaaagcagcgattcttaagaatctctcatcttgagcattactaatttcttatgtagtattcttggtttgcaaatgctcaatgtcttttgtaagattttttttcttcccactaaattaatcatatgtgatatttgatacctttcacctcaaaatcaggctataattgcaaaaaagctgaagtttcttaaagtgaccaattgcattatttagatcaacagtaaaaggtcttcttggagatatttcaaccttaagcttatatttccctttctatcaatgtactgcttgcagattctatcccagaagctagtaggacacttgaagcagcaatcaagtatgtttaccttttacaaactggattctttagcattgggcttttgaatatgataaaaagttcgagcaagtcttaatatttttgattgatctgtcactgttgcaggtatagattgcatagaaagttgttcatagataaagtcatgcaggcattggatatatatcaagagaaaattttgttctgatatagctttcaacaagaccaaatgatctaagaattgtgatctagtgatagaagattttgtgcggtcgttgattagttttagttggcaagtaaaatgtgatttggtagtagcatgattagagttttgttgttattttttttttattactatttttattttgttagaaaagtaaatttcactctcttaggtcttgttaggagcttagatcttggcgggaagataatactagggaaaatgtgaggaaagaaaaaatgcgggaatggaaaataaatattttcttaagtctggtatggaaagctaaagggagtggaaaagaaatattttctttctgtttggttgtttgataaaatgagagggaaagaaaatgaattctttaaataaaataattttatgtatataatttattttcattttttattatttttttaataagaaacttataatagtgtgtatattatatagctttattttaatactaggaaacaaatgtattttgtttaataataattaaataaataaactatataagactttaaaatttaataattttatataattttcttactaatataattaacaattttataaaactttcatttttgtaaggctaattagcaatttttcctctcgaattttgacatgtactaaattatgccccttgaatttttttggtcgttaaaaattctccttgaactagcatcaaaaagctgacctgtcacaatggaagggcctgcattagggttaactccctttactcgatccaacgttggacctttacttttatgaatctctcttcatattatttcctttgtgatctaatccttgcaccctcaacagtaagggttagctcaaccacctgagcataaaactagaaaactcctagttgtttagccataatatctacattctgaacgatatactcgttccaccttaaagccttcctagcagccttagtagtcgttgcattttaacaaaactttgccaatcggtctagcttagtgtcattctccatcactgtgctgctcgcgattaaccatacaggttctactaccttgtcacttaggtaatctcttacttcatagcatgcatttactctcggtctaatggtagtggaagattcatacccacaccacctaccccgagcttagcaggctcgcaattattcttactagatcgcctcaagtacaccttctagtacactcgcgacgattccttgctcatagttagaatctttctaactagaattaatactaataagcaatactgcacatgcataaatatactcagcaactttatatcaaaacttatcattcttctctaacaacttacacatttcaaataaccagacaattcaaacaatcaataaatattttactaattaactaacaatcaacacttactaagccatgagtcgaacgagtcttcgcagccaatgtacatatcgagccagtcttcaggatctttaaaacttggtgactctgatactatgttgtaacgccttgacactcaagggcgccacgtgtgtgcttttacaatcctattaacactaatctatcgatttaggaaaaagtgtgacttaattaaaacatttggttaaatttaaaataaacctttcattcaaaattctatcataatatggggatcccctgctaataaaattcttttacaattaattacaaaaccgttattacaaaagtaggttacatttctaatcatagaaaatgggtcaatcttgcttcccggaagccaagacaccacgactgatatgtacattactgggagacctcaggctcatggcggaacacaacttctttccttcttacctgtaccacaaagcatccgtgagtcacaatgactcagcaagaaaagttaccagatcatatgcatgctgaataggtattgcatcacgagtatgttcattatgttgggatatgaatacttatatttttcaatgcttatttgattagcatcaatactaacccataaacttctcattataagaaaatcatagtaactcacaatcaacaattttatcctttcatcaaacagatattcattcaacatgtagccacataatctcaatgctttgtaaagtattctaattatacattaccataaacatatagttttagtactttataaagcactctaattacatattctcagagcttcataaagctcccctaccactcgttatccacaagctgtgtatgtcactatcattgcccgataaagcgaacgataagtaagaaacctatccgcggtttcaatgagtaattactcataacagtaatgaccgttaccaatcctcaccactcgttatccacgagctgcgtatgtcactatcgttgcccggtaacgcaaacgataagtaaaaaacctatccgcggtttcaagagtaagtaatcataacgataatgaccgtatcttaattctttcacaacaacggtgataacagtgttcttccctcattcataaacaattcacaaacaaaaataatcgtttctcatcattacctcgattaccatcgagtcacaacaaatacatattatcaatctcgatcaaggtcgagtcacaacaaatacatatcggggtcttgatcataatcgagaccataacaatcatatcattaatcataaacagtggttaatacttttcttacctcaattcaaaactcaagcgtgcgagccaacctgagtggaaatcaagataggcaatcccggtcctatgtcacgacaatcgaaacataataaataccttaatccagaattccgaaacaaaaccttaatgctaaaccaaacataacctaactcccaacaactccaaaataggtcaaacaactcataagcaacttaaaacaggtaccacgcaacaccccgagccaaaactgaaccagaagaaaacccgagaattctccctgcagggcaaccagtcgacaggttctggtgcaccagaaccaaccggtcgaccggttccggcaaccggtcgaccggttccggcagaccagaaaaacttaggttttcttcccccaaattcgagccaaacttcctccaaacatgtccaacagctccagaacagtatatatagcataaatcaaagtattcaaccccatccactaacaacaattcaaccatcgagttaaaattacatattcaagtg

SEQ ID NO: 15691 - DNA, 4170 bp, Cannabis sativa
attgcagtagctgtgaacttcattgtcacctcagttgttgcagattctttccttcctctgctttgtcaaattaaatttggaatctttcttttctatgctggttggatccttcttatgaccatctttgtttatatgttcctgcccgagactaaaggtgtgtctattgataatatggcttcagtttggagaaaccattggttttggaagaagattgtgcctgcacagcatgaaatatcatgaattttataaaattatcattctgtagatatggaaaatgtcaaattatgtatcaaatttcatacatagtatgatattgacatttatttatttattattttcattgtattattgttaaggtttatgaaaaagaagaaaaaaaattcaaaaagcacagaatgcttggcggcaacgccattaagattatgtttgatctctcagaactcaccagaatagttttcagaataactccaagggcaatgccaacatgttttggtctatccaattcaaccacagtatctcaattgatgtgctaaatctgtacttgtatgtgtaaatctcacttaccgattcagtgagttatttatttgatgttaaaccattgacttcgatggagctataaccaaatggcttctgcacattgttcgtgttcatcaattgcctcattttttcaacatcatcccatctatcaatacctgcataagtacttgatgaaagaacataattcccactactgcaaggatccacttcaagaagcttctttgtgacaacctctgatagggccacatttccataaagcttgcaagcatttaacaaaattctccaaacgactacatctggaaccacaggcattttgattataaagtcgtacgccttttcaagatagccagaacggctcaagagatccacaacacacccgtagtgtttcatttctggtttaagtccataaaccttttccatagattgaaaatatttcaaccctttatctatcaatcctgtatgagcacaagctagtaaaatcccaacaaaggttccatgagtcggttgtcttccctcttttaacaattgcgagaagatttcaagtgccgattttgcaaaaccattcacagcaagacctgaaataactgaagtccatgacactgagtctttcattttcatctcctgaaacactcttaatgccttctcagccactccacatttgcaatacatatcgattaaagcattcccaacccaaatatcagctctcacaccatgagtaaatatgtactcatggatggcttctccaacatcgagacaccccagatgggcacaagctgaaatcacactagctattgttatttcatctggtttcaccttagctgccatcatctcctgaaaaagtgtcactgcttcattatgtctgtaagcttgagagtaaccagttatcatagcagtccacgacaccacatccctttggggcatctcattgaaaagttcccttgcaacaactaaattccctacctttaaatatcccatgatcaaagcgttccatgaaactatatttcgttcacgcatttcatcaaacacttcccgcgccaacaataccaagccacgtcgcccgtacatatcgattatggtgtttcccaagtacgcatccatatcaacacgattctcctttatatatttgactaaagagtctgcgacatcatattggcccaagtaactacaagctaaaataactttcatcattgtcactgaatcaggcctcacatctgccgcttgcattgattcaaaaagccccaaaacgtcctcaaatcgattccatttcgtatagccacaaatcaacgagttccaagagaccaaatctctatcagtcattccctcgaacattttctgtgcaaaacccaattcgccacaggaagagtacatatgaatgagcgcatttccaacaaaaagataggtctcaaaaccaagtttaatagcaaaaacgtgaatctttcggccatgtaaaacatcattaactcgagcacaagctctgagaacaaaaataaaagtaagattatcaccaataaatccctggctatgcatacggatatgcatgtcaatagctttccttggctggtcactctgcgacaaaccacgaatcatattgttccaaacaaacaaagtgggtcgctcaacatagtcgaaagctaaatgggctttgtccaaattaagagatgataaagcatatgctttgataacctcagagattgcatatggatctttgtgacgatttcttctgattaagcgagcgtggagctctttgatagaggttatcaacattgaattcttagattgatctgcaacaaaggaagcgtagaaccgtgaaatgaccatttaatagtgctggtcgagcaaaagatagcagcacgcaaagaaaagccagggaactaatctttttacctcaccagactgaaaagatcgtccaggagtattttgagtaagaataaataagccatatattaaatttttatttttattaattaaaattaattttataaacatgggcgttttaacattctcaccattcaactttctctaccatgagtgacccaaaatttgtattttgtgggacttatttatggttaaaaaatatttatacttatattataaatactcttactagatttatttaattttgtgagagcttttctattattttagtctataattatcaaattaaaaaaattacatttgattttttaaaagacaatatttttgttagtgaaagctataacccccacattaatattagtgggtccgtcactgtcaacgatcatattaaataattttattgttgttattattttcggtgtatttctatataatacattagacccaaggaaagaaagatatcccttttcacatagaaaaaaataaaaaatatatataattttatcattacgattataatatgtaatattagaacaatattattttagagtatggtatttttgacggttctctacagtgcaatggaagtccgatacagtggttcgactggactgttgtatcgtggggatgatgaggctaatagtatgcttgcacaattctaagcagtgtcgcgaacgtcttaaagagagcgacttagtctgtgactcaacccaaattttcattcaataatttcattccttttttattttctacaacacatttacaacaattttaagacaattacgtttgtgccatgactatcgatgacaattctagtgttgttgacattaataaatatttttcgtttgagggaaataattttaaacaatggaaaagaaaatgttatttttttcttactatgaaaaaggttgcttattttctgactaatgataaacttgtagtttctgaaactactaaggatgatgaaaagcaaaagaaaactacttcaaaaatgattttgtgtgcaaaatttttattctgaatattttatatgatgacttgtatgactactacaatgctgacaaaactgctaaggaaatctgggacacaattaaaaagaaatacaacaccaaggaggttggaactaagaagtacgctaattcacaacatcattcttttaataaacattgttgttatttttggcaaactgcctctttggaaagattttaaaaatactcttaggcacaaaataaaagaattctctttggaaagtctgatcactagccttcacattgaggaggaggctcgcaaacaagactgaaaagaagaagtacttgttgtttcaaacaacaacgctaagaaaggtagtgcgattctgaaactcactgggagaaatttcaagaatcaaaattgcaagcatgttccaaaccacaacaatcattctcaaaataataattagaattagattccaaggaaccaaaacaaacagcatcaacttctctaataataagaatgaactagtgttgtgctaatttgcaacgcgtaagtatacgtatcgttttaacaagtaatactcacaaagagtgaggtcgatcccacgaagattgtagttaagtacgataaaattaaattcttacttctatttggctaaataaaaataaaattttaagagaaaatttaaatcagtttaacaagaaaaacagcgaaagtaagaagcaggtaaattaataaaggaattaacaattgataaaagtcagggctttcgatttcaattagatc

SEQ ID NO: 15692 - DNA, 9767 bp, Cannabis sativa
  modified_base (1829)..(1833): a, c, t, g, unknown or other
  modified_base (4471)..(4486): a, c, t, g, unknown or other
tttttttttggtctattactaactttaatgtgaatgaataacgatgccctcctttttggtgcgagtagaaaatgtaattatgatcatgcaattcaacctaaaactcaaaagacttagacttttgtgtcttctactaactctgtcactgactcaaataggtggtgggcgcggcatttaaatttaacttaatggtgttgtggacgtttatgtaatctttctctaaattttggttaatgtttggatagaaaaatgagatttcttcttgtggtggcttttgggggtcaacaaccacctgcacgaggttgtgatatgtcttaaaaataaaggactcaactcaaacagctacacaaaattaacaaatgctaagagacaccttaaccatcacatcacatgacgtgataaattcaatttcggattctacataatttaattcaaaaataaaaaaaaattattaattaattaaaagccgccatattgatagaattatggtcgtacactcgtactaaatatcaatgctatactttttgaaaatgtcatcttgtacaatgtcatgtcatgtcatgtcatgtgaattatgtatacatgagtataaataagtaattgtgctggtgagtttcaagtagtgatggcagaattgttggctcttcgtatggattttctatgggcttctaatttggatttcaaagtgagaagggcggaagcgaatgtttcaactgtttgtaattgagttaataatatagattctaattttgagttcaaacttgttattgaggagattatttctttgcacttggtggtggtacttattgttcatttcttgttgcttgttgcgaatagtgtagttcacgtactaattaaatttgttactagttcgttaagaattatgtgtaaactaatatttgtctaaaatttttaagtgctccacttaatttaatttaatatattaccacattttattttaaaaaaacagaatatatataggcctccgcctcttagttatacactctctactttattaaaaaaaaatctacctaaaaaattttattaaaaaaagagcaattttatttatatacaaataaatgtacaatattacaaaaaaataaaaatgtgcaaaaaaataaaaatgtgcaaaaaaacataattacataattttatacaattttataaatatttacaaataaacatatatatttacaattttaacttgttgataattactttcaattgattttttaaaaaaaaaacgtataaaattaaatatataaatataaaagttattatttatattttgatatattattaaaataatatgtttactaaaatttactatgaaatttaaaaaaatatataaatatatttataaattttatttatattttataaacaatgcatatatattatgtttattaaacatttgattagtattattaatggttatattactattattaatctagtatgtttattatgataataaatataatttgtttattaaaatattataataattttaaaaatacaacagttaagtttatttatttgaataaatactttaaataacacttatgttgtttagttattaaaaaatatgttttaaaaagtaaacgaagttgtaattaaatgtggccttatgtataaacactatgtttatattaatattgatcatgtttattaattattgatctaatatatatgttatgataatgttagtggtgatatattttttttgaccaagtgtgtgatgataatatgttgatataatgtgtttattaaaatttaaatacaaatttataaataaatcatgtatgtttattatttatttttaccannnnnagtttgtacataaaaattaagaatatatttttcatagttaataaaatgtatgataaattgtaaataattttttatgcacatgtaatataattaaatactataatatacataaatttatgaattctccttaaaatatattattttcttttataattattaattttttgtcaaaaagaaatcatatgattaccgcttcatattgtaattattaaattgtgttattattataagtaatgatatatgcacacctaaatggtatttatccttttacaaattataaaaaaataaataaataaataaatttaaatattctataatgaattctcaaatttttaattcactaactcttaaaaaataaatttatatagtttcaattttacaaataaaataagaaactttgtccttattcttattcatcttaattttcccgaaacagaaattcagtggcagttcaatggaaacctgtgttaaataaggtcataagttatatgttacttcatcgtcaatctgaaaaattagctgcctttgtcttttgattgttataactcaaccccaaaagaaggttaagaaacaaaaaagaaattatgcagttctcttgccagtatcaattagttagcttgtattcaatatgaaatttaacaattgccacaaaaaatatgaactttaacaatgggaatgaagatatcatccaatgatactcaaaatctgagggatgatcatctgaattttttctctatatatgcacaaaaatgacattgtttccaagatgctagaagtgataagttcctcgttgaactacctaccatctagcacagtgactgtcaagcggttcactgtgcaagattgatcttcttgcttactggttgatgaatcagtctctatgggactcctgtcaaggcaaaatccaggatttttaggctgaggcatagttgcagtttcactactaagcatcaaaaccactgtgctcattgtaggcctgtcttctgcacgctcttggacgcataagaggccgacttgtatgcacctcattacctctgatgctgaatatgaatcgcctaccgacgaatctactagttctaatgcctttccttccttccacaggttccaagcctgaaccagtttccataatgagaccgatatgaatacagaattgcacatatttagagtaacaaaaatctaatggttgtattcttttacttacataacccagcaggtttaattcgttgtttgcataataaaatcctctgttctttttaccactaatgatctccagcaccagaacaccaaaactaaaagcatcagatttcactgagaagagtccatccattgcatattcaggtgccatatatccactgttatatcatcaattaatggaataagtacttttttttaattgaatggagtaagaattggaagagcacaatggtacttactatgttcccactactcttaatgtgtttgcttcagtctgatccctaccaaaaattcttgccattccaaaatctgatatctttggctctaattctgcatcgaggaggatgttgcttgctttgagatccctatgaataattctaaatctggaatcctggtgaaggtaaagaagccctcttgcaattccacaaataatgttgaaacgcttaggccaatccagcaaagatcttttcactttacctgcatgagttaaattttcaaacttagcataaaggggtaatgcatcaaatttgtagggactacaaaataattagtacacagtaactaatgcaattaaagatgaaactgaaagagtaactgaacaaaatagagtccaagcttctgttttccatgtattcatatatcagcatcttttcatccatctcgatgcagcaaccaagcagaccaacaagatttatgtgctgcagcttagcaatcaagcgaacttcatttttgaattcttcaacgccttgccctgagttctttgagagcctcttcacggcaacaatgtgttcttcttctaagttaccctgcttggaaaatcatgaaatatgtcaagtactagcttttattggtgcacttttatgacattatgagtgtctaaagtaacatgttttattaccttgtaaacaatgccaaaaccaccttgtcccagtttattctcttcagaaaagttgtttgtagccactgccatggtagtataatcgaacaatggcaactctagctcatctttatctctttcacctgaatggaactccttctttgagtttgagataaccacctcattcaacaaaaaatcctggcttctttcacgcataactattttcaaaccaacaaatgaacaagttagaaaacaccaaatttaatgcatttctgtaatggtctgagaaatatcttggtttatatacctctattttctgattttcctttgcataaaccttttctcttccataggaaaaacaatcctaataacaggatgcagccaccaactgcaactgctacgattataattattcgttttgttgtccaatcattgtctgaaatgagcaaattcatataattaattgtgaatttcaaagtcaaatataaagaaaaagctcatgcctcaaacttgttttcagtacatgtaaaaaagtctataatacacacaaataataataataataannnnnnnnnnnnnnnnaataataataataaaagaagttttcataaaacatggaagatagaattcaaagggaaaagtacctaagaacttaaagctcaagagagaggaattaaaaacagaggagaaagtgtgaaagatctcttaagcacacaaaaagattgtctattttcataaggtttcattttgcgcttaaaacaagaaataaacttcgacacttgtaataagacaatgaaacagcaatactagagacaaatccaccatgtatttttcttttggcaaaaaggtaacaatgatacatacacgtgaggtgtcatacaattattagtgtaatcggattcatgactattaattgtagaaaatccttaactaattgtatagctcaataagttataatcctagtccgtatttaaggtaagaatatgaaggaaataatgaaattgatcccgtgatttcatgacaattgaaactccttaaggaacaatagatgtacacctaacttatcgacaaagggtccacccatcatattcttttgacatggaatgaatccaattaatccaatttatatttattgtagtttgtaggtgaccagctaagttgtgatgattttaatgaattgatagcttacttttttaatataaatatataagataaaccctccacatctgctctaaactatacaaatggagccatatgcattaaatgtcaagaattaagaaattcagatacagctttctaagcaaccaaaccccattattaacagttttttctgcaaaaatcttctcttaaatatatatccaaaattctaaaatataaagtacacccaaaacatgaaattttctcaaccacctttccaattccactttaagttgaaaagattcaatttttatttttatgatttttgttatttgaaaataaaataaagaagaaaagaaaccaaaagcaaaattgaaagagagaaaagtagagaggaaaagaaggaaatatttacgacttttttcttcaatagggatggggaggtcccacatccaccttaccttaaatcatatatattagaaaatatctagctcatatgtgtagttttttttgttttttgggtacagtatgttgtagtcactaaaaaatttgattagatttttaatctacctatggaaataaataaatggacaatctgaaaaaactacatttgagcgtaaccaatttttatatatataaattaccaaatttaaacttaattttaagtaaatctttcttttagtaaaaaaaacaaggtgaaatttctatttctaatgagatgaaatactgtagtctcaaacataaaattagagcttttcaggaaaaactataaaacatgagataatttatttttttatgatgaatgagacataataactttcttttgtctgatcccacaaagcatatttaataattaataattccaattagattttattttaaattaaatttacattgctttcaaaaacaaaatgtttttttatttggtaaggtaaattaattttaagtttgtagtaaaaacattaatctttttttataataatgtagtttaaaatgaaatttaataaaagagttttgtaattaattaaaacaacaaaaccaaaaagtaaatcaacatagtcatccgtggtgcccacagaattattgccccaccataatattttaattaagcacagaaagactatgcatactagtctagaataatatgaacacctgagttgagttgggtgtggcggaggaagtgttaagttaacccaacccaagtcaaaaacgactgccccgccgagaacgttgggatgtagtgtagagtagaccccacaaccccaggcccaagctgtcttatatattttctgtttttttgtttacactcagactcaggatccgcttaggcgtactataaaaggtaattcagaccaactttttgttgatccagtaataatataattaagaatttcgggagtgtttttgtattttacctcatcaatcaaggctcatgtaacaattttataattttataggaaccatcctcgtcatccaccaccaaccaaccaataaatatactctactgacaaacagaagcagacgcctttaccattagattttgtatgaaactaaccaaacttctattctagatgtttttcaatcacatacgggacctgacaccacccctttaaagctatttctagtcataataacaataaaattaggtaatattactattactatctattacacgtggcacatgcttataatgaattagaaattaaatagccactggcccactacacatatgtaacatgttttttaatttttttctttataattaaccaaacgttcctggtctatttttaatttttatggtcagttatggtggttgtttttgatgatgaagaactagctcagaagaacttaactggcatattaaatagtaaatgctaggacaagtaaaatctctaacccaacaagataataatttgataagacctatatattaaacaaactaataatgattaatagtaaatactaatgatgtaattagtaagattaagaaggttacctagatcagaagcagccaacctcaaaaacagaacttgtccaccttcagcgtagtcccttaaatcaattagatcgctattccacatgacacaaccagacccaccattagtaacgacggcgtttgcataagccgtgcaagaacagttagccaaacacttttttcgacactccacaatgttcatactccggtcaacaaacacagtcgaactctccggcaacttcatcatcttcatagtcaaaaacttgtctttctcacattctaaattcgtcttcctaaagcaaccgtcggacccatctcttagattccaggcctgtggattcctgggaccaaatcccttcgggcactgacaaacaggggaggcgttcgagtcacagattccgtaaacaccacactctttgtaactgtcgcattgatcttttggggcgtaccagaaccgactccagctttgactactttcgatccacgtgtatcgctcgaggtacccagttgagttcacagacaaacgagagattattgagcttccttccgtggtcaaaaacgagtagtacacctgttgttgagtcgtgacaaagtcgaattcaagaccgtttgccggattcatttccggtacaccactgaatctttctccattccaaggcccgctgcgatacactatcttctgttggtttcgcaagaaaatttctgggaatccttggtaatccaaattgaaagagtaatctccggtggaagggtctgtcgagctcctccacgaggttatgtatctattcacaccggttcttaagtcccatcctagcttcatacccggtaacaaagtatcagtgggaaaatcgaagctctgccacaagaaatgttttgggtcgttgtcgttttcgtctctaacgacaagattacctgaatctaaaagctgtagaactggcttaacggctctggtttgatttgatgaccatgtgaggtttccggttgagtcgaggagagtaagggttccttgatcaccgaactttagagttgcggaagaattggaaagtggggcgtctctgtttgcgacccaaacccaggttttgacttgaattttcttgtagcaaatgcccaagtaccatcctgaagtaccgggtttgaagaaaccaagttcaaagacctggccggctgagacaagggtttggtcatttgagagagaatcagttgaagatagagaatctaaagcagtagtatgttggaagagagttaagaaagcaacgccaaaaatggcgaaaagaaaaggacaacggtgctttggtaaaggttccatcgactcactctctacaaagctctttcctttgagaaaatgcagtaggtgtttggtgtgcttgtatttaagacatttgttggtgtttgacagtgaaagcctaagaccaagaaaagaagaaaaaaaacaaacaaaagaaagcaggaagactatagctttctagtatcaactttttttttttttttggttcttattttttcatttataaacttaaatattgagagcaacatatcctatatggattggtcatgccaaacaccgaaatacgcatttaaataaaaaagaaaataaaaatagaacaaatatccattcatatatacgacattgactcaaaaaatgtgatcaatgtcttcctttttttaacgcatttaattattttggagagttgttttctatttttttttttccttgagccgggttagctacatgcttctttgtaaagagaaattaatataataccagtactataagtctataactacgaccacataataaattatgtttttttttaaatggacataataaagtatgtttgataagctaagattagattactacctctactcaaaaataaataaataaaatcactacttcctcttttatcccaattggaaattagaattacaaaattagaaaaaaaaaacgtatccacaaaatgacaagacttttttttttctcagaaaaatcacttacgcatgaaatgatcaaatgtcttctcagttaggtggcacactccatttacgaacaatgtttgacactaaatttaaaatggtactaaaattggataagctcctttttttttaatgttcaattttcgataaaatataagtcttttttttttttttttttttgctgaggaatataaaatataaatcttacagaaaatgttgggtaatctacaataagattcttaattgacattgaactattgaactggtcattgttgaatataaatttacaaaagtcattgttgaatatacatataaaatctttgaatatcttaaaatacaaaattaggtgtaatatgattatataagatttttatactactatgtcagttaatctttcataataataaataatattgatatgcagagttttagtttaggcatgtttggacaaatttagataaactctttgattatctatcagtttttaatctatattctatttaactatgaaaaaaaatctactagaaaatacaatacaatgcagctaagtactaagtagtatcacaccaccaaccatatgtactttcacaacttgattttgagaccaaaatttgatgcaggatgctgctggttttctatactattttaattgctttaattaattactagtatagaaaacgaggttggtcctcaaaaactccaagacgtaccccatggtaacatgcatccttattcttgcaataaagtattaatctgtcaaaaaccacaacaattgat

SEQ ID NO: 15693 - DNA, 5023 bp, Cannabis sativa
tctctctctctctctctcacttgatactttcctactgtattcatacattttaatcttaagagagctattgtagattccacaacatttatgatctgagtagtattatccctggtatcaatacaaccaaaaagggagtgggtcattactcgttaactaagggggcctaacatgtatgaaatctcgtgtcttatttacttttctattctaattgtgcaacacgtggaaagcatcgtcattcgatacgactccactgtcagttggtccaatttgaggtgaacagtttggtgctttcattgagagcgagatgtcgatttgtttgatcaaacaccatggttcacacaagaagagctccagctatgacttctgccttattgggtcttcctcaagaccctatgactgcagatcttgatgttggtattccaatcacaaatggaatctccacagacccaatggatgtggccaaccctgccatcttagcaggcaccataaacctggccactacggcttgtgaggtgcacactaccaatctaatactcttaatggccaacctctgctgctcggagaggaccctccattggtgcctcatactgaagaaatggccaacacggagcaactgccaagcaccacgattggatctggtgctcagtattatgctagagcgacagggctaagaattggcaagcagccattggaggaattcatgtagacttgggagaggatctcaggttagccaaaattagagaggtcatttgtcaagtaagccaaactgaagaaccacgctctgttggatgcaatgcattcgcacaacaaagatggaaatttctaagatggatggatgaccaagagtaaatcctttgatctcatcaggtagatttagaccatcataacagagaagctagtgacttgataattcaattcattgaaagaactaccgaaagtggtcaggatctcattagagatcctctccaagggagactaatcgacagatcagtgaggatctacaaaaaaaactattcaaccaagttcctcttgaactaggacaaaccttccccaacccgaaggaggacaagccttgccaaaaaaatctagcggcgagaatagccaaactgtagaaaccatcggtctgggggaccaactagaggtctctggcacaataacacccccgattatccaacttttgcatggccagcaacttagtggtgcacctcaggccaaccaacaaggtgaacttccatcgcgaagcatctaggagcgagtaacgcaaaggccaatctttaacccattaggcctgggaacgggtggaaaaacccaagaccacaacagcttgagaagtgagacaattcacttcagatacttggatccacctcactaaagcaattgatgtgatctctaccccacgtaaatgcacaggctccaccaatcagtcaaggaagaatgggcgtctaggccctgcgcaacacagggctggctggccttgaacataccctatgccaaggtatggccgaccttaaacataccctctcctaaggtatggccagaaaagctctggccaatccaagctgtagctcaatcaagaagggccaatcaacgaggcccctacaacaacaaatccttctgtgcaagcacagttggatcaaatacgagacatgctcaagggcttagctggcctaaaactatcagacctcaagttggataggtcgagggattcacctttctcggcatacatcaatgcctttcctgtgcccgaatccaagatgcaaacttggaagatgtacactagaaaagaagatcccctagcacacctaaaatactttgagatccaaatagatctctaacaagtatctggagatgtgtgatgccaaatattttcggcaaatctagctaaaatagcccaacaatggtatttcaagcttgccccaaaagtttaattcttgtgaagaattctcccaagagttctatatccagttgtctacatcaaggcaaatacctttacgactagaggatcttgtcaagataaagcaaagacaagatggacttttcaaagactatattcaaaggttcattgttgaggccaccaaggttaaaggccgtacataagaaggccgatatacgaccataattagaggcatcctgccgttcagtaaattcttgaaagatatcagaaggatctcaacgagtaacatgaaggagttccttgagcgagctgatgtcttcataaagttagaagaagctatccgacaagcccaaatagggtaactcaataatagacagtctctatgtgctttgcaaccccagaactttccaggtgcgcatgtaggcactagtagtgccgcccagacctctagtggcaagaacattaggggtaaccacaacaacagtagctccaaaaggaatagtggaaaaaatgaaaagtacaacacttctgccacgccatgagactagaaagataaagagcggaagtacagctgctccaccctccctagcgaagaaacttgggaccattcatatggccacttagggcattgtcccatacaaggagcccactcccatcaaaagagagatgagcaagagggacatgtcgaagttctaccgatatcacaatgactttgcccatgacacaaatgagtgtcaaaacttgaagagggagattaaattccttataaggagaaataatccccacttgcattgttatgtgcagaatgactaatctcatccacaagcttcctagaatggaaacgttatgccacctcgagtggcaggtcacttaggggtcatcattggcagacctcgcattacaagcaaaactagaaaggctagggagcactatgctcggacaccccgtcatgagcctaaaagtgacatcctagccgttgatgaaagaggctccaaccaactcaagcttggggagcccgccatctcttttacagaagaagatgctgcccaagtcaacttcctacacaatgaccctggtcattactgcacaaattgggaacgcaatggttgcagggtatatggtggacaatagagcctcctcccacattcttttcaaatccacatatgaaaagatggggctccaactagccgacttggcaccttgcaaacaagtaatgtacgactgctttggccaaggaattacacccatggggtacattcgactacccctggaaattggagagagcccaacaactagtacgctaatggcacaattcgtagtgattgacgtgttatcatcattcaaatctacgataggttgaccagcattgtactgcctaaaggcagttacatccttctaccacctttctctaaaattcacaacaaggtgtggggtaggatgtttgataggagaccaacagtctgccagtcactgttacaacttggctttgtccaaagtcaagaaagaaaagatgcccaccaagagctctgatgaaaagcccagcaaaaggcaatgaaggctagcctaaagcagggaggcagacgtagatcctcacttgggggatcctgcagactgctttgcacctgttaaagaattggaagaagtggaggttgatcccacttttccaggcagaagattgaagattgggaaaggtttagcgcctgaattaaaatcagtactgataaaatttaaaagggcaaacccagacctttttgtatggtcacatggaggcagggtcagaatggacccctccgtgatccaaacatccaacttgcaaaatggaaaaggaggttgttggataaagcgaagttgaatgcccacaactttatcactgaagcattctatccattttgggtgtcaaaccccatgttggtacccgaacctaacaaaaaatggagggcgtgcatatatttcaccaacttaaataaagcatgtccaaagaccgctttcttcttccaaggatcgagtagctagtagatgctataactggccttgagatcctaagatttatggatgcttactcaggttataaccaaatcaagatacacccaccaaatccagaacacaccaacttcatgacaaacatatgcctacactgctacaaagtcatgcccttcgggttgaaaaatgcaagggccacctataagaagcttgtgacaaaatgttcaaagatcttattggccataatattgaggtgtgagtggatgacatggtagtcaagtccaaaaaggctaggggacatgtggaggatctaaacgaatgctttaatatcctctaagagtataacataaagctcaatcctctcaaatgttcttttggtgtaggctcaataaaattccttggcttcatagtcaatggtaggggaatagaaacaaacccagaaaatatccaagcccttttgcacatggagtcgaccacaataatcaaagatgtacaaagcttgacagtttgcatcgcttcactaagtagatttgtgtctaagtctaaggataagtgtgtccccttcaaacattctcaagtggaaaaaaaaatttgagtggatagaagagcgcaaaaaagcactccaagagctgaaaaaattggcttaactacctttcttgtcaaaacctttggacaatgaagagctaggcgcgtacctagctgtaacataacatgttgtgagtgcattcttaatatgagaagaagactatatagaacatccaatatactaaatcagcaagagactgatcaacactaaaagtcgatacccacacatggaaaagttaacatacaacttactcttagcatcaagaaaggtgaggttgtacttccaagctcacccaataagggtctacaccgaccaaccattacgatagatttcaccaaatcctgaagcactcaaatggaccaacgaggcacgaccaatataaggcctcctgtttgttgggaatttatgccctaaataaaacccatttcaatataattttatttgttatcaatagaacaatagaaatcatttaagttaacatgattttttttcatgattatggtttaatatataatttttgataaatgtagaacatattattgttcacaattatagtgatgtca

SEQ ID NO: 15694 - DNA, 8891 bp, Cannabis sativa
aaacatgcattaatctttttctttttactgatttgatgtaggtgatcactttattaatcaacaaacacccacacagtgtctttaattttgtactttgttgtgtcagtgcagtgttagatagttttccttcttgtcctgttatctaattttgcatatctgttctgccttcacgttatatgatttgaaattgtttttttgaatacataaaaatgatgcaaattctggcttttaagccaatgaaaattaggcaatctctttctagtttaaattgaacctatgctaaagtcaaataaacttgtttactataatttgctttagctttgggcctctctaaagtagcccaagctagatgctacttagtgaaaatacagatgaatatgggaagaaatgtggcgctgtgtttgttcattcgttttctattcatatttacatataaatatgtcaatatatatatctatattgatacctttttgttgcttgctcttttgcagtttatgcagatggaagtatttgtctggatattctacagaatcagtggagccctatttatgatgtggcagctatacttacctctatccaggtataaataaattactcttacttggtttagatattctgttacagtctagctaatgtctcccaaattgtctggggttaaagctatcttagggaaagtatgttccggctacacttgcatagcataccctcattgagtcattaatagaggccttaccatgtctatgatactgatttattaacgtaggcctttgggctctttacagtccaatttttgtttttggtcctggcatgctcttatagtgtaccatcattcagtcattaatttaagtttttggctctagtaagtcccaacttttttgcttctaataattaatggcacctaccaaacctttctttatacactacgatctactaggaactaggcaaggcaaggtgggtgggtgggtgtgtgggtgtgtggtgggatgtgttagggtggggactctagattttggaggaagcatgttttaagttttatcttttgaccatcttactaatattaagtggtgggatgtgaaagttttagtttcctttttagagtctggttttaggacacagcttcatgtccatcttttgtatttgtatttatgaatatcattttaagccttatctgctgtcattgcagtcattgctctgtgatcccaacccaaactctcctgcaaattctgaagcggcacggatgttcagtgaaaacaagcgtgaatacaataggagagttcgtgagattgtcgagcagagttggactgctgattaattgttcttgcttaaatgcttcaaaaccttttaagattcagtcgaatggcctgtttaaattacattttagattctgaaaatgaatttgctccaactacattttctctctgattacatgaaatgtttgcttggtgttcacgaacgcatgtttggcctatcggtcatctgtatccagtgtccattttatttgcctctatattttttagttttcctgacatagaatgaagcctctcgttctcaatgtttttttttttgttttactattattatttgatcaaatgtgggtgaaaatgaaggttggggagtaaaacgtcattgtctgaatcctaaataaatgaactaggaggatcaaacatcaaaggtaaacactggatgcatttacatttatttatttattaggcgtggatgtaacaaacattgaagtctaggcaatgatacaagctgaaatgataaggctttttacaagttgaaatgatgaggatttttacatctgtgaactgagattaccactgctggtccatccctcttgtacttgcatggcgtattgtaaatgccagaggacatcttctattgaaggacgcctgtttgggtctttgcctaagcaatttagtgtaatttcaactgcagtcttcagtgactggtatgcgtacgagccctgaatcgattgttctacggcatcctttaattttgaatctgctaagcctcgttcgagctgtgacaagaaaagcaacaagaggaaaaaataaaattgatatcagttttaacaccaaaagttttgtaaattaagatttaccttcttactaatatgaatgattatcataatgaaaaaatcgaatacctggagctttgtatcattcagatcactagctgatatcattagtctcccggtgataacttccagtagtataatacccagttgataaatatcttccttctcctcattttccttactgcatttgaaatttttgctagagaatgtgaactcggcaaccaaaagaagaagatgaaacaggagaaagagaagagtaatacctgtctagatgaacaccttgtccgtgtagagggctctccaaaccaacctggaacatttaaattgcaacactaaaataccaacaatgataccttcaaatttctgagttttaagatacattttttttttcgaattctaaccttagatggcaaggggatactatagctactaatttttgcagagagactttcatccaataatatgttgtttatcttcaatttgtttccataaatgcctggtgcaactcctgtgtgcaagaactggaccccccttgctaatccaattgtaattgccatcctttgcggccatttcagcatttctttctttctccaatctgccatggaaaaaggtatcacagaatttcttttgagcattcgagacttgcaactttaaacacaatcaaagttcctctggttcactatgctatccatacctgtgacatattcgcttagcgattttgtcatgctttcaaggacaacaaagactgttgtagttgtatgggaatggtctggataggtgacagtgcagtgtccaagaacgctgaccaaatgtcgatgccttagcttcgacaacgaatcttcaatgccttgaatcatgctctgagctaagtgtttctgcttcagtttcatgcatttcacatgaacaacagaaccatctgaaagccgacctttataaacctgcagaatatcaaatttatgtgcttaaattcaaaataccatattaatctagttaactaacatagcaaataaacaagaaaaaactatcagtaattatttattaccttcccctgagatgcttccccaatcaagtttgaagcgtcgaagctatttgttgcgtcttcaatttcctctaatgagaaaacgcggtacgatggtaatccaatagatgctaacctcattggctgaggcacacgccctgtggagaaacactaatccgatcaatacaagttttgcaaggcaaacaaaccatgttcaaatgaataatgcatagcagagaagatcagaagaaagaaaaaggtggtcttacttggttcgatgttttgttttggtaaactacgcaatgatattttgtcgaactggtcatgttcatttgttgtatctgatttcctaacgatgatcaatatgaatatccccataactgcagcaatccccacaaccccaccaactataccaagtattaggcctaatttggagcccgattcctttctttttcttttagccgggggcttaacggctaaagcttctttatgacaaaacgcatatggtcgttgatatctcgagttcccacttgacaaacagttgaatgaatagagaaccgtccgattaacagatttcgacccaatgcatggtggcaattttccaatcaaaaggttgcgagaaaggtccacaagtttgagctttgcattacaagtgatgttcaaggaaattgctccactcaattggtttccagccaaattgagagactgaattgaaggcaatgaaaacaaaaatgtaggaataggccccacaaaataattgacagagatgtcaagctgctgaagcttatcaaagttgatgagatttgaaggaatctgagatctcagggagttattcctcaaaacaatatttacaaggctcttccccaaggaaggaaaaccaggtccaaggtggttgttacccaagttgagttctgctagtaatgctaagcctttaagatctggggcactcccattgaacatattatcagccaaaacaaggcttttaagagttttaatactagaaatcgaagatggtatctccccatatatgaaatttgagctaatgtttaacacctcaagtgacctcaacctgttgatctttaaaggtaaaggaccccacaagcccaaggataccaacgataaaactctcaagtttgagagctttgttacaacagtgaacagagaatcaatggagaagcttttagataagctttcccgagaagcaacaaagttccctgaaccaagtttaggggtatgagaaggggagcttttgtttccaactatggttagttctatgatccgattgttgtagcagacaatcttgagagaaggagaagaaggaaggtaacaaaagctagtccaattagtccatccccgtaagacttgagggtactcgagaagcttttggacttggaatagaagacgggtctcacttggagtcaattgagcagtagaagttggagtaagcagagcaaaaatgataggaaaagagcagaagaagaaaacccagaaattcttcatattctattctattctattcgataaaggagtgcaaactaaaatactcaaagttcactcatttagatttcagagacaaagattccaatgaaataaggcggaaaaaacaaaaagaatcaaaacctgcagctcaacattccattacataagagcaaaaatgggttccaccataatagtttcatgtataaatattatcaatggccttgatttcacaacataaagcagagactttttctcaatgggccaagggaaagaagcacagtgtaaaagatctaggccagcctagcgaggttacagtacaataatttgtttcccttctctttctttctgggaaagtaaccaaagaaaaggtgataaatgattaagtgggagaatttgtaaaagaaccactaacttaaattaaagaaagaaagaaagaaagaacaacccattattgagaatggaatgaagcaaaaatctgcaaagaaagaagtttcagagcaagacaagaagcactgaggccatatgaaatgaaataatagtaacgaagtgaccaaacttgatagtacaaaagttaagcaagcaatccttatcgtacgttaggagtataaacccaattataaattgggcagagaccattctacaccgttgatctttctgacttttaactatagtttagcgaaagtcaacagtggctctgattcaaagggtgcaatatattgcgctaacctcgatgcttgaccagaccacgttagctcctgcaagacaacaaggctgatcccagggtcacgcgccacggcacgtgggtgttgtgatttgctaccaccttttccatagatcaagaactcacgaggtaggtttcgttctccaatgacggtattgacccttcccttgaacgtcgaatgactaaaatgcccccatccatgtatgtgtcaactgaaaataacggccgaaatgatcattaaagttacatatatgccctttggtgtttgtgctaattcgaggtttgtcggtgagagaggctctatggggaggtttaatccatggtggcatgtaaataatttaatacataaataaaaattatacttatacaaccaaaaaaacacttctaaatacccggaatttatatataattaacagatactatgtgtacttgacgacacgtctaataataaattgtttttggacgaaagctatttttcaaattgttactgttacttactttctaaaaagctagatttaataataaactgcatcacattcgatggccagtctgcaaatattctacactcaaaatcgtatgtagaaaagtattcaaagtaagaaaacaaaaaaaccttctgcggccattcaaatctgatcctgatactattgtgttaatataatttcggcctaaattaaatatgatcatgcatcatatatagtttaagcaattattattattattgggttttcacctaatcgttcgtcagcttatgctaatacagttccttttaaaggtggggactgcctttttccagctatatatatttgtttgtatgtacctgtaagaactccatttaggggacaatgtttcctgcaaaacaagacaattgattgtgatatccaaccagcattaaaaaaatacatacataaaaaaaaaaaacacaaccatttcattttaattcatttctctcttttattaaattcactttatattaatttaacaattattttattagcttggcaaaactactgtacacttttatatatttaaaagtctctactcatgaaagacatgatgaagaactatatgtctctgtcttagatgtaaaactcttattattattccttgatactgaaacatctacagatatttatatagattaagaatatgaacgactttttgtgcaaaggcatttattagggaccaaatatgatgtttgccaaagtaactgcataacattaattatttatagaaaattgctaagaaagtactatttacctagcatctcatataatttaaaaaaataaattttaaaaagtatcgctaactaagtgtcatctgtagaaagtactggacaacacaactacccaataacaatgctcttatttatatatcttataagcatattggcaccttaagttctcaacaccacccatgtgtcatcctataattgagtcattgacgagctatttttatattatttatgtgtcatgttttgcccctatagtatagaattatagtatcagttctctgccccaccgggctggtgttatattcatttattcttctgatcgtaacccggccgaggagaaactcatatgatagaataaatgtaaattttaaatctcttggcaagtcttaatttgtctctcatgaataagaagaaaattaaatgttaaacaaaataaataaattaatgttttgcacaacccttaaaaaaaagtttaggacaatggtgtgctctctctcgtgacattattagtttaaaagtatcaaaaattaaactttacaagtgaaatggcccaatccatcatcgataaatcatgttactcaagagtaagtgatccatatatttgataagggataattacaccacattcaaatttttaacttttttatttttatattgtggggttgaatttttgtaaaaaataatgtgttttatactatgtactgtattaaatttttactgttgttttttagttgttccattgttgtttttagttgttctgttttgggttccaatattattttataaaaatacagtatttttttaaaaaaatttgtgtgacaatatttttataaaaattaattcaaattctagtatttttgtaaattttgtttgatttaaataacgtatccataacaggtatatattgtggtatatatgttaaatatattagaatatagaaatgttgataagacagaggcgcaaagtactacaaaatatgagcattgctattaggtactagtggtgcctagcaccttatcgacatgtcgcgttgtgattggttagagatactttctaaaagctattatattaaattatatgagacctgatacttagttgatgcaatagcaatattgacacataagaaggtgttagataccactagtgtcctttagcatttctcacaaaatatagtataccgcgtttagtacattttgatactgaattctacattgacgtggtattgaatactttaagatgcattggtgtaatattaggtattttaaggtgtaaaatggcaatgcttaataaaataatatgtataatgtatcctctaagaaagagattaggctatattaaatatacatatgcatgtgcatgtgctagctaatgtaattattctcatggcactcaatcactcatgacttggcatgaagcattctgttgacttaaatctagtgctggggctaggaaatgtttaataataataatatttcttgtattgtattgtatattagcccagagatgtatattttctctctgtatatattagcgtctagtgttaaaaagatgctatatgtgttggtcaatatcataatcaattggctatagtcaggaccggccctgaaatttagttggccatagagaaaaaaatatttttggactctcatttagaaaaaatatgatatttttcaaaattgataaaaaaatgtataattttaaaaggggtaaattttttttgagcccctgggctaggtgggccttaggcccaggcctagcccgcctatgctcagggccggccctgactatagccctttgaagtttggatatgtcttatggcttatggtcatgtatatatacatgtgaaactaaagcgcaaggttgcttttatattgattttagggcccgtttgatgcacaagattgtattggactatgtgaacaagattggataggattatgctgtatacaatattgtgtttggtaatctgtcggattaagtactggataaataatactgtgtttggtatatggcttgactggactaaatattttttttctaatttttttaaaaaaatattaatcaaactattaaaaaaaatatacatcatgaaataaaatatattttttgaattattaattttttaaaattattgttttaataatttaacaagttaaaaaaaaaaaaaaaaacaagaaaacaacaatttgacaacaaaatattttttaaataatatataatatttgacacacatatataaacaaaatagtaataacataactaaaattccgtattttaatattcacaattttattatttaattaaatacttaagtaaatgcggaataatgaaactagtaccgaaacagtttttctgtagc

SEQ ID NO: 15695 - DNA, 4863 bp, Cannabis sativa
tttttcatcaataatggaaacattaatttataattatgtacatgttgatatgaatctgctaactaattatttggtgagcatatatatatatatataaattgaatatttatatctctaatttggtgacaatatataatgtttatatattgtggtcatatatgatgcaaatgtaccttaattaattaatccaatatttttttctttacatgatgaagcttcaaaaaaattagtgggaattcaaacgtacgtgatttatcctttaaaagtaaatgtgattttgttatttttgctctcttagaaaaatgattccacacataatccaatttaaattggttataaataaaaataatatattaatttaaataaactataagctaaatttttctatctaaacattgtaagactagattattatttttatcattaaatttgggagtagttgataactcatcgatcaactttgagagtttcaaaaattaaaccacaacaacaataatatataatattagtttcttgtgtcatatcatactataatttattggtaataaaactctatagtctactcacattgtgagtatagaaaggtcccgaattcgaatctctctcatttatatcaagaaatgaagaagaaaaaaaaataatttgttttgaggagctcgtaagtgagtgagttggagtctgattagtaagaggtgcatgatgcgcattcgatatgtggggtgcgggattattatcttttgaggaaaggaatttcgtgtgggttttatttgtagcttgaagctctgagttgtgttgtagttgggggagtgtttattgtgatgggtggtggctttgggcttgctagggtttcagcctatgctccggttaagggattccaaagaggacgagtcttgttttggatccagttgggtttagggttggctttggcaatgtttggtggtggctccaacaattaagttttttatgtttagtttaggtaataaggtctccgatgtggataggtcatgtagactactctatgtttagttttgtgtcttctatttttgattgtatggtgttagtttaactattttctcatgttttagctctaaaatactatatggatgatgatgtatctttgggtatttgaatggatttaatctatttttttttttttttgaaaaagaaaaaaaaaataataccattacaattcacagctaataagaattcgaggagtgctactgttaattttcgtactcaaaaacacatgtcagaatatttttttttcaaaattttcttcatgacggtgttcgttatatatagtattcttgtaaatttttgaaaaatttcaaatagtttacagtaccgaaaatatatttgaaattttttgaacacgtatggtaaactaaaatattaggaactctattttcagtgctataaactatttataatttttaaaaaatttacgagaataatattataacgaatgccaatataaaaaaattcaaaaaaaatatttcaacatgtgtttcgagcgtaaaaattgactaataaaaaattataatagaagattataattatcactagctaacaaatttaagagccctactttatacttttatatatcttggaattacaccaaagactatgtaaggtaagaaaaagagatctattaataaagatggagacagaaatatcaatttgatagcaaaacataataaatattattttgtagaattaattaatgggaattatatataaacaataatttcatatattttcttttattatttattcaaaggaaaataattccatcttctttaaattcaaaatatgtggagatcaacttccttttccctaccaaataacacaaattttcatttctcactttttatcttttctattatacatagttgatagtaccaacattaatttgaatgtgcaaaataatgtaattaaatagttaaaaaataatgaagatttttgaccccacttttgaatgaaagccgaaattgttgcattggattccgaaatgacctaattcttataattatataacaaattgagctgagttgggaatttgagaatgggattaatgagtttaattagtgataataatgaatataggtagtaatatagtatatagtaatagtagtgttatagagaatattttgggatctgattatgaaaacatggtaattaggcatgcatgactgtcaatgctaaaagcatatattatatatattatatatttatatttatatgacccattaatcattttgcccacccgacactctcactcatttctataccttcttatttcaaacaatctgccttttgtccccattaaaattctattattagttaaaattatgcttaatcacttactaactagaacatgtactacttatcattattattattagtgaaaattgcagtaaaagtccttaaaaaatttactttgaaataaattaattagttcttaatttcaaaaaatagcaataataatctacaagttcaagattcttataaatttattggtcctcatttaataagtctgttagttgctcaaaaaatattacgcatatgttgatattaaattgcggcatgtgtccttaaaaggttcactttaatgttaataagtctttaatctaaccctaagtttaaaattctcattagttttgtacatatctaattaaattatagcatgagtctccaaaaaatttctttttttatttattagtcactagattcgagaattcaaccacaaaaataaaggtaattatattattagattcagattctaccattgctaaatacattgtactatatatgagaaatttcattattgtcaattaattattatgaaaaatcaaactatcttattgctgttaataaagcttgttgctagattcctaattttttttattctcaaaaaatatataaacaatataattataaatttgggcctacaaatgaaattaaagacataaatattgaagttacaaaaaaaatgaataaaaagaaaaaagaaaaaaatacgagaaaaattaataaaataatttattttccttttaatataagaacatttttttattacaccaaattgttatttcattcaaattgttatttcaaattaataattaattattttttgtttttgtaaaatttagatttaggttaaatatatatattaaattttaataatgatggtatcctctaatattgtattgatggtattctctttttaaaacatgagtttaattttaaatgaatattatgtgttttttgaataatattgatcaaaagtatatactaaaatctagttcatctagaaaattgccaatttttaatctaaaagtacagctcatcataaagtacaacaagttcacattagcatagaaactcgtaaaaaatttaaaagaaaataaaaaattgtaaattcgattattcgaagttattaaagtaatattcattattacaatgtcttttttcactttttttgttagtttgaatcgaatgaatacttttgacttatatacacaatccatgtttgattaaagcttctttaatcatcactatccaaaaaggggctaagtgtccccaatgatcgatattttcttctttagttaattgtttctatcaaatatataataatatctatcaatatatatatatgataatttatggatgtataccatttactaatgtttaatcacactatattaaaaagtaaatattgaattaatttataggattttttttttacttttatactttaattttatggtcccgcatgggacgactctctaatttcatttagaagctccttagtcttattgtacccttataagagattatctgtgagcacatcacagtccctgtctggtctctaggcaagtctcaccctttctttaggctcggtaggtgtcttagcctaacgtgcttgagcagcacatacccttgccatcagttcggcaatatggggatcgttagaaggcactgtacagtaagtttgctttgtcctggtcaagtttggatcctgaccggtgtatcctgcaatagtgataacaactttagcctgagagggtttcttcactaagggcaatctacgtccttttcgcagggtgtcaggaaaaccactattgaattccaagtcagaataactcaaagagctggtcggagaatcactagatgatgaactactctggagtacgggctaatcctcaaagaaaaggctgaggagatctgagtctatctggtgttcacctctccaatattcgcacgagttcatttatgcaaaagagaagagggagatgaacatccagacaacataaaaaccatacaggcaaaatctaattagtcggccatggtgaaaacacctcgcataggttggccatggttttaatagatctaaaataacctattttataaagaggaaccatggaaaccaggttcttcgtgttcttcagaacctatgatccaaaaatataaaaagtaggggcaagattcaacattttcaagctagaatccctaaatttatctcccctaacacattcgtacaacccattgaggatgggtgttcctaaactctcggcatggaggttttacctccaacaatggcgtagaaacgaaaatggaacttgcagaaaaaatttcaataaaagaaaaagataaggttgaagaagcttactcactagacggagcgtgggcaaggcctaaacggtaataagaaggttgttggttttcttttgtatggtggaaggtcgacgaaagaatacgaggaaaagttctgagttttccttgagtttttctctatggaatttttctggaagaaaaaaaaatgaagtaggggattaagaagaagacagggcttcatatagg

SEQ ID NO: 15696 - DNA, 5187 bp, Cannabis sativa
ctatatgtcttaacttataatgattatgtgctttttgtttttgctgcaatcaggtgagaaaggtggacatgcttgatggagtttctattctcaggtctgaaaaagttaaagatgaacttgttttggacggcaacgatattgagctcgtgtctcggtctgctgccctgataaaccaggtctatgctttttcctcaacatatataattttttaactatgcagtataactgtctaacaagagttttatgcttattcattttcataattgcctatgtattggacagacttgaataagtgaaattttgttaaccttaaattgcatgcatattctaagatttcgagatcttttttttttgttggtacagaaatgccacgtcaagaacaaagatattcgtaagtttctcgatggtatctatgttagcgagaagggatgtatccaagtggaggaatgaagagtaataaaaggtgtgatagacacattttttatagtgttttgtttttattgttgagtttatgtagacagcctctacaaagcctgttttggaaaatggaacaacagttttgcattcacaaaatcaatttcaaagacctcgtaggtgaaaatatgctcgtttctctttgcatttattttacaacttttacttgatttttttcttcttcatatgtatcttatattgaatttagtattgctatacccttttatgagaatggtaactaaaatgttgttacaatccttgctttggtgtcttcattttcaaccccaattaggaatttatgtttgagaaagttaccacgaaatgcaagtataatgtacaagcgaaataagttgaaatgtttcggttgttttattgcaaaatcaaaaagtaatagtcaaactttcttctcactatttttcttcacgccgacttatatcaacaatacatttattgaactctttcaacacccaattcctctaaaaaaaatataatgcaaactgcaaagtataagttaaaataacacaaaattgcttgtgtttgtggttttcttcaaaagaacaatctttaagcataggaagcatttcaacatttaggaagatcagctggtgggggaagcaacttttgattgggcaatttcccatctaggaccttccaagccatcttcaagccccaacttgtgtgaatctctagatgacaatgcatgaaccatacacctgttgaaaaaatctcaaccatcaaaaatctatagcagaaaattaataatgtagttgaatcacgatttacttattactagttctatttaattctacaaaaattctattttgaccaataactcacctgggttatctgctaggaatcgaatagcaacccacccgccggaaggcacacccacggtgttcctttcaacagggtctaccaaattgtagtttgcaggatctttattgggattaaaattgccgaacccttgcccaacgacgaagaaattaaatccatgtagatgcacagggtgactttcagcaccaagaatgctagtgtcttgcatgacaagttccacgcttgtgttgaatggaagaaccacaacctttgttccattgctgaccattgtattgtttggtggagtacctgtatagttgaatggaactattggtttagttggaaagtcagtagtgtaaactctatttgattggccagtgaaatgggcttgaaggagggcagtattaggaagggcaaaagaaatgttatttattgaggctgcaaacattgtcccgttcgtaggtccttggcaagtattgttatgttggcatgggttggttcctagtcctattgtgaagaagaaatgtttgtcgaccttttgaggtacattcgctggaaatcgagtgttggccaagcttcgaagtttgtttgcaaacttagttgcaaatgaagtatcattaagagcaggtaagattggtttcaacagttgaagtttcttaactgagaggtgagttttggaattgctagattcatattctaagattcctgcaacagaagagttgtcaaaggtgccaagacctgtcacatatggtctagcagacattaaaaatgtggcatttgggaattggggtttggtctttaaaagaaggttagtggtttgtccaggggctatgagaatggtgtttgtgtcaaatggtttaacatatacagcatctgcttcaactactttgacagtgtgatttgctatgctgaaaaagagttcatcatttagagctgcgttgattaaccgaagaagataagtctttcctggtttcactttcaacttgaatgtgtctgcaaaatttgtccatttttaatcaatattagatcaaccacttttaaagttaataacaccatatgatttgtttgatcattatatttttgtaccttcggctgagcaattatataatgggcctgggagcccattaatggtataagcatcagatacatttgggccaccacctgtttgcaaggcctggttaataactgcttcaggatcagcattccaccactctcctgcatatattattcaatgtatgaagttagatcattgaaaggtataaacaaattataaaaatgagattaaaaaatatatattgttaccgaagatgatgggaacttctttataaggcttagtaaatggataaggaatgccatgcttgggaagaatgactaatggaccataaacagtggctctcaaccatgatatgtgagcatgccaaaaaagtgtgcctctctgacctacaacagtgaagttatacacatagctctgtcctgtttgaatggggcattgggtcacatatgcaggcccatcagcccaacctgatcggatttgtctaattccatgcctgtcccaaacaaaatcacaaaatattatttatatcccattatattactttttatgtatatgtataatatatacacacacagaaaaaccacataattgttattctcattttaccagtgaatggaaatattgttttgaatatggttgacgacattaatgagaaggcgatcaccctccctagccacaatgcgaggccctggaaattggtcattgactgtcacaatgctctttgtgtggcaaagtcttgtcacatttttcagcttgatctacaaataatacataaaaataaaaagtaaaaaaaaatgaaaatagaagcaactaagaaaaacattaatttaaattaattatactctaaataaacttaattacgtgaaacttataatgcctggttgtggctgcatatgcatgcatgggaagaacagccacggttatgaaagacaagagaaatattctgatgagtaatgccacacaacccatattttcttctttactaagcaaggagaaaaaggaaaaaaaaaacaatagaagaaatgaaaaaaatcccaagatactactgatccttcttagctagatatagctttgtttgattgtatccaaaagctttggggtaatgtatattatatatttagtagtagtggtgatgataatgatatcatcaaacaaaactaggcttatttcgttaattaattaggtgaaatatagtatttgtagttcattgaaatagacagaatggttatttgaattaaattaatagatatatgtaggagttagaacaacttttttagagtggtgtcaaagataatcaaccgattaaacaattctttctttccaagtcaaaccactagctatactttccctaatgaagaagcctcaccggtcatcacttctttaggtatgtgattttgacctatttcgaacattgctgctaaatttagacatgtaaacatccacctttttgctatagcatacaccaagaattaaaaatgttagatatttaagttaaatatattataggtatttaaaatcattttatgtagagttaattttttaaaaaaaaatatatcattgtttatattttatgttaattattctttaatttatatatatatatatataataatttattaaaaacactattattcttttggtcacatctctcatcttcttttctctttctctaaaagttcttaaaaaggatacaaaagggtaaactaaaagttttttgatattttttttaaaagaaaaatagaggttgaaatttaaaatttctctaatggcaaagtcgaagaacaatgcaaaagcttttttggtggatataacctgagaggagagaccgatgtacaaaagtttttttacattgttctttgacttcgccatgaaaaaaattatgagtctcaacatctgtttttttgttttaaaaaataaaatattaaaacaaaacttttagagaagcaacttttaaaaacttttagaaagagaggaagaaaaagagagaagtgacgaaaagaataatagtattttgacaaataattatattaagaaaataaataagaaaataatattaaatatggacataaaataaaacagtgacttattaacaaaaatgactctacataaactcgtttttaatacttctactgaagcataatttttaaatccaatccaatccaatttttcaccaattttcattctaaagtaattttagaaccaaatacaaattattttttatagaaaaacttgtaattatcacaatcattcatcaagacatataatactaacatgaatcatctaaatctcacatcctaacatgtctctgatactaaatgttagaaatttattttatcaggatcttatttactattcatgtatgttaaattaaggctaatctaacatcctaacatggataccctaaaacaataaaataaacacataaaaaatttaagaaaaccttacattgattgcaacaaaataaattgtctccttccgttcaactctctaactcttgttcatttttgtcacagagtattactaagaattaaatctgaatcttttttcttcaattgtgttcatcacaatcttttacaaaggcttgagtatcaacttgaataatgtgcgttgattctcaaaacccctgagaaaaatattgagaaagagtttagcatagtaaattttgaattataagaaagaagagaagagaatcgtctcacattgagttttgtgagactagagttatgaaacttaggttaattctctcttctcatcactttctttgtataggcttcacttagggttagatttagataagatgagcttaaaataaagaattgggttgaatctaatcctctaggccgaaa

SEQ ID NO: 15697 - DNA, 14900 bp, Cannabis sativa
  modified_base (9835)..(9845): a, c, t, g, unknown or other
  modified_base (13907)..(13927): a, c, t, g, unknown or other
  modified_base (14848)..(14875): a, c, t, g, unknown or other
tttgataaaaacaaacaaacaaaagattatacctattcagcaaaaaaaaaattataccttgtcacacatttaacagaaatgcaaagcagataaagatgaggttgttttccttacatacattaaaatgatccaagctttgattgattttgtatttgtctgtttgatctcagattgtttaaccagctgaagttagttagggtcttattcacttaatttgataagctatcatatgatcatctttatgcatttgagttcttctgtttcgattactcatcttctgctacgttaattggttttattttttattttagatgagtggaagaattttttggaacgaattggtcgggccgattcaactgctgattcagaattgcagaaaagttcaagtgatgctttggagcttcggttttgggtatcttaccggggccagactcttgctaggactggtttgattccttgctattactaccacatatataaccctttctgttttatgctttttgatttgagggtggcttaacctctaatcatcaatcatgtacttttatccttttccagttttttttttttttttttttctattaagaaaaaagaaatcctctgatttggtgtaagggtttgaatcctctcttataaatctttgtttacttgtatttctaactaatatcagtttcttttcttgtaatttatttaagagcaaattattagcagaagaatggctttttacattacttttttctgagattttgatttgtaattgcagtgcgtggtatgatgtattatagaagggctttaatgttacagagttatttggagaagagatcattgggaggtattttcttttggaacttttaggtgcatcacgttccttttttggataaaggacttactgccactttgtcacaattttcttgtacctgtagttgatggatattctcaaggcagcatccctacaagtcaaggttttgagttgtcgcgtgaatcaagagcacaggcagatataaagtttacctatgttgtgtcatgccaaatttatggccaacagaagcagaggaaagcaccagaggctgctgatatatctcttttattgcagaggtattgatcctttgaaagattgtcaaatcttgtcttggtaggataacgatatagaggcctctttattgtccttatgcctgtgcacatagagtttatatacaatttatatatatatattattgaagcactttctaggagaaactaggaaactaaattttgggttgcaacatgggtctacgaagctaaaggatttgagggatattatctttcctagatctcattagagattggggaagttttttgcatcaatcattttgatattgatttgtttacattaattctaatctctttttttcactgtttaatacaaataagttttttgttttttgctcaaagtatgtgttatctctgaaaagaaataagcatattaacatttggaaagaaaatagaagttcaaattgtatgttagagagtcctaaattttagaaattttttctgcatattacagtgttacatgtatattttgacagtagattcagccttttatttaagtttagggtcctcaaaagcctagttttcacagtgatgatgactagctatgtagttgtttgaaaatcaagcttttaactagtaattatttgttttgttctttgatttttacataggaatgaggcacttcgagttgctttcatacatgttgaggatggtggtgctgatggaaagggtccaaaagaattttattctaagcttgttaaagctgacatacatggaaaagatcaggtaaatcattgttttcagttgctggttttcttgtttgttaatggtagctcatgtactggctgtaatttgaatgagacatatacatgtcctccccttgagcccgaatatctttgggaggcaggacactcttaaaaattgttaggtaggtctctttgtgccattgaattaacctcattgaagcaaactatggcatgcccactcgacctatccctcttggttagcttgatattactttgaaaatgggttgtcaaattatttggtcaaaagccaacatcaggcttataaaatgatttttatgggtttgacactaaattatttgctagtaaattatatattttttcgtattctttttccatttatgattgttaccatggctttcctcctccataagtgagggtgttttttattagtttgagaggtctctcatgacatgtgattgtcatttcttttaaataacaaaaaagatatgtttgaattgatgtgccattctaaagtgactgaaatagactttatcgtaacacagtactttgttaatttgtttacacaagtttttccgggaaaaaagaaaattgtttacataagttctacttacattaaacatatttatatattttattttaattctaatatattttattttaattctaatatatatatatatatatatttgtcttctaaaatttgtaacaagaaaagataattaaataaagattattactgtaaacaatgaaaaagttaccttgaaagaatgtgaaagttcaaattccttgctgtggtcatttcctgtgtggttacctttttactgatgatgtgtgtatgtatttgtggggctgatgtgtgcgtgcattgcaagttctttcctttatctagtctttttaaatggcttggaagagctttccttgaccgattttgtcaacatgttcatttgctaatttttatatgtaggaaatatactcgatcaaacttcctggagatccaaaacttggcgaaggaaagcctgaaaaccaaaaccatgccatagttttcactcgcggggaggctgttcaaactattgacatgaatcaggtgagatatttgtacgtatttaattttcacttggttccattagtatctttatccaggttgtgtgaacataatttttgtattgttggtttgtacagtatgttgtttgcaattagtattgtatcttatccaacagtgaaaacaatgagccaaattattttgttttgtaggacaactaccttgaggaggcaatgaagatgagaaatcttcttgaggagttccatagaaaccatggcctccggcctccaactattcttggtgttagagagcatgtcttcacaggaaggtttgactggattctttcaaatgtaattattattgtttattttttctttcttctccctgatagttgtcttacattcttgttcatacagtgtctcatccttagcatggtttatgtcaaaccaagaaaccagctttgttactttggggcaacgtgttttggcgagtcctctcaagtaagcagcatttatttgcatgaaaataagcatgttaaaaagagtgtaaaacataaaatgaaagtttgtttttattttgtttcttgctattggtcctgcaaaattattttatttgtagtgctttcataatgtctcaagaaagtgattattatatccagatcttcaaataaaacattccgaaaaagcttctaatatttttctcttataccttgggggatgttgactgattacttccattagtgctaactagtattgttttgacaacatttatttgcaagagtaaaatctacaatttcatttttagcgtaattgatttccatagcaacacaatgtattccttttatctctatttttttcttgtgttttttgatgattggatttatttattttgttgaacctttccattagaaaatgactcctgagtattaatactacaaaaaataagtacaatgtgggtgtttttgtaaattatatttattgttattattattgaaattcttgcagagttcgcatgcactatggacatccggatgtatttgaccgtgtattccacataactcgaggtggcattagcaaggcatctcgtgtaatcaacattagtgaagatatctttgctggtgggtgtgattgctttctatgtctgagcctatattgacataattgatttaattttcctgcaaatatctaatttgtctttgatgaaaatgaaacactgcagggttcaactcaacattaaggcaaggcaacatcacacatcatgagtacattcaggtttaatatactatttttgtctgcctgtttcccaccgatagattccgattccagtttattgatacattgctatgttcaggttggaaaaggaagggatgttggtctgaatcagattgccctgtttgaaggaaaagttgctggtggaaatggggagcaagttcttagtagagatgtttacagacttggacaactttttgatttctttagaatgtgttcttacttcttcacgactgtcggtttctatgtttgtactatggtgagctttctctactggtctctattcgtcagttgcctctactttctagctgctgtaatcttcttatggtgatttctacttgatgcagatgacagtgctcacagtgtacatattcttgtatggaagggtttacctggtaacttaaatatccccttctgctttgatgtccatgttatctaaaattattctgtacctttggcttactaaagatttaacaatcgtttaataatgtggtgttgatgaaaacaatatcattgaagttctccgatagtattagtatgggaggttcctcaattacttgggggacactatgattttaaagtttgttatttgcttaaatgatggcctacttttttaataaggaagaaattttcattgaattgatatacattgagttgatttgtttaataatatgctatgttaagacaaacttaacagtgtcctggataatttctcatcaaaattttgtggatgatttactttgacgaatttttcttaagttaacttatggaggattttttggccaatatatttaggctttctctggacttgatgagcaaattgcaaagcaagcgaaaaaactgggcagcacagcactggatgctgctctaaatgcacagttcttggtccagattggaatttttacagcagttccgatgattatgggttttatacttgaactgggactactgaaggttagtccaagtcatatccagatcatgttgttaattagttttcaaccagtttgtatgattatagtgaggctgcttttcttgcgtggatggtttttgccgattctattgtattttaaaccataaatagtttgtttatgttaaaaaaataaaattctacaaattgatttcttagttttgctgtaaatttgcctggattataatatttggttatcaacacatttgaggtgaatttggtcattaatcatgctacatctgcaactgcatctgcatcaagaccttattctatattataattgtttttttaacttgttgagttgctttctattctaattctttgtgctttttctgaaatatttgcaggcagttttcagctttattacaatgcagcttcaattatgttctgtgttcttcactttctcattaggaactagaactcactattttggacgcacgattctccatggaggtgcaaaggtatgtatttatttgagactgattttctggttaatgaatatcttttgtacatggaaacaaaatgactcacatttttattatcaacagtaccgggcaactggtagaggttttgttgtccgccacatcaagtttgcagacaattacaggctctattcaagaagtcattttgtcaaggcgtgagtgttcattactatgcttatagaatatctctctcctatgatatatataaatgatatgtaatttcttacaaactaatcttcacaggcttgaagtggctctgcttctcatagtctacattgcatacgggtatactgctggtggggctgtttcatttgttctgttaactattagtagttggtttctggtcatttcctggctctttgcaccgtatatcttcaatccttctggttttgagtggcaaaagtaagtaatttactatatttgtttgcatatgtgttaatttttttatgatattctagctgtgttattaaacttttttatgcatggcaaaaccctcgattaacagaacagtggaggattttgatgattggaccagttggcttctctataagggtggtgtaggagtgaaaggagatgatagctgggaatcttggtgggaggaagagctggtaccaaactttgtcatattacaatttgctttttttatttctgtttttccagttccagccatactgagacccaataacttttcctttaaaaaatttatatttactatatctattgtgctgcattagggattgaagagaacaaaacattataaagatatataattttttttaatagtgattcctttgaagaatccaggagttaaatagttactttgtgccatttccaggattatttgttttgaatttgttaaacataaatgatcttcgcagctaaggatctgaatggtcattttgttgatagaacattttttatttattccacgttatctctagttcgggaatgatgtgaatgattcaacgttatctcattcatttgagtaatttcatttgttcttgctgcaggcacatattcaaacactgagaggtcgtatattggagaccattttgagtttgaggtttttcatgtttcaatatggcattgtatacaagctccacctcaccgccaaagaaagatcacttgcggtatgcttcatgcccctcacccccacacccttttaacctataatgtacttagtagttccacctattgctttatatgcatgcagacgttaatatataaagtagttgaaataggagatttacttctttagatttgggatatgctaatatttgcgggtcctaatcctcgttgatcttgacaacttcttttgttatcttgtctagatctatggattttcttgggtcgtgttacttgtcattgtcatggtgttcaaggtattattcttctctcttttctccgcctacttttcatatatgttgtgaaaactcaactatttatgtccttttaccttgcaggtttttacctacagtccaaagaaatcagctaacttccagctagtgcttcgatttacgcaaggcgtcacatcattgggactaatcgcagcactagctctagttgtcatatttactgatctttcgataccagacttatttgctagcatccttgcatttattccaaccggctgggcaattatttgtgtaagttgtttattttgatcattgtggacatggatgtcttctatattgttttaattgcagcattcaactattttctttttgtttgtgccaaaaacacagctggctgtgacttggaaaagggtcgtctggagtcttgggttgtgggactcggttcgtgagtttgccagaatgtatgatgctgcaatgggtatgctcatctttgctcctatagcattcttgtcatggttcccattcatctccacatttcagtctaggcttcttttcaatcaagctttcagccgtggcttggaaatctccattattcttgctggaaacaaagcaaatgtcgatgtctaatcagtttggtcgttcttgccttttttcgaattgttcatttgagtttgagatcattattctttgttgtttttacccttttagttgcaaggattagtcattaaggtgctgtagctgtatatcctgttgtacataagctctaggctgtttctgacatattctcatttagttttaatttgttgatttgttttgtaatctaagatgatcacaaattgcaagatctttcccactttgcaattgtcgagttgtgtaccattttttgataccatatcaggctcacttctcctatttcagtgttcttcgatagtgtaaattatatgttgtattagaataattaattactccctttggtattattgaaaattttgacactttttatatttatctacggtaacatgcttaagttcactaatgactaatttttagcatgttcattgttacatgatttcgttttcgaaaactttgaatagttagtgttggaaaagaggtttaaatgtgatattaagctcataatggtattggagtatgaaacgattttattatttcgaattttttttcgtgttgtagtcacacaacacaatcaaagttaccaagagtctaacacagaaaacaataacaacaaattgtagaaactaagtaaacgaaatggacaaagacaagtaggattctttgaattggtccattcttgttcctccaagaggttctgctaataatgaaaattctattacagtctaatctctggtcaaaggaaaaccaaaggagtagaaactaagaacttcgattctataactgttttacatccaagaagttgaattaacactgaagcctcacaactcacatctcacatactatacaaaactctcatctcacttaccatacaattcattctaaatgtttcccaatccttctagtcaaaactccaagaaaatttctcatgctgaacccactagcaaattcacatagaatcgagtggggacagtcgccccctgaaacaaaaattagaaaaaaaatgtagatgtaatttaattaattacaacatatatttgtaattaaaagtgttatatactaacatagtattagcttttgtacgatgattaagctattttacatttatcttaatagtcaagagaaatctcaataatatcacttttttttttgttagtttttgaagtctacttttatacctctaccaaatttttttaagcaaatattttattgttattattttttatttaaactatatttaattgtataaaaaaatatgtttatattttgaacatgttatatcatatagaaaataaaatataccctattttcttactataaaaaagactccctcaactaaaattctttcgccactggctgaatctcctgaaactaacaacctgaataaattggtgacatgctgctctataaaagctaccagcaatacctttccaaaactataacagaagcttaactaacaacaaaacaaactggtatcgatgtttgttaatttcaattttttgagaattatatttctataaattccaccttaattctcgtaagactaacttcaacaccacttgaatgactactactatttttatccattgataatgttcataaggtttaaataatattgaaacttatttaaatttaaatatttgtacctatatctacaagaattttttcactgagaactttctcaggtttagtagtccattctttaattttattccttatttaaaaaaatctaactgatttagatccaatctaaatttgtgcacaacttttcaattccagaattaagacttaaaaaggaatcaacatttgatccgttacgaatatcagaattctataattgtaaatcatgttcccaaccatccacattattagattctcaaaacagaagttgtaagaatcatctactttgagaaacttaaaagagtaaatcaaggaaactaataacatgaacacgagttcatgattactcaggatttaggttgatatactattgaccatcattatgatataaattaggtctttatagtaaacactaagtttgataaaggcatctttactcatatcgtttcttgtcatatataatctctattatatacaacacattcacttagatgtcatgctatgcaccaaataacgggcatcagtgaaccgtactagcaactattgattaaaaattcttaaactttaatatgttgttgactattttattcatggctaaatgatcttaattctctgtacaatacaagtcactgactcatgtatgaattatgaattttctaatatttatatataaattannnnnnnnnnnatattaataatttaacattcatgcgtatatcaaaatgttaaacttttattcataatcaaaactatttttacaaacttttacagggaatgaaacctaacactaccacaagtgtgggccatattttaaagcctaaaattaatttctcaattttatcttaaataagatttattatttatttcacaatcaataatagttgattaattctcattaatctcttatttcatttgaattaaataaatattattaacccaaaagctttcccttatgatgtagacatcaatgtttgatgcgtggcaagaaagatgacatcgcggagttgtgtagtctcgagtcatagcagttgacctaggaggggtcctagccttgcgcccaggttgactgcgggaactttggggtggaagtttggacttcaataactcatttccaactcactatctttcagtattctgtaccatgaagacatgaagcaattaaatctaggcccgagagctaaaattacatgaacctgcacctagatgtcaacctaggcacttagggttcaatttttggggccatcttagtgaaaatgggtcaaacttttacattgggacatgaactaaacataccacaaacatatttgaggcatcaaatcagatttagaaaaagttcatttcttagcactcggagcactcggtgcccgggcactctccaggcacctagcgcccaggtagacaattcgtcaatctgggcggcttccaagtattagatcgactatttgacttttgcatattcttgtcttcatcaaaaacgaggaaataagtactttcaaagtataaacaacattccttgggtgccagaaacaaggcctagcacccaggttgacacttggggctggcccagcgcccaggtttacatttcctcaacctgggctgattctgatgatgttttctgagaactcttctaggaatattctacgtttttggtaaagattgattcaactacttctaaggacgaaacaaaactttcaaggggccaaaactgggacccagtgcccaggttgacacctagcactgggcctagcgcccaagttgatatattgtcaacttgggctatttctaatcagtttcttgaaaaggtgttctgagaattttttccatcataaaaaataatgaagattcaagaaaactcggggaaaaaaccacaaacctgagagcctcaatgctgagccgagcgcccaggatgacctggtgcactggttttgatctttcaaaagccaaatctgatctaagcattttctccagaatagtaaaaaattggggtaggagacgttgtcctcaagttcaagaaccttggaagtatcaaaacgacatcttaaaagctctaaaataagcacccagtgttatgactgaactttttggcagggtttaacctggacctgaccaacctgcccggacccgacccagccaacccatttgtttgggaaaaccagttccctacgggcaagttgggtccaacccggtcaactctttcgtgcgggttcgagtttaatttttgctaacccgctagtttgggtcaaactcgtacccacctatgaacccgactaattttttttttatctattttcaatttaatatataacataaaataaatattatattttttatataagattttagtaaaaattttatgtatatatgtaacaatgaaagtaaaattaaaatataaatatgattctttttatattgttttactcttatatattttatctcatagattggagatgaaaaatttaaggttatgtatgtaatatgtatatgtatactataatagtttataatccttattttatagaagtttatgtcttatatcatgtgaacattaaatttataaatatttttttaatttagacatttttaaggatatgaatatatcacatgcattgaatatggtggacaataattagtaagaaatgtatgaatagagtatgaagtatggactttgaatttttagtcacaatttattgtgacacttttagtttttattatcatgttcattcatttcatcattcatgatttttatgaacaatgaacataagtttgacgaatgatttgtttggtttttgattatttgatttacatttctactttggattttaaatgtttttttttctataaagaatttaggtgataaaaaaatattaattgagagttgaccaagttgaccaggccaacctgtcaacccgatcccacaagcccaaaactcacgaacctgatactatttcacgggccgagtctatgtacaattttttgacccgaaacccgcaaactcgaaacccgatcaacctacctgatgttaaaccctacctagcgcccaagttgacaactggcttggtgctttgggttccacttatttgattttgattatgtctcgatcgtttgtctagtttttcacagtgactaagagccatgaagtcgaagaagtcaaattcacaactttacatttctcatttccaacatgggaaaaccactcaaaaatagagttttaagtctcttatttctgcagaataacatctccgagaactagtgactagctttgccataacatgaaaacagattaagtgatgttaaaatatcacttaagcatcaaaaattacatcccgggccgttttctcactcacccagcgtccaggttgacgttggatgtcaacttaggtgctaggcctagaatagtttcagtaaaatgaccataactcactcaatatttatccaattgatgtgattcaacttgcgtttcaaagctattttaatgctctatcaagtcatgtctaatactttaatatcaattctgaagttatcgactctaaatttcccccaaagggagttacaaaaataactcacaacttacctggagcaggtcccgcaatcacgactcgggctccaaaaattgacgatcaacctcagaagttaatttttacatttagatcatcatttacagtcaaaaatagtcaatttgtatttttttttcttcatatttttagattattttattcctattttcaaggacctctttcacctataaaaagagagttcctttagctcattgtttatattcaaaaaaatacctctaaggtcagagcatctctctctagaaattaaagcttaaatacttagccatttttctgtaattccatcttgtgaaaataaaaactcgaagtagacgtagctccattgctatagcgatacagagggtgaactattataaattgatgtgtctctctacttatacttaacaaatattttattctcgctaatctagcaagcaggtgtggtttggaaatttttctagatttctcagtcaacaaatattattttacattagaataatgtacttctctctcttaatattatttaataataatattatatttaatagattaatataattttatcaaataaaactaaatagttaaatccactttaattactcaattcataattgatataattatacaaaataataatttatacaaaattactatttttcccttaagaattatttcttatagaaattcattctttctcaattcatctttcccatgtacagtattgtatggaggtgatatgggaactatggacctatatttcaaatccccaataaatacttgattattattgaactctttaataaaataatcaagtttattaattctattattactctgctataaatatgaaattacactctttgacaatataaaattatatttacagaatttttacttgtagttctatgatataatcaatataagtagttcatcttccaattattagctcataattagagctagtcaaaaatattattttacccttctaattatttcttgaattccttatgtgtcattaatttaatgtgaacaattaatctataatctcattatagatttgaatccaactgttagcactcctgaaattaacatataagaaaactaatattctatcatttcgaaaagcttagattctattattgtatagtatgttcccagtcacttatgctattaagttcccaaaatagaagttgtaagannnnnnnnnnnnnnnnnnnnntaacgagtgaatcaaagaacttaatgaacacaaataggagtttatgaatacttaggattaagactgatatactaatgatcattgttgtgatatgaataactcttttatgataaatgacacgttgctagaagatgttagttcatattggtccagtcatgcataatcaaattatacatatagtacttttactaaatgtctatccacatatgtaatctgaatcaaaatcacacgcactagagtatagtgctcaaataaaccgtacttggtgattccatattgaagatttcatactataatgcactaccgacttgttttattcatattgtataaacttaattctcttgcacttccttacaagagcatacccactctatatgaatatcaaatttttagatatttattaattatatttctataatcaacatattcatttatctatcttatactagtattttatgtattctctaatatattatccattacatacttgctttagggcataaaccctaatagtacactcactaaaggaccatttcaagacacctttatttgattgcatctcagagaatatttttgtccaaatttttttcataatcgagtattgtcgttatttaaaattgcctattaaaaaaatttaataatttggagtgccgaaaataagattcaaatattttgttacgtgtgaacctgttttttcttatacacgtattaagtaatagttttaaatttattttcggcaatgtgaactattcaattttttaaaaaaataacagattgtccataaaaactacaacgtacgtgattatgaaaaaataatctaaagggtatacctaaatgtcatgctttaaagtgaaaatgcatgttattatatttttggttaatgatttctaaaaatattatttatgttataaaataatatannnnnnnnnnnnnnnnnnnnnnnnnnnnaagaagaagatgaagagagaaagag

SEQ ID NO: 15698 - DNA, 4196 bp, Cannabis sativa
aataaaattaaaagaaaaaaaaatgaaaaacctatacatttgaaaaatgggatcaaaattaaggtgactttttatcccagttttttcataaaaagtagaataaaatggtaccttttagttttttcatcaaaaatgggattaaaagtaccattttattctatttttctctaaaaaccaggataaaagggatatatactttttatcccgagataaaatgtcgattttcatgaaaaaatcaggataaaaagtacccctttatctcgattttttaaatactttttatcttattggcctatatcctggtttttattttagtgaaaccgggataaaaagtcttttcttgtagtagtgtatctaaacgagcaaaatttttatttttaattttaattgttattaatattaccatgtaataaaataaaaaaaagcatcagaggcgtattggtttgccgctactaataatgtcaatttatgtgtttgacactattattagcggcgagtgtcagtccgctgctaatactcatttttagaaatattattagcggattattactagcggaccccaccactattactagcggaatccttcacttctaataaccataaatgctatagtaagaaggtttcacagtggaaatgcaatttgagttggaaaatattgaggtagccttatatgtttgcattgtgaattagatggaaaattacttataaacactcttgagagtatatcaattcatttataattataagtaattattataaacacttaagtttatgaattccctatttttcaaaaaaataaaattgcataattttttttaaggacaattgcgtgatgtttgaattaaaataaataaataaaaattctatacgttcaatttaagtatatatattaattttcttaagaaaatgttctatgtcgactgaatttcgatcggaggaaaaaggagatgtttttattaaatataagaaaaaacaaaactgtatacacaaattaaatattaaaaaagactttattttataaatatatatatacattttttgaaatggactatttttttttttttttgaacaaaaatggactatattttatataagagtagttgaaaagacaatattattaatattaatttttttgaaaattagaatatactcatatggtatttaataaagctcccaacttataaaccatgccctcacatttgggtgatatatgcaagtttacaaataacatgacatgactatttgtttttaatacccttaaaaagataagatatataaaaatgaatttttcaaaacaaaaagaaattaaaaaaaaaaaataagaaagagatgtgtttattttcaaatctaagaaatagaaaacattttagcacaaataccacacctctgatctgttgctagtactactactatttggtcttcttctaaagtctcaacttcccttttttaatgcctagtccattgcatatcattcaaagatttgacacctctctctccctctctttctcatcctctctcttttctgttctttctctctctataatttttcttgatttatggccaaaggaagtggactccccattgattcagatccaattggtttctttatccataaacctacagtactcaactcctttgaagaagacttcaacaacaacaagaagatcagtaataattctattaattccatggatgcaagcagtaccattcatcatcatgaaaggtctcctccacatcatcaccaccatcatcaaactcttcagttcccagtcaacctcaattacacccaccacaaagataacaattctccagagccatccgatgagaataataacaataataatcggacggtcattatcaacgagatggatttctttgccgagaacagaaaccgggatatcaagccttctccctcctcttatcatgatatgattgatcatcacaaaagttttaatgaacaaattgatatagacatgaatgtaaacgtgagtatgtatacataattacattttttttttggtaatataatatatatataaataaactaattagttttaattcatcaaattatagactggtttgaatcttctcacaacaaacacgagtagtgaacaatcaatggtagatgatggtgtatcaaacgacgcagctgcagaggacaaaaagcccacaactgaggtatgtatatataaatataacatggattaagatttgatgtttaatatatgaataaagtattaattttgtatcatcaattcaataatttcagctggtggttcttcatactgagtttcaacgagtgaaatctgagaaccagcgattgaaaatcgcgcttgaccaagtgaccaacagctacaacgctctacagatgcagctatacataacgcaaactggaaataagtccgatgaaaaagtattagaagatggtaataataataataatgatcatgatgatgatcaaaatattaatcttacaaacggtactaatattaatgaaggaaaagtacagccagtgttgccgaggcgatttatggatcttgggcttgccaataatggagaggcagacgagacctcactgtcttcatcggaagaaagaagatcggaattggtgaaaaatggacacggcggagatgatcagatggaaaagaaggaagtcaaccgagcattaattgggagagaagatagtgatccagatcaatcgtctcaagctggttgggttccaaacaagttgcccagaacgacgtcgtctggctctgtcaaagattctgatcaaactgaagctactatgcgaaaggctcgagtttcagttcgagctcgatccgaggctccaatggtatatacacacgtcttatgtattatatctaaattaaattggaaattatattttctaattatatatttttttatgtgaatattttttaatttattatttattgaaattttagattgctgatggttgtcaatggcgtaaatacggccaaaaaatggcaaaggggaacccatgtcctcgagcttattatcgatgcaccatggctgctggctgcccagttcgaaagcaagtaagttaatttactttcgtttaggtaattttgactactgaccttattattatttactatatttagtaataaagtatatgatgatattttaaaattaagtcacttttgttttgtatagtaattaaagtgtacacacagaaaaaaaaaaaaaaaaaaaactttagtgacgctttttgtgctcttttaaaagaaataaattgaattactatttacaactttcattattaatttcattacgtggggaatcctaagctaagtattgctaaaaaataatgataaatttaaaaatgaaaaataaatagtctgcaaatcgcttttcttttcttcttttaacgttcagatttattattaatttgttcacacatcaaagtctccaaactgaaacattaattgactaaaaattaaatacaagttgttacaattataaatatattcattgacttaactacactacaattataaatgtgaaggtacaaagatgtgcagaagatcgaacgatcctggtgacaacatacgaaggcaatcacaaccatccattgccacctccggcaatggcgatggcgtcgacaacatcatcggccgcaagaatgttgttatctggctccatgtctagctcagatggcataatgaactcaaactttctagcaagagccatgcttccttgctcctcaagcatggcaactatatcagcctcagcaccatttcccactgttacattggacctcactcaatcccccaacccattacacctccaaaagccacctcaaccgccgcaattccacctagctttgcagcaaaacgcaagctcggccaccacagctgcagccgcagcattactgcctcaaatcttaggaggtcaggctatttacaacaaccaatccaaattctctggccttcaaatgtcctcacttggacaagaaaatagtttggctccaacaacggtggcagctcgtttattaggccaccactccttttcctcttcttccccgcctcaaaactctttgagtgaaagtgtcaatgcagccaccgctgccattgccgccgatcccaattttacagctgctttagccgccgctatcacctccatcattagtgggactcattcgaataacgtgagtaacaacaataataacaata

SEQ ID NO: 15699 - DNA, 3621 bp, Cannabis sativa
  modified_base (3503)..(3504): a, c, t, g, unknown or other
attttttttttctaattcaagttcttacaaattattattaaataaaaataattatattttaaatattatgacaaaaaatttattagaaaaaaatacccatgattaaaaaaaataataaaaataaatattaaaattaacacaaaatcacgtacgaaattatcttttaaagatattaaaaaatgatttggagtttaatttttctactgtaaaccttattcttattattatttttaattttagagtgtaattataaatttttttgggtgtaaaaaaacttttttttttatattgcaatattaatagttttaagaaactgcaatatcgtatttttccataatgagatacaattcttcataccaaatactcgtaataataaattactataaatatattttaccaacctcttggtgcaaaatgcaaccacataatcggttccggtgcatgtaaatatactggtgggatcatcataagcataactgtaagcattagggcatgcatttttgaatttcttggaatagaaggtaggttggcacacaacagggttcccataaagccctcggcagcaatactcatcggtatcgaacacgtcacacgcgctccggcaggcaatcgttttcccattgctcttgaccgccagctcgttagggcaactggtccggaggtcgccatcacatcccgccacgctgcaatttccttgcccgtggagtggtgtgacgactatgggcaagttgaaaccgtcaacaagactcacatcataaaaatcaggagatgctaaggtaaattcagcaagtgtggccggtgtctttcccgaagatccacacttaagggcatcgccgcaagcgcctgtctcgcactttcctacaccgctttggtcgaatttgcagccagtgcggccccaaattcggccagaccaggccacgggagctgtgaagacaatggattgccctggtttcaatgcgaatcctccaccgttaaagttctcgccgggagtcactcctggccagattgtctctttgcagttgtttattatggtaaacattctagctgattcggataggttggctcctgtcaaataacaaaaagatttaataattattaagtttataataacaactaattgtcaaatttggattaaaagaaatacatacgtaccaaaagaaacaatgagaagcaaaaaaagtgaaagaacattcatatgtggagtatccatgtctctcttgctatttctctatctatagtaatacgatcactttgtaattagtaaagtggttaattataaaggaggaattaatggaggagaaaactaagcaaacgaatcccatataaagcataagagagaagaagaatacgtgtgcagagagggatagtaatatttacatcccaggaaccttttctttaaaaactaatatatatatagttatgtatacaataatataagctatatatatatatatatatatggtcattcttattcttttcctagtcctttcattcaagtttattctggttccaattccatttctatcttcttcttccaactttttgatttgttatatatatacattaatccaatattgttcgtacattggcaggcgtattatacttactttcactagttaggctaccaatatatacgcaaatacacataatatatatggaaattctatggttgaacccctaaaaaaatgacagtactatttttttttttttttttttttaattttacagttttacgtttaatatttttttttttacatttttacgatttttctataaaaacaacacgaaaataataagaaaacttctgtaacagaaaaattaataataacatacaaacaaaatcaaaacaacaacaaaaagtagcatatatatataagaaaaaatcaaaaacaaattaacaagagtacaacataaaaagaccgtatataaataaaattataaacaatatttaaaattccgcgtacaaccgtatttttgtaatttttttattatttttatgtatttgtgaaataatccaaaaaataatatatatctcttatgtactttttatatatttagataattttaatttctatttttttatatatgatagtgtacattgtattaaaacattttgtatacttttaaaaaattcagagtaatttaacgtgctcaaaatattaaaattgaaacatatgatgtacgcatgcttcttttattttatatgcttgcaaaatagaatattaaatcatacgtataatttattgtaaactattcagaatttttaaaactttgcagtagggtagtatatattttgcatgttgtcgtattatattacatatctaattgatcaaccctaatacaactcatataaattttgtgtctagaatcttaatcctaatccgacctattgtgtttccgtactactaacacatatcatgctcatgtgtcgattatatttagattttgatcacatatttaatttatatgtataaatatatatatatatatatcaatttatttggctcatgtgaataatatagtaaaaatatatttatataaagttgcattttagttgaattgatttattaaataatttataatgaattatatataataaataattttttaatattaagtataaataaatttatttattgagtttttcaaaaagtaatataataagagcttagaaatagtaaaatacaataatagaggagataaaaattttacgtggttcaggcgtcaatgtgccttagtccacaagttagtctattggtcttaataggcttgtatgatatttttacagtgcttatgcatgaaatcctaactctgtactcttagtttcttttgaagaagaaaaaaacttagagtaattttaatagagcttcagctatcttgaattcgatcctcccttcatatggaaatagaagggtatttataggttgaagagcggatatggacacatacctatgaaccgcctaagatttttgcaaaaagcccactaatagggtacaatacatgcaaagagctaattattgggccccttggaagctattgtgctcgtgcgttgaagtagttggatcataggggaccaccattcatacaggatgcatgtcgccaaaaggtttaatcctttaaaagtaaatgtctggaataattttctggataaaaatcgcgtactaccatggcctgtcataggagacaagatctaattgtgtcagaaaagcataattatcgctaggtgttgtgctatagaattagatatacgcaagtgcacgtagtcacaaacaagtaatactatgataagtaaaagagtatcgtctccacagggattgattagaaattaattattcaaaaatcaatattaaacaatttggttaaaacaaccaagaagtgataatttgaactaggctaaaaactaaataagaaagtaaataaaatgagaaaagaaaatgagcaaagtgatgagctagaacgattaaatccccctagaatgcaaattcaatgtaaatgtcatagannaatacattagtaattaaattttgtcatccgaaaatataaataaacatataatttttccaaacctatatgttatgggctctcaagattaaattaacatattcctatgcaaatttagac

SEQ ID NO: 15700 - DNA, 12279 bp, Cannabis sativa
ttttttttttttttttgtggaaagtttgtggaaagttaaaaaaaaaaaaagaaaaagaaaaattaagggattgatgacatggtcgtatacatgtgacataatcactataaggggtaactcctattggagatgagatgcaaaatagcgatgctctacttctatacataacaaaaatttcatggtgatgaactgtggtcaattaatcaggctcacaacttattatttgtgttgagttaagtggagttacacagctataatgggttgatttacaagagttagtaagaaatcttacaaattcaaatctgatccaccatttcttctaccaactgcccaaaaatctttgactccaactcttcaccaatgctcttaaaatcttcttggttcaaactccatctttgtacccaattcgacttgaccaactcagtctcactcatcctgcaaatctcatccaaaatatccgaacactcttgggtatcatcatggctctgttccttccttgaccaaagatgttttctctccgtctgtctctcctcactaatcaaattattgtctctacgtggacacaatttcttgcggtttttaatctccattgatagtttcctccttgagcttgaagttgtcgaactacagtagtccacttctgttactgaaaaagaaaatgcaccaaccccattagaggaatttgctagtattttctactagagagaagtttaaccaatagtaaaggacatacttaaccataagctaaattcaaacttgaacttagaaaaatgtgtagtggatttattacctgatataggaattttgggatcaatatggaactgcccacaatctagaactgaaacagggcttgcatcttccgaggtacaccgctgatgatcaggctgttcttctactgtcctaacaccttgaatttttttaatattttccttcttcttgttttgatctgaaacgacttgtcgtttcacgttattattagaattatctttagtacttcttcttcttcttcttatattactattttgcaactcttttccattcaagtcacgcaaaacttttcttccttcttcttcgccattttcgactccttcgcttttcttttcctttctctgcttcaattctccaaaaccctttttgcgtttggcctccttcggtctagttccttttctctcgtttacattctcgaagctgagtataaaaaattcttcactttcgagctcaagaaactccggcatctcacgaaatgacgtcgtggactttaccctccggtgctttgaatcgtccaaacccgaaacccgttcggctgaattcatcgaccggctacgggaaatcgaattttggggtctctgctgggtccagtccgaaccgagctctggcaacgagtccaaacccatcagcctcgccacgagcccaggtgttcccggagtcgtaatagcttttgaatcaaactcaagaaagttagtttcttctgtggtttgatcagaagggtgcgtgggaagagtgccggagcagagaattctgcgcaaaattccagctatgcatccggcggtggcggcggtttttgaattgtaaattctagtgtcgaaagaagtggatgatgaggatgataatgaaggggaagaagaagatgatgataagaatagcttcattattactgagacagaaatctctcaagtagtgaagtgaaagaaaagagagagaaagaattgggctttttgtattttgttaagttcaatacttttgtctttcaactttttaataagatatgttaagaaaaaaaaaaaaaaaaagaaaaagagaaaggaatattagttcaaattgagagaaaaagatgtgaaaagctttgtgaaaacaaaactgaaaaagagagagatttaaaatttggttacaggttgtagtagagtagttgttatagtaggtagtaacagtaatagtaatggaagaaaagaaaacgtgatgagtgtatatggcgggcttttgcttcgaatatgagataagtaaatgttgtattgctacatatactatactatactatatcaaaactacaaagcttttgtaatgtcagtttctcttctttgtttttttatgctgctttgtggcctacatgcactactatctccttaatgattaattaagactcgtaaaaagggacttattattatttgtcttcaagtggatgtgtaagcatattttagtactctaactttgggatatgatttttgaattttctttatgtcatgcttgttatagtctctaataaataaaagggagggtagtttctagttcggcatttagatggcaagaaatgattattgactagtcaagcttatgttaccaagaaagtacttaaaaagagtccgtagaaataaaagatacaagttttattactgacttgaattaattaaagtagagagtggcactactggcaatggttgtgctatatagctaataattttttgctttaattagcggtcattattatgagttgcttctttagttgtgtacatatatgtaacataagataactattacatatagagacacaatagtattatttgctagtaataagtgatcaaccctaaagttataatagtcagtattaatctgttcattattttggcagcatgggatttaaaattaattaaatgcgagtaatgtaaagtgtaacttgtgtaataattgtttcaactttaaagagatgtgggttcaaattcaatgactttaggctgggccagacatgagacatgtatacgattcgttttgggctgtagacacaaaagagtttttttctttgtcagaatgtcagagagttgagagagagagagtagtggtggtctaaaccaagtgattactgaccttacgaaattattttaaagggttttggtaccctagttgttatattgctaacctttttggtggtcaccaccatcaaacactgcactggccaggcctaaagaagagggcaggcactattggccactgcccactgtgaaatgttttcctccgaccgcttctgcttgtatgtttcaatctaacatcttccttttttgctggtaatgcatgccaattttgaaatcagatcttatttataatataaaacaaaaccattcattggtggtgccattaccttacgtacttttaccatatatcttttagtggggttaaatttgtgtgggggccatggtgatgaaaaatcaagaaaaaaaagtcttaagtgacgaaatttgagtcgaaaggctgacatagtattcttggtcgtgaatttgatagaagagaaatactaagagtacttttacaccatgtaatgtgtgcttccttaattagacagacacatttaacagcataccacatttatttaacagtataccccatatcgatctttcatcataatttgttacttattagtaactgttcttctatcgagagatttttatgtattgtgctttgaagctttcacatgaatttggtaaagtactagtgcatgcatatattccatggcaagtagtgaattagaattgcttagcagagaaagtgaaaaaaataattcgaatctcactcctagaaaaaactctccaaaatttcacttttcttatctaaccatgaaacaaacaagtacgttaaagtactaattttttatacatataataataaaaaattatttttatttaatcgtttcaaacaaacaatttgatttaatttgttgtgtgattcacatgtggactaaaggcattgaacatatttttaaaaattttgctcaactccgttagctctcattcctattgggctaattaggatttgtcctagctactccaaaaatactaaatttgaaaccaattcattttagagagataattagaattgtagagagagagagagtgatttgagggatagggatgtaaaaagaaactagttatatgtttgatcctactcactcatgacactactataattataggctttagaggcagtttttaacccttttcaaagtcgatttggtgaaatttgctactaacattgattaaggcaatgctgtaaggtcaaatataaccgatcacatagtatacactatgacttcggttatttaataataactgactccataatgtaatcagaattgacagcattaggtaaaataccgacgtcataatgtgtaaaaattaatttatttttctaattttaaaacttattataaattcagaaatgtaatttatttcaataaaatatttattatttaaattaaattaaatatttattaatttaaattaaatattatttaaattaattttatcactggctaatacacttaaattaatttcatggaagcaattaaaaaaattacaattatattacacaaatattttaaaattaattcaagtgttaacaagttaatatgtctaattaaacatataaaaattacaaaataaccttaaaaaaataagttagggaagaaaaattcttatatatttcatcatcaatcgtctaagccttcgtgaattactagccagtaattgttctatcgactgtcgctctaacggtaataattcaatttctgtatcgtatgtcttcttttcctcaaactataaaaaaaaaaaaaagtaaatagttatattagtgtatatattattgtttgttaatataatagatacgataattaataatgaaaacttacagctttttgattgtttaaataacggttagggtttgcacgcgcgacaatgtcactcatgtattttaatacataaaactacattctcaccctcaatttagatttcaatattacaagtaagtgtcgtttccttcttagactttaggattctattttttctcctgcttgatgtattctaatacctttttttgcatctgttagactgccttccttagtcgcccttaacccctaagctggaagagaggagagccatctacaaatccttctcacccaaggagttgaagtagagggacttgtgaccactaagagcttacgagaagtaggcctcattacttcacatcaagacgtggactatctttctacgacgaaccaagtttaggagtctctctgaggtgattcgaatgaggttaaggaagctatcacaatcatcactgctaaggaggccataaaggcagtaaaagctgatgagcaatggctggcgaattggacaattcccaaaaagcctaagcgagactgaagaactcactatcagattcaaggaggtagtatagaatgagggtgcctcgggagcgaacacctccagtagtggtgaaacacccttttacataattagggctcccactctaactaacttagatgttgttgatcagtgtgaatttgatccatacttcttaaatttagatcgttgtaaattcccttgcaataaatacatagataaagtagattagaattgtagcgagagagagagagagtgatttgagggatagggatgtaaaaagaaactagttatatgtttgatcctagtctctcatgtcactactataattataggcttgacatggagtttttaatcctttttagcgtcggttttggtgaaatttgctactgacactaatttaggcaacgttgtagggtcaaatataactgatgacatattgtacactatgacatcgattatttaataataactgactccatagtgtaatcagaattgatagtattgggtaaaataccgacatcatagtgtgtaagaattaatttatttttttaattgtaaaacttattataaatttagaaatttactttatttcaattaaatatttattaatttcaatgaaatattatttaaattaattttattactggctaatatatttaaattaattttagaagcaattaaaaaattacaattatattatataaatatttaaaaattagttcaagtgttaacaagttaatatatctaattgaacatataaaaattacaagttaacttaaaaaaataagttagggaagaattttttttatacatttcatcatcaatcgtctaagccttcgtgaactaccgccagtaattgttctatccactgtcgctttaacggtaacaattcaatttttgcatcgtatgtcttcttttcctcaaactataaaaaaagtaaatatttatattagtatatatattattgcttgttaatataataaataagataattaataattaaaacttataactttttgatcgtttaaataacggttagagtttgcacgcgcaacgatgtcactcatgtattttaatatataaaaactacattctcaccctcaatttagatttcaatattacaagtaagtgtcgtttccttcttagactttaggattctattttctcctgcttgatgtattctgatacctttttttttttgcatatgttagactgccttccttagtcacccttaacccctgagctagaagagtaaagagccatcaacaaatctttctcacccaaagagttgaagtagagggacttgtgaccactaagagcttacgagaagtaggcctcatcgcttcacatcaggatgtggaccatctttttgtgaagaaccaagtttaggaggctctctaaggtgatttggatgaggttaaggaagctatcacagtcatcattgctaaggaggccttaaaggcagtaaaagcatatgagcaatggctggcgaattggaggagacaattcccaaaaagcctaagcgagattgaagtactcactatcagattcaaggaggtagtgtagaatgagggtgccccgggagtgagcacctccagtagtggtgaaacacccttttacataattagggctcccactctaactaacttagatgttgttgatcagtgtggatttgatccatacttcttgaattcaaatcgttgtaaattcccttgcaataaatacatagataaagtagattacatagtaaagagttccaaccacttccttccacctgtgcaacatcattttaaagtggatgcttttagtaaaattttcttcttaggcttcttctagcacgagactaacataggtcaagaagacattgctctttttgctagggggaatgtcaactatgctagaattaatggttttgatcttcctgatgccttgcatgataatttttaatgaaaatcgtatcctttgccatggccttgtttgacgggtatttttttttttgttttatgcaaattaaccagccaccttacaaatggggttgctaaataggtttctgggtaacattcaatccaggtctaacgaggtttggtaagtcgccagggaaggcagagatatgggccaaaagggccaagctttcgagaacaaatctcaatagccagtacctctggcttcgaatcaagaggctacttctaaggctccgggcacgaaagacttgtctacttccatcattgatctaaccgaacttgtcctggatgtaaaacctctaagacaagtctccttagaaaactctgggggagacaactctgattataatggaccagtcgtgatcaataagaaacggttcagttcttttgaaggtggcgccagtaaaagggcaagggtgaagaccaaggataatgtcttacaactggcagccccaagaaggcaagctgcagaaactcagtcccaaaagggtctaatggtggaaggtcgcctaggcgaagcaccaaagcttcaagggtcaatcaagatccttctccaccacccctagcatctaagattattctagctacctctacccagttgtccagggagagaactgaattacctctgttgcctccagcacctttcaatcttcttaaaaggcctttttcaatgatagaaggagacaacacaaacttggaggtcgttgagcagttttatcaaaaaaggcatagaaacgaatacgaagagatgaagaaattgaccagtagtatctccaccagacgtaatgctgagtttattgactaagacaaatgggatgagccctgccctcccctcatgaacaaaggttagatgatagagaaggtctatcctcgtgttggaacagatgagtcaccgtttctggctgatctattagatcagagtgctactacaagttgtaaactcggagctaacaagttttccatgatggcgagtagggatctgatctatgtggcaaatgatatgaggacctaggttaatgttgtaagtttgactttcctttaatttgaatcaacacttcgtatcttttgactgattgattcatttgtacctcctttttaataggtgagcctaatgacagagaataatagctccattgtcactcagttggcctacgagcttgaggtgctgagggcagattatgacaatgctgaacagaagagggaggaagatatcaatgctctagctaaagctaatgataggatgaaagccatcgtaaagcaaatggtgactaaatctctagacaaggccttgtctcacaaaaatgggatgaccaagacgaagagggaatacggagacaagtataaggacttgcattccaccgctcttacaaaaatcaaaaacttagaagttgacttgaagttgccaaagctagatatctatgaaaaagaccaaaagcttaccaccctatctcaagagtatgataaataggctaaaatcatacaggacaaatacattaatgaaaccactctggagagaaagatgaaacatcatcaaaagttgaaacaaaaggcagaggaagctaagataaaggctatttagagggctgaggaggtcgagaccaaattagagtcatctgggaaattctatgaagagtccaagaaaaagatcaccaaactagagggtgaaaactcaagtttaaagggacaacttcagtaggcaatctttgagaaataagagcaataagcccagtacaccaaaggtctagaacaggcctttgtctacccgatatataccatctggcatcatgataaatccgtaatagacctctttgatgctgaagataaggaaacgctaatgcctaagatcttggcccttgaggaggcggataaatataaggaagcacctcagcagatggaagcagacgatcctagaactaccattcctgtaggtgagaatatggatgacttagctcttctggcctctaatgttcctcttttgatcaactctgccatcccagaggtcttgtctagtgttccaaccaaagatccacaattgccaaaggatttagctcagccttaaccatcctttcctttcatcatcaactttatacttaatattttttgtctttatggggacaagggtccccctttttgtgtgtaaggggataatattttatacccttaccacgggattttcaagtattaactcttttgatatttgcactttaacctatcgaattcgctaagttttaatgcttccagcctcgtgaggttctggttctaaaggcatgaacctttagattgttaattaaatgctttgacttacatatattccttattttttgagaaaatatttgaaagtgtttttactaaaaggtttctctgaaacttaaataatcaattaacctgagctaattaattactttagaattgtacatttcttggtaaatgtcacttgttttcagcgctttttgaacttaattgtttaattaacctgaattaattaatttatttaagtagcctaaatattttagttgtgttaacctgaaccaacaatgaagcgtgaacttatatttgtgttaaattgagttaaccgtgaagcctgaacttctactttaagttaacctgaattaaatgataatgtgttagaattgattccaattagtataataaggtagtggcttacttttagtttcttgaggttctaattttgggcgatacttcctactcttatacttgattaaacactagattaactttaaatataataaggtagtggcttacttttggttccctaaggttccagttttaggagatactccctactttcatacttgagaatttaatttagttatttcttgtgaaagaggtaaaattatttataacaatataatatatgctacccccaagtaattaataatcaagacttttgatcacttcttttattcaagtacttcctgccttgtggcatacatggaaattaatactaaaataaaaagtaaagaaaaacaaaaaagaacctgaccacccctagtctactaatagtatcggcgtagatggtcagtgttccatgctattgggattcatgttcgatctagtctctttaaatggtaagttccatcaccaattttgtctataacttcatatggaccttcttagtttggtcttaagacctccactttgggctcttgataggctggaaatacccttctcaaaaaaaggtcaccaattttgaattttctattcttgactttagagttgaaattcaagctaactttgttttgatacatctagagttggacctatgattgatctcgaagctctttacttatccaaggattcctgaagtagagcatggttttgagttgggtcataggtgtctctcttgtgtgtaggcactgtggattcaactaagattacagcctcgcatccataagtcatggagtacggagtgtggcttgtaaaagttctttaagtggttctataggcccaaagaactcttagaagttctttcggccagtttgctttgcaagcctgaagcttctttttttaaagtagtcttcagaattttattaacggtttccactttttcatttgcttgaggtctggccatagtagaaaagcttttgattattccatgtttggcacaaaagtccgtgaattgatcactatcgaactgcttttgattcttcttgttttaccaataactggtttcttattatgtaaaattaaatatttttcatgtaactttattttcataaaagtaatttcgttgtatttaatttctaaaatatatgaaattatgaaaaaatatttaaagcaaagtttatttaaccagatcatagttcaaaaatctaaaaatgttattgtaattatcttattgaaaaagttctagagttctcaaatttattcaatgctgagaaaccagttttcataaactgtcaatcggtatttatttattttctagttgatcaatgcttcttctttgactccttgtttttgttattctgttttgaagatttgtaaagctctggattattgcacgttctacgattgtgcctaacttttccacacattgtgcatttcaagacaacttttgattctctttttgatcttagtcttttctttctaggcctccctgctatctttctttattttggtggcaaaactatctgatccaggctctcaggtatagtccattctctttcatttggtggagaatgtacaattctttcatatgttgccttcactgttgcagttttgtagtagtcgacaacataatcatacggtcttaattccttttttgcaaattcaactattgcatgtgcacatagtatctcatcttgttggaaccttctgcagctgcatattttgtccagtaggttgactgtaaaattgcctttttcatggacctttacttggtgtaggattgttgtgattgttataacttgttgatttatttgaaaaataaataatgtgttagaaattggttttggagcattgtcaagaaatgttttttaattattgttcttctctatgttttagtttttttacttggtatttcattgccttaaccgaattttctctaagtattgctttagcttctaatgatacttcgataaatattccatgtgcttcactaccatttttccacacccatttttgcacaaggcttctaaagcactcaatcattgttgtaataggtaatgatctttcacctaggatcgctgaatttattgattctactatatttgaagtcatcatagtgtaccttcttgtaggacagtggctcctagtccaaacctcgtgtctaattttctccaagtatggtcttattcgtttgtcaattttgtctatttctatcatgtagtgatcaaatgaggtcaacttgtatgtctttattgcttttacgaagtttgttgtcagatcatcttcatgcactccaaagtttattttgatgttatttagcaggtggaatatgcatgctccgtgaaagtggtttgggtagacattgctcactgcctattttatacttttatgcttgtctaatatgatagtcaaccctgctcatgaaaaccaatttttttatgagaatagcaggtgtggaagcttagcaagctagcaataattgctatgaaccagaaaacaagtaaagagtgagagagagagagaga

SEQ ID NO: 15701 - DNA, 5296 bp, Cannabis sativa
atctcgtgttgagactcatggccaaggcacaccacaacgtctcttggaggatctagaccacgtcccgtgcaagcagcataccgacaagccaagagaaacgtaccaatgaacctctggcggcattcttcgacgcactatcgggtcggtcagataatgttcatgagtactccaactcatggagacatatgagtcccctcgcggtcctcatatgcccacaacaagtagtagctcacttagcaccaaaatgcaagggatggtggagagctgacactgaggtgcctccttaaaaagcattctaagcttttagctttttaccaggataatacataattttggctcggtagacatacagccaaaccgtaaaccaaatcacaagttttgccaaaccgattacaccattctatttgtagacccaaataaatggcatataaactaaacatcagcattgtcaccagcatgcaccactacttgaccaccacttggccaatctttggacatcacttcacttgtaacgtgccatcttaacatgcacataaaacttagcagagtcccggtgttgtcatcactgctttcacacatcagtttggaaggataacacaaatgttttggagttaattagtgttcttaatagttttgttacaataatgtgaaattaatttatataaacttcaaattgtgctgcgtggcaaaggagttgttttcatttctgttgaggtggactctaatatgttcgcttaatagttcatcaagaacatacgtttgtaatgtattaaaaacctgcttatttgatgtcatcgatcaaacccacgtcttgttaatttgaagtatcaaaactgagattttacacaaatgtgaacctcaaatttaagattagagattataacaaattttacaggctcagacacgcacaaatactgtcatcaaagagcaaagtacgtatactttgccacttgtttatgtatatttgtcaaaatatacaatttcaggatcgagaaatgaaatttgtcatcctcgccatatctataattcacatttaaaagaaattaaaacagccaatgtcaaattatacacaaaaaattttacgaaacaaaaccaaaataaatcttcactccaaaaatgtaactagaattaggataggatagagagaaaaggagaagcagctcaaaagtgcttgaaacaaaatcattgatgcttctcagtgtacagttgaatctgttttatcatcattgctacactttccttttcttcttctctatccaaaattaattcaaataaattcaaaatcaaacccaaaatacatgaattttgaaacaaaaatctaaaacaagatcaggcattcagaatgagtaggaggtttgtattcatcaaagtaatcagaaaaacatttcatcattatgcctgatatttctctaatatactatgcaaagataaaccctaatttaatgaaaacaaaatgatttattgaggaagaagagatttcctctcagacaaatgcctcgattgtcctcatgatttttaagaatggatatcggactcgtcatctgtgttgatcatcaatgagataatcccctcatccacaatatgcatataagcatgtataacaaaaacaaaaaacaatagaaagataagagatttcctctcagacaaatgcctcgattgtcgtcacgattttatgaatggatatcggactcgtcatctgtggttgatcatcaatgagataagccctttcatccccagcacatatatataaatttaaagcagagaaaccatttacgattgaatgaaaataaaaaatgagaagggaaagagaaagagattgcctctcagacaaatgcctcgattgtcgtcacgattttaagaatggatcggactcgtcatctttggttgatcatcaatgagataatccctttcatatccaatattaacaaagatacaaacatatacatacatatagctatgaaattagcactaagaccaactcacctgagaaacaggacacaaaatgaatgaaggcggaagaagagaagagagccacaatggtagctttgcctggtggttcgttttatagatggccttcgactctgcttttattagggttagggtttcactctttgctcttttctcttctctaatctcagactcggactatgggctttataacatggcctgaacatagatttgctctttggatcaaacatgggccaactttcataagcccataatttggtcatgaacatagatttccctgactgtcccagccttctatttgcaattatgaggggtacttataaaaatacctttatttttttttgttattaagtttttaaaagctttaaaattataaaaatattgtttcaataaaataaaaataaaaacctaagacagttaaaaaataattatagaacactttaactatacaaaaacaactataaaacaacaaaaatataactacaaagcaacagaaaaaaggcaagacatcgatctcgttacaatatacaaagtaatatcaactccttagcatatttttgtattacgaaattattttcttatacctagttttaataacttgatttattattttgtattagtatattatttttttcaatgaaatttgttgttataacgttatacttttaaatctctttttctatttgagttagtaacagattttttaaaattaaaataataattacattaataatagataataatttttttgaaataatagtgacaattaataatagatacaatttattgagagatataatataataagtaatatataattaatacaacagataaataactaaataataatataattttaatatctcaatatctattggacattgtgtcaatttttttaaaaaaaaaaaattatcattatatttcaaaaaaatatgtccaaaaataactaaatacatgattgtgatccacattatttgtcatttgtttggtcaatctaaaaatgtctcatttaaataaaaataagaaaaatataaatatgaagtatcaaggattcaagatcataataactccttttttttttctctaaaataactttaggaatttgtaagcatttgctgtaaatattagatttttgtaattgtttcttattaaatgttatggcgtattatgtaattttctacttttttcagttagaacatatttgagtaaacggtagattgtttataaatatcatcattctacacccaccaaattgcagaatccacaaatagatttggatacgaataaaagcacatagaagaataatactgcaaacattgagaaatttgctgaagcagcctaaaatatcaaatgcattatatcctagagaatgtggagaaccagagaccaaatagggaagaccaagagcaaaataatgcccatagtgttggatatcccatgagtttgagtgaaggagtttcggaatccgcctgaggcccggatgtgctgctgaagcagataacagccgatgatgaggcatatcagaacaccaacccaactgtcccttagagtgtgtgaaaagaaatttggagccacaaccagaagaagaatcaatgaacctggcaactccaaccaatctgcaagtaaccaaatatgtctatgagtttctgttatggaattagtaacccttttgagaaagaaatatgacatatttctaattatgtaaatggtgtggtattattctagagcattgaaactttttgcatttgaaaaagatcactttttttttcttcttttctttctgaaattttaaaccctttttaggtggggctgtatagacacataaaagcctgaagatgaatataaagtttgaactaaacagatatatatatataccagggaagtgtctggggaaaaaaagtcttagcacaactgtaataaaagcaacccattttccaaactctccactgcataaaaatgaagtaactttatcattagttaaagattgttgtacaaacaaaatgtatacttagaaaattacacaagggaaagaatagagattatttgttatacctcagaaaatggaacagtactgagggaaaactgaagaagatgtaggggattaaaagtgaggtcaacatatttgtcttccaatttgttcgatccaaaatcaacaagtatctgcagttaaaatggaaaatagttattatgatcatgtgaagagactacaatcatggtttgagtatgtaataaagaaaagcctttgtaactcaatgcaatgtaaacaagaaagacaatgaaaccaaaaatatgtcaaatgacatgaaaagaggaacaattggctttcaataatcacaatcttaaaagggttattgtttagttaaacaatttctacaaactagtttaacaacggaatcagatgataacatcaatccaaagttgcagataaaaaaaatagcttttaaccactttaccattgaaaagtcaacaaaatctttaatttttaataatggataacccaatcaaccaaatatcatgaaaaacaggaactttagaattgtcactttcccatttaagggcacactgaaaacagtgcactttttttctacctcaaaaattgaagaaacatatatactcaattatcaaacacacataacaaaaaatgggtattactaaaatcaaatcagtatcaattttgaaaaaaatgacaactagaccaaagataaaggtacttacatggcagcaaacgaagcgacccatttgagaaacgaagtgccaaatcccaacccaccgagcttagtagcatgattaaaaagctttttggctgcaatctttagatcgttgatatcagaatcgatcaattcagcggttacttgatcagtcttcatagccaaatgatccctacccattgcgattttcagatctgaatactgaattcagcaagaaacaacaggaaaaaggagagaaatcagatataattgtttgattggttctaaatttttcgttgggaaggaaagaaataatatatatctacgtcgagttatgttgtgttggaactcagtgagtcaacccgagaacgtgagcgaagctctcgtttcggatcccaatccaaactgtattgagctggctttgactgttggaattacgccacctggccgcgccaattggggactttgctcggtgtaagcaaactttttgtccacgtgtgggtgtgagagttgcacacgtggtccaatcagagaatgtcttttttttggatgtaataatatgggctctaaggcccaattatattagggaaatttgaattttcatgcttaataaactcataaattggttttttaaactaata

SEQ ID NO: 15702 - DNA, 2872 bp, Cannabis sativa
gtcgtcgctactcgctaggtagttaccagttattttttaatattcaacatctgtgtggaagttgaatgatatatatatatatatatatatatcattgttacagggaattatgagagagtgatgttcttagttattttcatataagtacttgatataacttgtttattaacgaatggacatgcctaatattttgcagtttttttaattttcgtgtgcttgaattctgtataccttgttaaaacacagttctttaacttatgcatctacttctgtgttaacagaaactgctttatttgatctaaaatcgaaatatcattcatagattatattataatgaaagagaaaatgtactttttactttctttcaaaatcattcttgtctcctaacaatattgagcatgtttttgtcctttattctttgtcttgcaaaactttgtggaggaaaaaaaaaggatgaacacattatattgttttcttttctctagaggtcaaagattaggtttggtgatatgatattgtaaatttagctaagagtcaccttagcctatcccattcaatgaaactatataaacaaattacaaacaaaaactttgaaattgcatgggtttttaatataccatcaagttgtggttggatttgattagaactccatctgggcatcactcattattaatcaaggttctggctgaccattctgtcatagaacaaaaaaaaaaagatgatggcaaacagaaaggcctctaacttgaagataacaactgttcaaaagagtaacatcttttaagtctctatagtggaaacaaaatgccatttagttttggcattagtgttttgttaattgctgtgagaaattgaaattctgttttagtctgtgataggttctcagttgggactgaaacagaattgtagtaaatttcttacgtgtaatgctagatacacactcaaattgcacacacttgttacacacgaggactgtattaaatattatccatttatattttgaatggagtcatatcacttttaattgtatggttcatataaattacgtcattgtgtgtaataagtgtgtgcaatttgagtgtgtctcaattattattcgtttaaatagtaggagaataaaagaaattgttagaaatatggtgagggaaattagctagtgatggtgggtagagattattattaattctctagatttcttagtgatcctatttttcaattacgcctgagttgcttgttcgacaaaaagtccctttatatataataatgggattggagcaggtacttaagtgtaatttgttctattaacctcttatacagttaaaggggtctctcggtttgatgaatattccattccgatgattaacatctttcatcacctgtattttgttggattgaaacatcaagaaaactttgggtcttatcagttgtaaagatttgtttgtggtttaatctcttctttgtcattaaaaggcatgaaaaacatgtttcacattctaacaatgatgattttattggaattggattgcgaaactgcccttttcattttaatgcctaacaattattttttcgattgttttgagacagagaaaattgatgtagtttgtttttgattagcaggtgactaatttggtgtgaagataaaatgggcaaagcaaagaacacttgggtttttttaactacatacatagccctttggtttcttttttactttctttgtttctattttgatttattcagacttggttggtcatacacaccataccacagtgtttctgtttgggcttttgtcttgtaatgtgcagactatgctgttctagattttcttgcaccaattactggcaaacatttggacatttcacatcaataaataaataaacaaaatattcagcaaaataaataaattcttgtcttatctctgttttttttttctagttaagatttgtctctcgaactttgatatatacttaattatgtttcctaaacttttaaagttgttaaaaatcgcatcaaactattgagattattaggtttaaggattttttttttttaaattttgataaggaaaatttaatatggatgaaagttcagaggacatgatttagtgcatgctaaaatttaagaagatgatttggtgaatatagtttagtacatggacaatcacaaaattagtaaaactgaatgaaatttgacagaattttataaatctaaaaattttaatagtgtatgagaattttttaacggttagaataattcaaagagtataatttagtacatgtcaaagttcaaagaataaaaattctcattagcttttcttttcaaattattttcaccacaagacaagataaaatcactttattttattgggatgggttttagttagacttgatagtagttagtgtgtttatagagtttgagattactccaaaaataaaatataaaagtgagattcacttaatcataaattttttcactaaaaccataccaaatataagtttagttttacattccttacccatatgagtttaatctcatctcctctcaagtctaatatgagtttttctcatggcttgatgaacaaaggttgggaaggtgtttagtaatattaatgttatcattaatgcaaatttcaagagcaaaacaatatccccacaaatttgtttggccaaaaaatgtatagtttgattctagaccaaagaaaatgaatattagatatgacttttaatgattttgctacttattaataacatgattattattacttagaattacataaacaaagtatagagtagaaaacaactagtactaccttaatcttaattaatcatgttcattcattgtagttagaatcaatatatcacacacacatatatat

SEQ ID NO: 15703 - DNA, 4179 bp, Cannabis sativa
atgacaaaggcatctaataactttcaaatccatcttttgggtgatgatgaacaacatcataaggcaacatattacttcttcaaatgaggtaatgagatcaagcacatagatatgtatgaaatcattttccaaaagggcttcccagagtgtagcaattaagcagaagcacttgccaaggattcaattagtagcttgtagccttcgggaacggggctctctgtgtgcacacactctgccagagcaggaacatcagcattgaggtctaagtatcttcccagcaatagcagcaaatgaaaatctgaaatccgcttaacgaatggaagattctttgctcgatcaagatgatttttcagtgccctcattgttactgggttattccggttctcaatgggaaaggttgatgaaagggggccctgtaattttcattcgagatcatgtgagcaagagagtactattattttgcaatataggcacaaaagttaaagaaagaaaaaaaaaacagattctcttccaatttctatacatgtaaaatatggtaaacaaaacaaccagaaagttaatgttaacaaatctttctttcaaaaaaagatgggaattcacaaaacacatcatgctattaacagagccatgtgagtggcttggttgcaaatgtcaggtggtgtttaagataactgaaaccaatttctcccatgagcaaaggaaaatttctatcatatcaaggcagaagccaaaagccagagacaaagttccagcaagtatggcatccactcatgaacaaagggtggttttctatcagatgatgaaggggattttattgataaaacagcgagtgcagagtcttttcttaagttagatcacaaagtaaactctttttagaaataaacagcatccattaaggttttaataactaatataataaacatatttagtaagactgaatccataccggtactccatcacaatacaaattaaatagaaatcaagtaattcaatgttatgcttaatcactggacctgaaactagaacgacgcaagatgtcagaatttctagagaataatgagataaaacataggattaatcctactatgatctagtgagctgacagtcatcatccaatggaggaattggacaaattagatagcaaatgaataagtggatttgttcatacaataggaggtctcaaattgctaaaatggtcaagtatgtactttgttctaacaaaatctaaggtttgagtccttctgagtacctatatagcaattgttatagtgttctgatccccaaatattgtaggactaagcggaggtcctagtttttttatttaagtgaaaaattgttccccttaccgtaaaataccctgaaccccacgcaacgacacaatgtcaataatattagtgtccataacaaagattaaccatttaggcaccacctatatgtggactaagtttctctcattttttcaattaattcaatcctttccaactgggattctatagcaatagtgggtcatcaccactactccttatggctacatctctagaaattcaaagagagaaatatgcaaccagagttttgaatcctaaggttaatctaaatttcatacatttgcaggtttctacaaatcacttcctaaacagactacgtgttaatctcataatcaataaaggaacaatagcaaaacatttgaaggaatacaacaccaagacaagaacactcataaatataaatcccaactatgcaagtatgaaaagaataaagagaaaacaagttaaacatacctggtgatcagctatcttgacaaccaccaagaagaaatcattgtccacctctttagtgtccttgaccccaacaacaacatctttcttcatctttgagagcttgggatcagcatcttctccaaactcagtctcaaaccactcttccttgaacaacctaatgcacacatcactcatctgaaaagcctcaaagtgcacatcagcagcgccatcctcgttcacttcaagcttcaccacagcggtcacccattccttaaagccactctcggcgtgaaactcagcagcctgaagaacctccctattcgataaagtatagtcctttttatcctgactgatggtttgagtgaagataaatccaacccttgtcatacccagaccaacagcaattgcttccactatcttttcctcatctgggtctctgaaaagcaacaaattctcctcagttccttgctgaggcggctcatatatgaaatccacctccactttcccctcctccgaaacagtcccgtacataaacccaccacgcttaaccgcaaaagcaagagcatcattcacgtaatgctggaacgcgttagcacaatcgcgatcgaacgagaccaattcacaatgcggattctcctggcgcgagaccctcatctgctttgcgatgagatcatccatggtcatcttccggccaaaagacccagctgggttaacagccggtccgggaacagttctctcgccatcgtaggcaagaaaaacgatcgaaccgtgagagaggttgagggaagagagagtggtatttgggtcagccatgtctacgaagcgggaaagatcgtcatgggtcttgcacaaaagaaggttctggttggtggagagggtttgattgtgagaagggatttgaagctgtgattggatgatggctttaagctgagagacattgatgtgaggattatcaatggtgactcgctcaagtccatctctgcttcgaattctgagcatcaccatctttgaaaggattaatgggttttgattttaggagagtgatacgaagttggggagtttgaaggaagagaaagagaagagttttgatgtggaatttggaaaagcttggagaattatagaagaagaagaagaagaataggagtaggatttttgatttcgaagtaaagagttcgtattggactaggaagacttgcggtgaagtttaataatatttctattttctaagatgggaggattggaatgaattatcgaatatctttatttctattttctatttttaattactttatatattatttttttttattttgtttttaaaaaaatttatggtttggataataaaaataaatatttcaatttttttttcaagtaataagaatcctcttatctttatacgaaatagtttcttttttcctttttagggaatttacattatttatcactaaatagtaaatatcttcaattaaatttcattccaataaggaaataccgaatgattttgttcactaaatttgtatgccgaatgattttctacaattaccatctccattgttaatttatttatttttgaacaattttaggttagatacataaccatacttttattgaaaactttaaaaaatttattttataaaatatatatatattttattttatttgagaaaagatcattatattaatttgaaacaattacataacagtcataagtggaggtggaaatcctccaactaagaacaaaccgtatccacggtaagggcaaatttagccaaaacatgggcataaatattagcagatctaggaacatgtgagatctgtgctcgtgggaaattggacactagtaagtttacatcatttaaaatagaatgaaatgcagtattatatatatgagatgatttcaatccttgtaccaccagcagtgcatcagtttcaatgaagtctactgccaaattgagtgaaattaaccattgcagactgtttgccaaacacaatgcttccatctcctctggtttaaaacaacctcgaattggttttgcaaaagcagcaatgacagaaccagtagaatctcttaaaactgcacccataccgattactccattagacttgtcaaaagctgcatcagtattaagtttcagcttgcctgatggtggagccaaccaagtttgcgtggctttcggaggctgagaaactgaagttgatggcgaggacgagacagagacaaggtgagcagatttatcctgcttgttggcagtgtggtaatccttcaaatatgtactagcaaagtgaataatacctgcaggagttttggcatttttaccatgaaattcttcatttcgttcatgccaaatacaccagcagaggacaatgaaatattctagctgagaagtagagagtgtggtggagagaaaaagcatgaaatcct

SEQ ID NO: 15704 - DNA, 4733 bp, Cannabis sativa
agaaattgacgataaagatgttaaaatgagttcagtgttattaaggctaaatagatgacacagaagttaaactgaattcagtattattgaagttacaaactgaaatttcaaaaaaaaaaataataaataaaagttacaaattgaaataaaatccaatgaaaaccataatttttaaattatgttatttaaccaagtatttaaatattactaatggtaacacttaattatctttttcattttaataaagtgtagttgacaaaaaaaaatatttgaaatggtaattattattgatgatacataagataaaagtttgcacagtaaaaaataaataattcaaaaaataaaaaattataaaaacaatgctaatcaatgtattcatctcgagtagaattgacatacgatccacttcagtatatgtcatgaaaaaaaaaaaaaaaaaaaaaaaaacttgttttaattttaatgtacccgtgatcgatataccattggtatggtcaaaaagtattttttttataaatagatgataactaaggacctgaagtctaaaattgaataactattttatattttactattgaaacaaaattctagattttttttttttttcttggaataactagatacgtgtatttgtaatttgagatatataataatgtttaagtggtcctaataatttgtaataaaaccttaccctcagagaagcagaagcagtttaatgggcaaacgtccaaaaaattaggcaacaacattgtgactttcttttacatatttgaagaaagtgatgatctgttttccacatgggagcacagaggagatatgggacaaagtacactgtttggcttgataaatacactgtttacttatgtttaacctaggcttagcttagctaactttaagactagtaataatttgaccctttctctctactatttgtacactaattttggaaacaatgctattgaattaggtaattattgaacctttttgcaaataaattctagccgtccttaaaatatttggccaagtagtcaatgaaaggaagcattaactgtgatttgtgtatgctgttttgaaatttggatttaaattatttatgagatgaaactaatgttacctaccaatattcaagatttacacaaaatggcatttatgagatgaaagcaatgttacctaccaaatctttcaatttttacacaaaatggtcattgtattattgaaaagaaatttgttattattgaccttaaggtgtccaacactatatcaatatagcgcgttgtgatttttttttttactcgaaaaatttcaaaaaacttcattaattaaaaaatatagtggtgatcacacggggattcacctcccaaaaatttaaaagaccataacaaacattagtagtaccttattttgcaagtgcataggcatttccataacataatctagacccccaactggtagtacaatctattccatctaaagcttctgacctctctaccagcaatcacttggactagactaagaaaatcatggatcaacacgcaatggtcaataccaagttgttgaataaccttaacaccatgcaacaaagaatgtaactcacatgcagaagggtcccgagccttgatcttcgaagcatagagagcaatgatatgtttagagttatccttaaccaccacacttacaacagccacatagaccctttgactgccacatcgacaaagacaagaaaagcatcttggatagaaggcagctctgacagtggaggagcataaggcctgctaatagctttctttttcgaaactgccttccaattattaaaatcgcggttgatgatcgttgccatctcctcaacaggaagtaaaactttttgatgggagacttgatttcttaatgtcgagatattatgataaaaacaagctacataggtggtgaattcctccttgattgaaaggtaatctgattggtcaataaatggagcaagaactatccatttggcaacatttggtcctaaaagcagattaaaaaatcttcaattcttaaattctatttagacataaaccaaagaggtgatgagtggtattggcattgtctttatgacacaggacaaactatccaacatcactcccaaaaatcactgccaaccgagaaccaataggaagagcatcacgaaacactttccaaaggaaaagcttgagatagggatgcagtttgcagtgccagagggtcttgcagaacacatcactaccaaaaaatctgagggaattaagaacccaataagtacttttaagtgagaacttaccttttcaaaatgagagtatctgagttggccaactcaaaagttgaaacaaaggagaatttagtagcagcagcaagggaaagaagctactgattaagctggagtcacactcctttttgttagaagtcaatagatttctcgcctctatacgctccatcattctgaaattaatctctctatgatgcacaaaaacatcatcatataacatccaatcaccaacccagaggttctttgaagaatcacaactaatctgccatatagaattagactaaacaaagttcttagctgaccaaattcctttgccaccacagaggcattgcctttgaggcaaaactcaaagaaatgagattagggaagtacttgccttttagtacttggctccacaggaaagtttcattagaagctagagaccaacataatttagccatgaaataatggttaatatcttcaaaactcctgaacgcaagaactagactaaacaaagttctcagctgaccaaattccttttgccaccacagaggcattgcctttgaggcaaaactcaaaggaatctgattagggaagtacttggctccacaggaaagttttattattagctagagaccaacataatttagccatgaaacaatggttaatatctttaaaactcctgaacgcaaggcctcaacaactttttagtttacaaaagttttcccatgctacttgagagaggaatcttcccccttccaagtgacctttccaccaaaagcgtcgggtaattttggtcaaggtcgagagagtagatatgagaagcttcaacacagacatagaataagttggtataacatgaaccatactctgtgtgagtactattctcgtaaattgagacaacaatctggccttccatccttccatgcaactggccactttttcaacaacatatttaaaatcatttcaactgcaccacaaacaaatatcaagttccccaagaatttctcttcactagacatttccccaatcgccaaccactccatgattatttcctttagatgagagctacaattagagaacaaaactttagacttgttgatattgattttttgccctaaccacaggcaatatttgtcaaggcattcacaaatagttgtagcagtaggcccatctaccttggcaaataaaagtgtgtcatcagcgtaaattaagtatgagatagatgggcctcttcttgtcacacacacgccttcaaggagtccctcaacttctttcttatacaacaaacgagatagcactttcgaacatagaatgaaaatatacggggacaacatgtctccttgacgaatgcctctttgaggaaaaaaaagtcttagtaggacctccattcaacaagacttggaatttaacagatttgatgtagaatatgatgagcttgataaactccagatcaaaccaaaggccttgggcacgacctcaatagaattccattatagacgatcacgcttttgacatcacatttatttctcataaaagctttttttttttccttttttaatatttcaagccaccaataaccttttgagcaatgatgcaattttcaattattcatctgcctttgataaaggtagcttggttcagagagataaatttttctagcacccccagagatgattagccaatatttttgccaaaattttgtagcagacattgcatagaataatcggtctatagtcgtcaaaacaggcagcgaagctcttcttaggaataagcactaaaaaagtgcaatttatctcagaaacaaactgccatgtttaaaaaaaatcctaaacaaaattggtcacttgaaccccaactgtcttctagtatagcttgtaaaacttagcaggaaattcatccaaccctggaacttcaaaggcagaagcccccacaccactttccttatctcctccttagaaggatatgctaataagaccaagttctctttagcagtaacaatattagaaatgatattaaacatctcatttaagatgtttgaatttgaggaatggaatagattaataaaattaccttagaaatacacatctaaatcttgacgatcttcattccaatgaccatgcacatcaagaaccgaccaaataaaattacgcctcctccttaacgacatagaggcatgaaagaatttaaaattttgatcaccacactagggctaggggtgttcatcaaactgaaactgttcgcatcgcatcgcaaaaaaaatgcggtttgaaattttttgtggtgcgttgcatttttaatttttcttaaactgcatggtgcgatttgcagttttgaattgttaatatgggagatttaaaccgcaccgcaccgcacattatataaatactaatttttaaatttatttaggtctaatatgtgaatgttcaacttaaagctcactaattatttgtaacgtccccgcttcaagcctcca

SEQ ID NO: 15705 - DNA, 8424 bp, Cannabis sativa
ttaaaagtcacccataaaattctcaaaaaccaagaatttcagttatataggtatactttatatagaatagatattctaattttattgatttataaaatatttaaaaagtcaaaaaattcatttgtatatttttatggactgttctaaaacttaatttgcacatatatatatatatattctaatatatatgatgcatattatgatttttcgatcatattaaattacaattgttatgctgtcaaactttctaaaattaagagaatatatttttttttgttatttcatgttgtttgtatttggttatactaatgatgagaaccatatttataatgatttgtgcttattgtttcttcacgacttagtctctatttcattataggtagataatgtgtgcactcacttataggtgtaaaacctaggacctatatagaaagtgaattatttgagccctgatactatggtggttattagacgtgattaccgattttggatatcattttctatgataagtatcgggagataggtttggatatcattttctatgataagtatcgggagatagggatctagggggcgatgtgatatgcatggatagcttgtctcttgtgattatttataacctctctatttttttttatacatgatgatatgatgacatgtttaattttttgagctaaccatacatgatatcttataaattattgatcttttgatattatagttgttttacatactaaactttgtaaactgctttatatacttctccttcaagtaactcaattttggtactttttgatgtgagtgaatcgttaatgaagaacaatgtgattatctatttaattaataatgaatggtctatattatttaaataactttgtaacagttaggaatgcaaaatatgatggatgtcaagtattattttagttatttaatatttattcaatctaattatttaataactatataactgttgagatttaattattttatatgtaatgacgaatactgtttcattttatcagatttattctattatttatattatgcattttatataatttttataatataatgtaaagaatcatttgtagcattcttttcgaaatatttgaaggtcaatggggtgcttaacattgagatttaaataacaaaatcaacatcttgattcaagatttataacttttgaagaaaaattataaattgtgtaaatgtttgcctcggttagaccatctccaatgagagatgtaaaaattgtgctatatttagcacaaaaagtagttttgtggtaattttacaccaaattttagcgttgtgctccaatgcacaattacaaaattttgatataaaatttaatatctaactaatgttttattaaaaaaaaataaaatctaataactttataagcaattttattattattttaatatgtaagacaataaaaaataatataaatatttcataatttaatgtgatagttaaatatattaataaaataatagaaatgatataaatgtaaataaaaaaataatgtatttattgtggtgtaaattttacatgatagcaaatgttgtgccaaatttagcacaaaatttgcaatgtgctaaatttacatcactttttgacacaccattagagtatactttttgttaaatgagctatattttagcttttcaacacttatttacacctccattatagatgctcttagtgaatcttttccctggactgtgtgtcctaaggatttgttgtccatatgaaaaacctaatttaacctaaaatgaattaagatcgtgaaatttcgtaaataatctatagtaatgtagtaaagcgaattttagatggtgagaaagaaaaaacataaatcataaggagcatcaaatattcattgagaataagtaaagttttcatattcttataaatgactcaatattaactttaacacttatttcgtggctgtctgaaaataaacttgagtgagaaatgcataccaggaattttttttttttttacaaaatggactaaaaatttgaaaaagattacaaaaatacgttaacacgaaatattttcatttatattctttgaaattttttatttataaaaatacatcttgactaaatataataaattattttttcggttattttataatttgtatataattgtattatagttgttatgatattattttagttgatttatagttattgtgaggttgaaatctcattattttcttacattatatcgagaaaagtgtattttttgtaattttaaaattttaaaagaatatttctataaataaaaattttaagtcataaaattatatataaaatataaaaaatgatatttttgaaaattaaaaaaaaaagggtgtgaggggaaaggtcaggagagggtggagacaaacctttctagcgacaatatttgtactaaaaagttgcaaaagggcaaaattttatctcctgtccacaatttgcttctagcgaccacatatatgatgtcgttgctagacgatcttttgtttttttgtttttttttgtagtgataagaatttgaatttcttttgctgaaattaggatttgaaattattctatgctttttggactctttttattatattaccctttgtagtgtgtaatttaccataaactaaaatcttaggcgagtcctgattgttggattctttgctttaatgatattcttattcgtttaaagcataatcaaatatatcacatgaatcttataactagtaaaaacgtcatttaatgccctttctttcgctcgagagtttatttcagcagctataacacatgataactttcatatatgccgtactacaaaaactaataacaatttagaataataataataataacacacatgacacgtgcacttcattagatgcaaagattagagaataatattcgcaaccaatgaactttgtctatgcaattaatttcattatatatattattatcaatatcaattttgtttttcttttgcaagttcgaattgaatttgttaaaacaaagaaagcatcatatgtagacgtacggctacgtatgtttgttttgataccatctaatgtataaaggagagtcaaatggtagtcccgaagcaaaagatagataaatgatcatccgttcgtgtacttcaaaaatccccttatataatgaattaaagaacacacacatatatatatatatatattattatccttgtcaaaagaaacatttatttttctaaagcaatgaaaaaaaagtgggttgtgaaaagaaatgtgaagaaaaatgtcaataaagtaaaggaagaagcaaaacattgtctttttaaatccatttttcttcactttttaatcttccaagaatccatttacgcgcaaattaaagcatctttataccggatgatccgagcctagcccatcacccgctttttatatgtacagtattgggttagaagactattatacggtcattgccaatgacttggtctttgtagttttgtatgtgtagagactacacgtgcaaaattctagtcacgtgccatgcccaaaagggacaaaagattgggccaatgaggggtactacggggtacgcgttgtcaaactagggttagggtttctgggtatatgagacagaaatcattgcacgacaaagatatattctaattcaaacccaataatattacacctcgctttctttcatcagactcttaaaatagatgtttctttacttgctttcgtctctgtctccacagggtatacctgttttcaggtcttaataaccgcatgagttactaccataaacaacaacaaaatcaattcaaaaaaataataaaacaagagtcaacaaaagaaaacagacagttggtggaaaatgcctaatcaaactttaatgtgaaactttacctgtattggagatattggacagagggccatggaaaaagaagatgggattttgggcaaagatggtttcttgcatccatcagttggaggagttttatctcttttatgggtatttcttcttcttcttcttttgtcctttttttcctcgaaataaaggaaagataaagcttggaataaatgaaacgaattaatatagtgggaagaaggaatccgaagaggggtttaaagaccttgatcagatacttaaagtatgaaaaagcaaagcaggtttctagtctttggtaagaaggagaagaagtatagaagccttgaaagaaacatttcaaacacacattttcagtcagtctttattatatttcgctttcattgaaaaaccaacctctttagtttccttttttctctattttatattattccatgtcaatatattatttgtatatatatatatattatatgtctctcttgcgtgactgacatttcatagaaacgaaaaatagagattgtaaccttgatcaaaaaggatatgatggctttctttttactaaatcatagtatcctttcttctttgacaattataccgatgataataataattattacactgctaattaataatatgattttcaggaacgatcgttgtgtcattttggagtcagctatatataaaatagctttacattttttctcatcgatttttgaatttatatatacatatatttgatctagtattttatttttctgactcaatatcttgtacgtatcagtcattaatggacgaatcaaagaaagccctggagaaaatcgtcctgataaaacaaccctgtactactaaatcattcaactttgtacctacatattttataaatatatatttttttcttttttcttttagctgggaaatataaaatagagggaaataactatagctctatccaaatgtagacacattctaacttacattaatgaaactgaaactctcagataaaacatgtaaattagaaactgaagcatgaaccagaaagatatgagaatgaaagagagcaacaaaccaattaaatgcatctccgaatgtcgtaggaaaaagagaaaagaaattaaaaaaaaacgatggtatcggtccattttaattcattactaattactttgaagatcctaaataataaactactacttatctaaccaaaacccacctgcggtaggaactaacatggatagtattaaccccactatatatacactgacggttacagagacaaacacccacccacccacactaaaattatcatctgactaactagctagaacccatattatataataaagataataggaccaattcaagagaaaagcttaaaaaagaaagctaacatgtggacggaggcatgagattgagaccaagatcatccttttccagaaccaaacgagctttgttggtatccattttggtggaggagtcaatattgttagagccatattctggatgtaaccttttcttcgaatgaagtggcaccccgaaaagcttggttttgcaaccgccattaaaattgcttgcgggctcttcaagaatagtaaccgagctcttggatgtcgttgtattggatggtgataaggaagtgactggttgctgagactgattttgatgatgatgattatgatgatgctggtgatgactaggaggagagctttgcggcttagggttattataatagtaaccagcaccactatttaccgccttattaggtacggaagaagcactatgattagcggtagtactagtgatagaagagggtagtactactggtgcgttacaaacgagtaaagaagaagggctatatgagttgctgggagccacaggcttaacatggttttgaacgaaataaataatatcgttgtaaagttttctcatgtgtgcaagctcagacattagcatggtgttactcctcctaagcctttcgttatcctcagaaagtgccgtaaccgctgaactggtgttgtagttatttccagcggtgatgacagcagcaactccagcagcagctgcaaccgcggcggcggttcctccacctctcggtggtgagtcggaccaattcgggttttcgtctgagtcagaagccggggagagacttaaacggctggacgaaaaacctggaaagaaactcgggctgttgactccaagagaagaatgggggtactgatgtgggtgatggtgattgaggtggttcaaggtggttacttggggttgagctgttttcctcctgtggatctcgcagagtaaatgtttctctccttttttgaaaaactcgttggcgaactcccacctgtccggtacaatcttcctaaaaccctagtgacacaaaaacctctttttagaaacagaaaacaaaaaaccctgaaatcatatatgatattggaggtatatttataaccttatattttattagagacttacatatgtatttagctgacgaacgaagctggaaaaattgttgtgcttgaagtagttagggagaagatcgcgagcgaactcgggaggacgccaaacgacgaaggtggtgtcatcttcgccccaagagactatgtggtcagtggcgggatcatctaccagctgatacgttttggtcaagaatggagccggaactgacttgtgggagtccaaagacagtaatatgccatcgcagttgtctaacatcagagccattttttttttctttctattatgatgatgatgatgacaatagtatcaagtgtaataatatccttttctctgaatctttatgagaaagagagagagagagagagagaaaaaaaagagaaagagagcgatctgatgaggatggtggaaaggaaaaaaaagagtggggttaaggggagtgagtgaggaggagagaagaaatactgaatcttgaggagtactactgaggtggtactgtataatgtttatttattttttaattatgagaataataattaggctttcttaacttaattattattattattagatataatcatattaatttttcacctcggttatgtagagagtaggaggagagaatatgtgtctgtctgtctagaactgtgaaataagggcctttcaagacaaacccgtgactctctctctttctccataactgacaattttgatccctcccgcgcgcaccctcttaaaaatcacgcacaggagtatgtatgtaaggatgcatcctgtcttttctccatttaccattctacccttattactttcatggatttttttttttttctgaaatgatttttaatacttctactggtcatattactacctagttagctacctgcattgagtttttatatattttctctcttcattataaaatatcttcacaatacatttatctgtgtaatactctttcatgaatatataagtttgttttcttttcaattttcctcctattggtatacggaactcggtaggggcttattttggtatatttttctgccacttcctttaatttttagtacattatcaaaaattgtactagtgtaaaggcacataattttcatatggcttatttaaattttaggtccctaaattttatagggtttgataagctggtccctacattgttttttttttttttgacaaatcagtttctaaatatataaattttagcaagttagttcttaaattttattttttggtaaatcaatctctaaactttaagttatttagttatttgttaacattaattcactactatataatagtggttgttttgtttgcttttacttatttattttatacttttcaatttatttaatgttaaattcaaatattttatgtttgtattttaattttaatatttttttttaaaataaaatgtatttcttttcgaataatattcatacatatatacgttaatttttatgtatatttttttaaaataaaaaaaaaaacataaatattagcagagtcacataatgtctaaagggacacccctttcattcttttaataaaaaattatttaattatgttagcccatataatataaattctccaaactaattttatttaattttataaaaattatttatattttatattttatttatttatctgtagctttatagtgctaatagtttctatatatcttatttattaattatttaaaatttacaactccagctgcaaaaaaaacatataaatttgttactgagtataagttaaaaataaatctaaaactataattctaaggtagttcataagaaaaaagttgataaaaaatcttttagctgtatgcatttttttctatttatttttcttatgttgacatattttacaaaataggtatgaatgaaaatatttttatatttgacgatatatattgagtaaatattattgtggactcattattttgcaagtatgtcagctagccaagtggctataccaatcaaaaaatgcattaaggagaacctagagaagaagccaatcacaaaaaacatcatggctctcgcaagaaaaggaaagacaactcagttttggg

SEQ ID NO: 15706 - DNA, 7595 bp, Cannabis sativa
gtcagtttagagcttaccctcttggctaagtattctctttcttgtttgagtgctctgatactgcgaaagccatatcgtaactactttgttaacagaacataacaaaaggaaaagtttgtttaaaaggggctctaatggaaacagttaaaaaaataccttgctgaaacggaacctgcaggctcatcacctaagagtgcagggctagcattgccaagatcagacaagtgtcgttccaaccatgttagtcgtctgagttcgacttccatatagatcttatcattggggtctcccttgaacagcatataaaattgtgtccggtgtatcaacgacacatggcataagtgccatagcatgatgatttccttcctctgctcctcaaacatgaggtgccatggctcaggagatggatcactatactctgatgcttcagctccagagtcatttgcttcctctagttgcaataccttaaaaaatcataaatggaatgaaaatagttagatcatagcaaaataaagggattcttctacattttttttttcgcttcatttcttcttcaaacatcaatcgcgagtttttacctggcaaaccagaagctgcttctggtattgtaactttgcgacacgttcttttaactcagttacataagatctaatgctgcgaatgttctcctcagcagcattcttgaacatcttctgcattttcttcacattaactgaatttgatttccttgtaaccggagtaccatcttttgatgaaaggaaattaccactttcatcattctttaacggggtgactttacatgacaaattaccactgcgtacactatcataattctcaggtgccttgttttctctatcatgctccctaacttgacaagacgaggacagaggtgagcatggcggccggattatactttgcatgttcgcactattgcttaagttgaaaggaaggattttcttcttctttgagggggtcttgcactctgaactctcctcatgagtagtaaaagatgtgactagctggtctatggttttctggacattttcaagcttcctttctaaagattcaatggtgcttccttgggatttgaatctactgatctcttctattaaattggcctgatctccttccataatttcttcggagattgagttcggaacttgcatgttctggatctcagagagtaactttgctatgttttcagcagtttcttgatttccaagtctgtgggaagcaacttccttgtgcagtacttcaagtgcacggtttgcttcctcaccaagctgctgctgtcgctgctcgatttttctgatttcatggacaagcatagatggatctgtggaggtaactgattgcctaaccattgcctgcctacgaacagcatttcttggccgagtttctggagtggaggttgaactatcatcaccatgaaaagaaagacaccgggccacttcagaaggcccacgttggttcattccctatagatcatagaagatgtatttatttttcataaatataagacatgtaatcattaagacactactataaaatcgctgcagcacctttgggactttgtgcgcctttctttctgattcaagctgtgattgtacaaggtccctctctcgctttagctcttccatttctttcttcatctgcaaaattgacattctaattattattatttcaatgatagaaattacatttccttttacagcatttcttttcacacaataattataagaataagctgatgacgaaaccactccatacaaacattttcggtatcacgcagttgccacatgactaccaaagctttcattctcaactaataattagcaatttcagacacttatgattagatcaattcatgacctttcacaaattattcagaagcattcatacctgctcaattttcatgtccttctctgctatgacagaccttaagcatgaaaatgaagaaggctctggacttcgtaactctgcttccagtctggccacttccttctgcaaatgcttgaccaacctcttgtccgcaacaacctgaacgaaattttacttaagttagtaaggtagccttgtctttatcacacaagcttctaaatctattgacaattataccatatttatttgggcgttattagtaacttcttttgcactagttgcaaatgatagtgtgtttcttgtttgctccacatgacttaaagctgggctcatggtacatataattgcagtacgagcatttcccccaagtgaagattgcaatattcgagtaagttttgaatctctatatggtatgtgtccagatttttttccaccgctgcaaaatgtaagctgctcataaggaaagtaatcaagagtactatgttcagccattcaaattgatcaatgatcatcaagtgtcagaatacaccaggacgtgatatcagctaattcttacaatcatttttgtataagctaataattcaagttaacaaactgaagttctacttgtagtgtcagcatttgaatgctcaccttagcttcctgatcactgttgtaagtgttaacaaactacggttaatatggctgccttcttttaatcttgtaccatctgcatttgtttgcgaagcacgttcacttccagccaggtctacaagattctgcaaagtttcagccctctagttaaaagaaaagaaaaatgctgttatttttataaaaaatgggagaaatgttgcaaacttaccaagctagctatgaaggacttcacacagcctgaagtttcacgaaggctactctctatagtctgatgaaaataacgggaacattatgaatggacatatctagtaggcatgcaataaaatttctgaacatgctaggtagaatattagaaaagaatgttacggccacaaataatttgttcgatgagaaaacatgattcatcataccagtcttattatttgatgagatcttgaacttttatcgtttaaagcagtttctcccacctgtctttgagctgcagatataaaagcattgaaaatgaacagggattttgtattaaaaggaaggctggttttagttttcttcaatcaaacatgctaagctaagattatcctaagtcacacagcatacgacaagtgatagcatactcatacagcatttaatttttcatacaagcattaaaattcattttcctcataaggggtatcaataacaataaattcacccctaatggtttgaaagcataacaaagaagttagttatggtagcttggaaaagaaattttggttattaacaaggaaagtcaatacctcattagcttaaaattacaagtgacctaatttaccttcacaaatgttgattaaatgcctcagatgttggccatcctttacaacttcttcaactagttttaccacaatcgtccctttctgcattttaaagacaaagataatagtttaaacaaaattgcaggataattcttctggacggacttcaataaaataatttcttctaagtacctcaggatcatccaaaagccgcagagatccagaatcacgattcaaaagatcgacaacagtctcgttgtagatctccaaggcagagaatttcaaggtaaaatctctctcaggggtctgtaaaattttaattaacatacacataagagaagttcatgccagctcaatagaaaagatttctcatgcaaccaagaacaagaaacagatcaaattcacctagtaatatcttaagccgtctcctgtccattaaaattctcaattgatatggcatttagttaagaaataacaaagaagtacaatagaaaatagaaattacattttttatgtgttcataaatgtcctttacagcattttctgtgattcctctcatggtatacgtcttaccactactagtctgcccatatgcgaaaattgttgctgcaacgagaaaaattaagtcaaaaacattggattcagaaacaaatatgaattctagctaaaaaatattcaaatcaccattcattcctgtgagagcagataaagccacatccttagcaccttcttcataaacctttcgagttgcagaactaggcccgaaaactttatctgttaactcaaacaataaattgtaaagaaaatgttgcaagcctcacatataattgagcaaagtaagacaacaactgtataaactagagagatctagggttcctctaacaatgttatatctcacaccggataaatccctaaaaatgtaccaaatgtgtatgaattcacagccctatcatggtttggactgttgaaaacaatggagtggtcatccacgcattcccaagctattagatcataaagtgcttgttctctccggctcagtggcctaatccgaacagtgaccaatattttctcctcacgaactcttggaccacctggggtggaaatggtggccctttgtatcttagataatggtgtacttggtgtcccaaccatcatcttaacttactagtcaactctctgaaaattttcaaaaccaaaaatcataatcataatttaatggaagagaaacataaaatgggcaagtttaatttgaccatatttagacataaccaaatatggaaaaatgttttcaatatagaaatcaaaggaaatgaactcaaaatttccttaaagaacaagtctttacacattacaagatcagatatttggggtactataacacaccaatcaccttgaaactttaatgtgaagtcgtcaaaattcacctgaaaaataaatttcgaacaaagaaagttggaatggaaagaaataattaataacccaacagaaacaaatgaaaacatatataaggaaacaaaaagagaaagacccaaaagaaaataaagaaagaaatgagagacatacggtgaaatttagccaaagatagcagaaaatctttgaccccctctgatgggaaatggagaatgtggtgattgaaggagtgaattctcagggggttttcgaactcaaatctgtagaactaacggctactttttccgttcgtaacgtgctaaaattgaatgccacgctcgcgaacgactaagtactatttgaaattttggggtctgattcgggccggagatgggccctcttcgtccccataaacgggccgaaagcccaacaagggaatttgggtatttctttttgttttttggggagcgtaagtttgtctatattatacaatatatgtacttttttccttttttttttctttctctctattatttaatacagctttaagaatgtttttttggttggtctgcagtcatgaaaaatatttgtttttagaagtttacctatgaattaaaaaagatgtctttattttagaaaagtaatgaatataaaacaaagggtcatgtaatctgcttatgttattattgacagaaaaaagaatagggtggattgtattggaattagagaataaatgacttgcggttagagttaaaagttggtagagataatggtatacaaataatcttagttgatatttagttggaggtaatgaaatggaatgaaaaaaaaataattttcatttcatttctttatttaattgtattttaaatattgaaatatcattttaatgaaatatcatttccactattttggtggaattattctatttaagaaaatactattttaatgtaacatgagaaaaaatttaatgattcttttactaatttttttttaatatattttaaattttattttattttattcttatccttatccttattatcattctcattctttttttttattatttattaatgttttcattcccccaaccaaaataggttagcattctttaaatgtgtttttttagtttgcatgcaaatgtgaccaagagaatcacatgtgaagaaatgtgaaacttagtgtagaaaggtttttactggaatccaccacattcctacataatagaatacactaaacaaagaattcctataaatgtctccacatcccaacacttctcccccataacaaatacccctttatagtttatatgatttaaaatttgcataaaatacattacaaaagagcataagtagtgtctaacattaccatatgtttgttattaataaaattttatatcgagtctcacatattttaatttaataataactattaaaaaaaaaattattaaccatttataaagtgttatctcatatggtggtacaaagtgtgtagacacgctttttctatatataggtttgagtcatttttagactaacatggactaaaaatatatacacttaatcaggctcgaccttgggtataggcgggctaggctcgtgcttagggcccacctagtcgaagggccctaaaaaaattcgtttctaaaaattatacattattttttattgatttgaaaaatactacatttttctaaataaaggcccaaaaatatttattttcctatggcccactatattttagggtcggctctgcacttaatgttatccgtattttcgacaagggacacatgaactctaggtcagcatccaaagcccactagtcccaagtccaacaagaccttccaggaaaggcatcttcgttcattgctcagacgagcttctgccaatgatagcccgtacccagaagtagtctttgtaccacgttttttgaaaggccaaacaacgtgttcccgaatgcctaacgtagtttccatttttatcagatcacataaaagaattaactctccttaaatctcgaccaaaagatcatatcgagttaaaaggagaaattacttaaaacaaagaccaagtaattaattcacaattaattacccacaattatagaacacgataatggcaacttgactgtgttcaatttgcctagtgagcacacttatctcctaataggttgggcctcacgaatataaccctaacttgtatatttttcatgtaaactccccatgagaggaaaagaaaaactaagtgtaattttctttaaactatataaataatcaaaaaaaaaaattcagattaagggttgaacactcttgcagtattttcttaagcaaatacaaagaacatgtactcattgtattcccaaaggcttttctagctaaaatacataataatatcgactcgtggactaaaactatttaacacccaaccacataaaaaactctaagtgttgtcccgttctttctctttgaattatttacttcttcagttctaatttcttataattgattttccaaaaatttcgataaatattttggtactttcattgagagctaaaaaaaacaatgataccatcccaaaattacattcagtaaccatggtactcacccgaaactaatttggtcttcattatattgatcctaacgctaaggctggagatttagaatatccaaatgaggtgaccagtcgccacaaggatcaacgtggtaaagaccaaaatcttgacgatcctataaatgaagacaatgaagtaggagaaatgagttctgatgatgctgaagatgatccccaagacatgtttactggcagtggtgctgagaagaaagacaatctagacgagtcagaccctgtgatcattgtaataccctaaggtttaataactagattatcaaccctaactaggtta

SEQ ID NO: 15707 - DNA, 2238 bp, Cannabis sativa
aaaaaaaaaacttatcatttttatttacaaagatgaaatctttacattaatatatacagttttatgttagacagaaggtatctccgagttagagacagaacactctgtgagaccttcacgaacatcaccccgacagagtggacataccctgcaaaaaacaaagccaagaaatgttttcaaaagaaatataataatggttaagaaagctaaaaaacacatgacatttcaggaaaaaaatcatttaggggggatgaaacaagcaagcaagttgttgatataaaattatagatcatgacagtacccatgaatctcttttagccacttatccacacatgacatgtggtattcatggtggcatggaaggactcgaacttggtccccttcttcgtactcagcaaggcaaatatagcacctgttgatagtttaaaattagcttgatcaaatacatacaaagttacactgttcgctttcatatttcggtgcataaattggatagggagaaacttactctgaaacatcatctccacccttggccttgttgttctttgagtggattctaagaggaaatgaatcaacaactgattctggggcaggacttgagaccatagatagggaaagtgagacgggctgccggtgaatttcatccaaaacctaaagccaaagattatgatgagattttaagtgaccaagtagtggaggtccatatatgcaagacagcataactatctcaattgttatgatgaataagtcaagaaggaactgtataacaacaagctgtgcaagagttgaaaggagacaattgcttaattaaaagcagaagctaaaacaaaagttatataagattagacaattaatagggatacagattttaccagaaatgcaaaatcttgagatttaccatgcatgatacagtacaaaaaaaaaaggaataaaagttacatggcataaatttaaaagaaagatcattttggaagataaggatcagacaagttgttgccattagccccccataaaggttaaaaagatttgagattgctttgaagaaaattcatactaaaggataaaacagtttctatgaccatctccatgagcaagaaattaaatgagaacaagataagtggaactcaacattcacagaaaaaaagacagagcagcctgtatgagaagagaaggtacatacctcaaataaagcctcagccagcatgacaattctagatatacttgcacgagtagtagattcttcattcaacaataaagactcacatgagcaagtaccatcaggatgaagtcctgatgggcaaaaagcattccgccgaccattttcgtcaataccaccacgtagtctttccaatgcctgcaagcaattaggctgaagcagttcataaaatattacaaaaattctatttaatttttttaaaaaaaaaaatcggtagccagcacaccaagatgggatactagtgtaaaacataaacgggtgacagtgttatcaaatgaaaaaacagattggagtggaattggtaaagctatctttaaaatgttcttaaaatgttgttttcacctcggatcttgagtatcggtgacgttcacttgaatatggaatcctactacccaggtatccagaatcagctccattcccatcatcaaaaaagtcaccactgaaacccagtaaccacctgtcatgagatcctaggtcctcactatcatccatggaaaatagaatggttggagaatcaatatgccttctagaactgcgtctggaaaatgcatcccaaaatagtcttctactattccttctggcctcacggttacttgtgttaggactactattagacagcatattggaagaaatactcactacatccacttgaagtacaccgctatcggttcgggccctttccctgtttgagacaaggaatcctaaatccgaaggtacttctccaaggggttcatttccaaacgagtgaaaagttgctggcggagaggaaagtcgaacagaactaggactaacttcatcctcatgattctcaaaaggcaaaacatcaaaacgtgcactgccaccaccctgagaagatgaactgcttgcaccacgcataacctcagaattggtccgagatacaccattatgaactgagactgaactatcaattccattgactgcatttgagttagccgaaacattcacagagagtgtgtctgaagattgttgttctttaaacaaagtactagatgtagtagtag

SEQ ID NO: 15708 - DNA, 5323 bp, Cannabis sativa
atatatttatttatatgggtgagagagataaacacgatgtcaaaaatttaagatgatttttcttttaagattaaaattttagaataatgcttataatttttttgagtgattacaataatgcttataaaaatatagaaagttgattagataacaatataatatagaaggaagcacatactacatagtaactaaaaaacaaaaaaggaagaaaaacaggaagcttagctcggaatgtcagttattttttataattgggtattgattgcttccattccatgaagtcaggtatgtatgtatgggttatgcttccttccttccttccttatacaattcaatggaaatagcacaaatcttcactcactgacgctgaccttttattctctctctgtaatttttgctgtggctcagaactcagatctaaatctgccccctctctcgtgtgacgtaaaactaaaatctccacataaaaaaatcctcctttttggtaaaaccgaaaagctcgctttgaatctacttctactacaatggcggtctaggaggaagaggacgcagtgatgatgatgaaccggagagactcttttatcggaggaaggaataatattcctttgttggcgcagcaccggcgaggtcaaagtttaaatctcgctggaaataaggcggacgccgtcgatgaaaacttagatctgttctcaaagaaccggcggagtctctccgtcacatcctctgatgaatcctcagatggtacattttttttatgctcttttagtggatcgaaatgccccttctgtactggactgtctttacttgtctttttcttgtcaatcgtgaggctgttcaatgcttaaggacaaacatggaaactaaactatattatacagattaattttgtcggcatgtataactacgacttgtggctgattttttgatttatattttctttttggaatggcattttccggtgattagacatgttttggataataaaaacgagacagtggaaatcgatgtctccattctcaatttcgtgttttttttttttttagatttttgatcatatgagtgtttttaccttttagattagattagataatgataatctataattatttctaattgtgagtaatattcttacatttgtatttgtattctatagtttcggtgaaattggggaaactatcagttggatcggcgaaagtgtctcgtagtggcatcgatgatttgttgtcttccacagacggtggaaaacacgactacgattggttggtctcttttaactatttaatttaatatttatacagattacacacatatcatcactactatttaatatatcacatattatcatatttcaaaattcacaaatttcacaataataatttcccgatatttagccagtagatttctttcaaatatcacattcggccctgtgatctcttaaatgttgttacttatacccacagtttttaaatccaaacttaaaaaaagtgtattagagatagtctcacattattattactaatgtgtaaaaataaattaggatatataagatgatgaactactccttttgccaattaattttaagatagaaccacattcatcttatttctaaattctaacactatcattcttttttcatcgtgttccttcatttcaattcagatctgcttcttgttctttgtattgattttgctgaagagttggtatatttatgtagcttatatattatatgctgttggcacgtgggatatattggtatgattgtgtcagctttagcttaaattcttacaattttgattttgggtacttaaaaggcttcatatcaataaaaatattatctattcttatattatatatctaatatccttcatatttcttgtttggaattttgagtcatatatatatttatataaaaagtctgtacattctcttctcaagtaattttccactggaaagcttttatgcagattcaaacatcagttaagtgaaaaactacaccttactcaatagagaaaataagaaatgaatcttgtcgtcagtgatatgattttcactagcagtgacggagctaggggcggatgcccccaaatatttttaaattttttaaaattatatgtaaaaactaattaagaaaataaaataaaataattttatatactcttacatggcctctccattgatttcggtctggctcagccattgattttcagtgcatatatttttttttttaagaaagtagtatatctctaattagactctgataccatgttgtgaattatgagggtctatctcaaaactaattgacaatgagtggagtagtccatgttcttatatatgactcaattctctaccatttattccatgtgggacaatgtccacaataatggtcaactaaatgttattttattagactattgctctattagggtggtggtggttcctttgataattgttgaaattgtacggatcgtagttatcagtgtttaatttgtttgtatgccatatttctcttttccctccccactaggcttctcactcctcctggaactccaacaatattccctacatcagagtcaagtgaatctaaaccaaccgtagcggctacgagaagcagttccttagccagatcatcgtctactactaaggcttcaagggtatgtgcaaccatgtattattgtatttcaaacattagttgcatcattgcaggtgtgctggcattatcttcttttgtgtttgttcatgcgtactgtactagctgtgttctgctgcagtacttctctgacattaattttcacttaagcagatttaccatttattttcagctataaagtattgaaatgtgattaaatctgtgtcatattctctgtttcagctatcagcttcacaagctgagaatagtcaccattcaagaccagctagaagcagctcagtgactcgctcctcaacctccacatcaatgtatggtaactattcctcgaacagatctggatcaatacttaacactagctctgcatcagtttcatcttatacaaggccatcctctcccattacccgttctacatctagtgcaagaccctccactcctggacgcacatcaatatcaagaccttccacaccttctagagctcgcccaactctatccaactcatctgctgaaaaaagtcgaccagttcaaagctctaggccctccactcccagttctagaccacaaatcccggcaaacttgagttctccagttgttcgatcgaattcccgtccatctacccctacccgtaggaatccagcaccatctatttccccagcagcaagtccttcactgtcagctgcccgtgtgctatcaaatggacgcaatccaaatccgccatccagaccaagctcgcctggaccgcgtgttcggcctcctcagcctgttatcccgcctgatttttctcatgacacacccccaaaccttagaaccactttaccagcagataggccggtttctgcaggtaggtcaagaccaggcgctacagtctcagcgaaaggaaattcagataccacagcggctaccaatatctcaagaagacattcatcacccattgtcacaagaggaagactttcagaaccaactggaaggggtcgtcaacatggaaatggacaccatactgatgctgaagctcggaagggctcccatcttccagattcggcaatgagaaaacctgtaaaaacatcaacaacatctgccgatgccaatggcaatggatttgggaggacgatctccaaaagatctctggatatggctatcaggcatatggtatgcatactctctgtttcataatataatgttaaatgacacactaaatggaggtcaacagttttagattttaaattactaattgcgtgcgtgaccaatttgtcattctaaaatatgccaaaaaatacaagtattagaatatgattctttttcttaacaatgtttagaactcttgacaatgatacatcaaacaaaggacccatagctggccactgtcatttagaatgtcgcgacacctttcaaatttcccaatatattttatgttcttattattgtaaggcgatctgtcttgaacttggccattatagaacagctaaactcttccgggatataatcttggtggattcctgtgaaaggattgaatacacaatcaaaatcttatcatataatttaatctgttgaaactataatttgtcaatgtatgctgaatgtagaaaggcactgtgtgcatcatagttggttgaaatggaatgagaacttcagtatcatactcaatcttctacttctgttgctgtagcaaaatgtgtcatgattcttgaagatgaaggttgcatccagttagataaatcctgacatctgaaatttcttatgtaggatataagaagtggtgcagggaacagtcggtcacttaccggtaccacactcttcccacaaagcattcgatccacgacctcaaaaacccagtcggttcgaagtttgagttcttcatcatctgtcagcatgaatggagggttacaaaccaactataatggaatcatgttagagaatgacaatattgatcggtccgctgaaaatggaattgaatctcatgctggtagacattttgcaaagttgagtgaaatagacatgtatgagagctcacgatatgatgcgattttgctgaaagaagacttgaaaaacacaaactggctgcactgtattgatgacaaaacagatcaggggcctatttttgacaatggattcgaaactctgcctgagcctttcggtctcttataacgtctggagagtggttttcttaaaatattctcttgtattcagtttgtatttttcttttattattgttaagttatcatatcgatgaaattatttggtttctttaacgaacaatggagtctgtaaatcactccaaacatgaaagaatgagaaggcagtatgtgtttctggagagagataaatgaaatatttattctgtatttgcaaattataatggtgtggtgcatagttagttctgagtctcccgcgtagccttctaattcttgaccccaaaaacagggttaaattgggaagtatctaaaattttaagtttgtaaatgacatatatttaatatttttttagccattgtatgttttttttaattttattttgttttaaatttattaaaaaagtctttagaagtaattgatactatatgtttttatccggacctaatgatctagaatttgagcattatatgtgtcctgttatagacaataacaaagtatgtattgatggaaataaagtaaaattacaattagggctgagcatcggtcggt

SEQ ID NO: 15709 - DNA, 8153 bp, Cannabis sativa
catttagaacattgttacaacaccatagttgtacgatgccttcacactaattatttatcaatgagttgctgtacaaatatacattataattaatgactacataactacaaacatgttattatttataattttcataaataattttattgatacaactaataaatataaacactgcgtccaagcaaattaaataatatgtgttgatgtttcatgtagatacacatataattacctatatttgataatttattttaattttatatatatattcttcttttttttatgatatatatgtttatatcatatatagacaattacatactatgtatcccacatctacttattttctttatatatatattaatatatatatatatatgacttctacaagaattttcatttttggggatcaacatcatcccatatatgttgagttttaagttagtgtgtgggttataagatattaaaatatataatttttaggattttttttgtcattattaaggaaacaactaatatattgggactgttgatactgttctgggagcagtatcatgagagataggatttgaatcaataaagttcttgtataagtgttgggaaatagaaagagtgttggaaagaaactttaacgggataggttatattttataactcaatttctgtaatttttggcttggtaaaaaatgcttagggtatctctttataataggactctataaattactctaaaaacataattaaaagactagccacccccaatttaaacctgatttgtgactccaagaatgattgataatttaagaaatgtttctctcttgaatatcttggtaaatatatttactactttgtcttgagaattcatatactccactctcacttctttttttctgactaacaattctaacattataatgaatatttatttggtcttgtgcatgttaggtagcgtaaaacttctagaaagatttttgaagagagttaggaaaacttcttaggtacttcattagtcttattgagtaattaaaataattttatcttattcgttcacgtacatcaatgctaaggtaataagacatgagccaaatgtatgtcgtatcaaactcttttgtcatgtctttcttgaatttctccaacataattaagttgttatcagtgacgatcaagtcatccacatacaagcatacaaccaaaatatagtcattcttaatttttatataaagtgaatgctcatattgaaacttggtaaaattgttgtcatgaaagtacttgtcaattcgagtatttcaagttcttagcgcttgctttaggtcatataaaaccttcttcaagtttaaaactttatcttcatgcccttttacttcatatcccaatagttgaacaatttagacttcttcttcaaagtacactcattttataccttgatttatacctttccacaacttttaagtttcttcttcatcttgtacactcatttaactccaattggcttgtatctttgaagatgatttagctagctctaatatgttgttcttagtaggcgttcacattcaacaaaagactcattagagaaatgtcatttttgttctcagttactttatgaagttattattagcttttaaagtatagtttcttatcatttgacgaatcttcttgtatgtttctggttgttatgattagtggtgtaataggtttttgaggttcttcttccatccttagtagctctactgcatctttctcttcaaagtaaggatgaaaatataccaatcttctaaagttttctaatccaaagaatcttctctatcaaactctacatcgcgaatgatcatagctttgtcatgtgctactgcttgtctaggatagataactgggacccttacccaattggataaatgatctttccagactaatcctttgattttgtttttcaaggagtcacatttatttgttctatgaccaatattgaagtcgtaataacaacttttatttgggtgtctctttttctttcctcatttgtacataggtggaggtatttttgtaatggaccatattacaagtggtctggtaaacattctcacaattattaatcaagctagtatactcagagtatctcaattcttgagtacttccgttctttgtagactcattttggcttgaagctttggaacttcttttgctttggaaatgaattacctttgactctggaaattttctttgttggtttgtttgtttgggaacaacactgtatccaaattgtgctactacatagtcagagaaactggtttgtgcagctgggtgtacgaaaatattctgtccgtaaattgtgagagttataattgtggttgttgaaggaaagatattcagagcagccatctgtaaagtttgagcagttgttgtattaggagtagttgctggaagtactccataagcttgagcgtaggcatcttctaggtttatgaatccttggtctctggataagaagtaagataatgaatctaccctctacctttaaagttttccctattacaaggatgcagtggttattcctcatgtgaaagccatcatcttcatatcatcagtaaccttagtctttgttgtcgtatccatcatgcattagatgtacttcttgaggctttctcctggttgttgtttaatctttgtgaaagaactaacttccaagttgaaatcctttgttgctatgaattgtttcttaaacattgtctataaatccttccagttatgaattgatgtgaaagataaaatatttcaccaattgggcagacttagtaataagcgtaggcactttgcatcatcactagattttgctacctgcatcatttggttgtacattgatagatggtccttagggtccatttttccttcgtacaattccattaaggaattctaaaatgttcttgcaactgtgcatctatgattcttttcacacatgtttatgtatcctcctcctcccagtttgacacagttctgatttgattcaaggagatcctttcggagagcttcgttagctcttcaattttccactccaaacattgagtcatggtgtctagtgattcccttccataaataagatcattgatatagtttcttaggccatcttcgcgaggtctgactttctcaaacctagctttttctcttttgacgtttaaccttgttcgaagatctttcgtggaaagacttctacttttgtcatgtgatggcagatacacttcctcgacattatcacttggactgatagaatcatcacagtgatttgtgtccttccaagtagcagtcttcttggcatttctgcacaattctgcctctagaattagttggtcaccatttcctaaggtatgtagtgttcctttctttttcttttcagtttttcggatagatttggatttatttatttatttttgtttagattaggcaaccttcttttaagttttgcctactttttctttccttttgtccttatgacgatcgtaagttccatgatttttgggatcaactttcctggtagtgttagcttttggagcattatgattagcattgcttgtagaggttagtgcttcaattaagacctccattcttgccatttttttgtgcatcagcaaaaattattcttgcaacgatattttatcttcagtttcattcaaaaatattgccataatgaccatcggatctaactcatttggatgttcttccttttcagcgtcatcatcaacaggcatgtcttgatgattatctttaggatcaacagaataagtctcctctaattcatcgccttcattcatgggatctagtccaactttgatggacttaaaatggggtttttgtagtagtggttgatccttcttgtggcaattggtcacctaagttggatcttcaacatctcctgtattaacattgggatcagcatcaccctttttacgttcagtataatgaagaccagattgggttcgggtgagcaccataattattgaatgtattcttgaatggtatcattgctttcttcaactctaactgaaagcaccaaaatatttacgaagattttcagaatactaattatttaatattagagctaaagaatataaaattaagagtttgataaatgaatgagacacttagattttttacgtggttagggtattaatatgtcttagcccacgagtcagtataattatcagataggctaaaaaaccctaagggtttatgatgagtatgagaactttattctcttcccgagcaagtaagtcaacaaattctaaccctttgcatgaatgattcaatatttatttatagagtaatagaggtcttacttagttaccctttctctctaatgggatgtttgcacataatttggcttatttagtgaagcccaggccatgaggcaatacatctatgctgatgtggagatatgatcacggtgatagttgttcatatggtgtcatttcattatggataattaatgtggaattaattatttgatcttcaattaattcatttttcctttttagacaagttattattctctgcccacgatcttaggagaacatcccttattctatgtggagcattaaacgagaaattggaattgtcttccgagtacacgctaggactctctttcaggtacacagaatttgactctcttccgtatactgactagacttgacggaagctcatctggtgaggcgtgcatttattctctcggaaggctacataacattagggcttggcccaacatatgttatttgggcccattgatgaactataagcttctatttaaatctacgtgtctcttgtcgaaaacatggataacaataagaaagctctaataatgtaccatattaaatcaataatttaatatttaacagtatgatcacaatcaatgacagatcaagattgaagaaaaaaattttgaggattcttataaattatatattatggatattatcttattatgataaattatgggacactctccaagagtctcttcaaagggattaaaatagttttgcaatagatttttgggaattaacctagcggaaagttaattaaaaaaattaaaattttttgttttagaaaatatattaattatgatgttattttgaaaataaaaagaattaaaattaatataaagaacaagccactattataattttctacacctaaccaataacattattgaactagattcactatccatagggattaaaataaattcctcatcctaaaaaatctttctatatattgatttgagagaatgtatatattttatttttcttttactatttatttgtaaaagatttttgtttaacataacatatgtgtagttttttttttaagttctatgttgagtgtaacaattgtaattttctttctatattattacctaataaattaatctagtccatgaattaatatttataaaaattaattttactcatgatttgattttagtgtgatatgtacgtgttattctataataaaataatttgtgtgttctgcataatcataaaaatttgtaaccccaatataaggccaattatataaataaattccacaactataataagttttacaaacatgttcgtcctgatatttttataatagagtattttacattatatattttctaattttaaaatattgtgtttagttactttagtaaacaaaattcaaaattaaaaatatttattgactttttttaatattattattttttttgtaaaaaaaaaaggaaaattggaacatcaatagttatgcatttcttttatttttgtatgagtctataagatgctttaatttattgaaaagtaaatttaatgtaagtttacatcaaaaggatataattttaaaaatacaaataggtaacattttaatttaaccaagttagtgctttgctttagttcttgtatgcctactcaagattatgctggttttaataatatagttgataactaactctagtttaacaattagttttattgtaaaagttagttatcttttttgttaaaggtgcaatagtttaggtaaagttgtattaaacccttttgtttagatgagctatagataagatgaccacctaaacaattgctaaagtttttcccattttcacttattttcaaatcttctctcttattcctctatagcaaaatctctttcatggtattagagccaactgagtcacgtccatggccaattcattaaacaatcctcaattcgataatgatgtaagcaatgctcctggaatgatacaatttgccccaaccctagtgacctctgattatccgaatcaaccatggaaccctttctctaattccctcaatttttcattaaagatctagcttgatcaatgaaatttcatgtcatggatatctaaagtagttctcactattataggccacaatcttgatgactttctgttcagtggtgataagcctccaaagttcttgattactgatgactcgaaacctgtcttcaaacaatggaaacataaacattagctattactttcatggttgcgatcttcaatgacagaagtagtcttagcatccctggcttcgcacaccacctctcatttgttatggaaagctctcgagaaacgatttttttagtgagttaaaagtctgtcgtttgcaactcaaagtttagttgtgtaacatccagaaaggtaatttttccatctcagattttatggacaaagttaaagcattcagtgatagtttgggcatagttgagtatggcgtaagtgagaagatcttgagcttcatttgcttaatagattacggcccgaatatgactctacagttttgggtataacatcaagtactgagttcaaatctatggatgaagttcaagctttgttaatggctcatgagttttttcttgaacgtcacaacactaaatctgatttttcctctaagatgttagccaatctcactattgggtcttcaagaatcaatcacctaggtccctataggcccccttttactcgaggtttggcttctgaatctgtattaagaactggtattaagccctttagtccattttctcttgatggatctagacctttgtttcaagtttgcctaaaattgtgacacaccactacaatatgtcactaccgatttaataaagctttcgttacccctaaagcttctcaagaaacctcaatcatatcttgctgaaactgaatctgttactaaaacccaagaatattcatcctcaaccatactagatttgctagtgtctttacgtggtatgtcaacaccggtgcgaccaatcatgttgccttttgtatggaacatcttcacaaatccattccctatataggttttgagtctcttgctataggatatggtaaggaattagtaacttctcaatattggtcatgctcttcttcctcctttctctaaccctcttttacaattaaattctgttttgaatgttccttccataactaagaatcttgttagtgtttccaaattaacagatgacaatgatgtgtttcttgcgtttcacaagtcttgttgttttgttaaggaaaaacaatctagaacggtactgctaaaaggaaaatgtaaaaatagcttgtacatgcttggatatgagtctcaatctttatcagcacctagtttgtagtgtcatctggccacttcttccacttcattagctgggtcaattcaaccatgcagtcttgagtcaccatcttgtactcattcttgtaatgatattactgtaccaaataattgtactcaaactaatattaataaaaactcagattcttctctttctcataatctccaagcattattaatttctgtttctaatgatataaatgtatggcattgcaaattaggtcatcgctcttctagagttctaagaaaaatactttctaaaatacctaactcgggattcattaaaaatttaaaattttgtgaaccatgtcaaaaaggaaaaagtcataaacttcctttttcattgtccacaactcatgctaatcaatctctataactcttacacactgatttatggggaccttcttatgttccttccaaagatgggttatggtattatgttcacattattgatgacttcagtagattcacttggatatttccattacctcaaaaaactcaaacttttgaggt

SEQ ID NO: 15710 - DNA, 4765 bp, Cannabis sativa
ctctctctctctctcttgttttcttttttcgctcgatcccccttcccattttgttcagcgatatttatagagttttgtaatggtagctataaaagggatcacttgtctttgagtgccagtaatgtatgagcacaagttcccaagagatacaaaatagggcaggcatgacctatgccgtaggtatcataagattagatgagattaatctttatccttccttgattgatgtgattcttcataatggagtcgtcactagcccctttgattgtcgtgtaatcgccgtaaacaaggcttacactgtctgacatgttctcttacgggcgttctaagacgttttccccatgctgcattaaatgtgaagtgactgttcgaataggttctccttctcccggagatgctttgttatatttctagctcccggagaggaatgacatgctttatatacttccttagaggctcattccctgaagtacacttatccgtctatatgtgactcggctagttctcggataaggtgtccttttgatccacgtgtcatacgcaaccgtggtcacatattttgagaaaaattcgagacaacaacttattttgctaattttttgtattaattttatttaatatttatatcttatatttttttattaaattttataatttctattttattataaatattagtaaagacactttaaaaagtggtttaatatatatgattataagattctattgttaattacataattgtttggtcttatacattttatatttttattttttaatattatattaaatttattttatagctgttgtgtattgttttgtaaaatgtgtggtagtttttatgtgccagcataattgtttggataccatatatgtggtttgccatatatgaagatttaaagtttaaaattcttagttttgggttcattataagaatagtatatggcaacactaacactctccattcgagagatttctaagcgaaatttttatttactaaaattgaaatttagaatatttttttaatattgttgattaaattcataatttagtgaatattatcatttagtaaagtgtaactgaattttatatattttttattagtaagatttttacttcactaacttaattattcaaagattcaaaaagtttcaatgaaataagtttttttattacaatccatttctaaaaattactatctcattaacttatatatgtcgtaagttctaaattacttattttaacgttttcttaaaaaattactaattttatctatctttagtaattttatagaaactctttattggtaggattaaaatgagctcaagatatcttattttaagatattaaaattttattatttaattttattaaggtatctcttttatgttagtgtaattttatattgccactcataaattgattaagcatatttttagaataaataatgtattttcttgaatgggagagacccttcatcttttatggtattttttttattttctggtcattacagtgaccatgacaaaaaaaaaaatctccggtcaaatttgtataattggtgatttctgatttggatcatttgttagaaaaaaaaaaaaaaaaaatagagtctttacaaaaaaatattaaattttgaataaaagattataatttgacagctacacaaaattttttataaaaatattatcttttataaaataaccataaaacaaaaacttaatacaatagatataattaaacacacagtatttaaaaaaaaacacaatattctttttttaaaaaaaatccacccttaaataaaaaagaaaaaaaaaaagaaaattttcagtggtgtaaaaacctcaacaaaaaaaattttggtacgttaatggttatatcaaatagcccatagtagctcccgaccagaaaacataaacgtacattttgtgaactgtagatactccgatgatacccatatttatatacatgatacctgaaccgaaagtcaacatgttctacttccgagaaggttcctcatccatagctacataaaaatcaaacaaggattgtcttctgtttttacaatataataatatatacacatgtttccatctatctatatatgtatgtaacgaatcagagaaggtttaacacaaccaccgccaacactcaattctctttctctgtttttgcttcaaacaccatgctctgttaagctccttcatctctgagtttccttcctttcattttttatctctgttatttatcatgatatttattctttagaattttctgttgttcttatctgaaagattctttgattcgggttctttttttttaggtgttgagggtagtttagaactttcccaggtgtttgttttttgttttattttgttttgtaataatcaatatttttggggtttcgttggcaataattttgttagaggaagatatagtttcatctggtttgggttgttgtgatctgacttagttttttcaagattgaatgattatggatccaagtttcacagaatattcagatttcacaaatgggtccaaaatcgaaaagcagaccagtatatccaattcaaatgagtattcagttctctcagatgaatacacactaaaccaacactctccatattttgacttcattaatgattacccaaaccttttttttccacctgatcctgaccctggtaatttcatgccctccattaacttgtcttctttggaagaaccatctttaccttcttccacactgagcccagatggaaactcatctactcctccaagtctgagcccagggggtgactcctccaacgatgaaaaagaattctcaatttatgttctcaagttcatcaaccagatccttatggaagaaaacatggacgagaaacccagttcgtttaatgatcccatgagtcttcaagtcactgagaaatcattctatgatgcccttggtgagagttatccttattcaaccaaccagtctcctacagatgataaagctgagaccccagatagcaatttttcagtaagctctaacgactatgggggcagtaatactagtactattactatcgacagtaacagtaacagtcatgatgctaatagccctggtctaggagactataaagcctctccatttcagccctttgttcccggtgacaacaatttccagtttgatttggtttcggctcagaatatatttaggaacagtgattcaatctctcagtttcagagaggttttgaggaagcaagtaagttcctccctaaaggtaatcagctcatcattgatctggagagcaatggattctcaccccagttgaagacagatgcagtagttgtgaaaactgagagggaaagctcacctaacgggttgaggggaaggaagaatcatgagagggaagatgatgattcagaagaaaacagaagtaataagcagtctgcacagtatatagatgagagtgagttatcagagatgtttgataaagtgttgcttcaagttgatcataggtgcgaccacagcggtgagactgaacctgcacagagtgaagcaagcaaggccttgcagccggctgagtctaatgccaatggcaaaaagggtcgcggcaagagacagaacaaaaagaaggaaactgtggatttgagaacccttttgattctgtgcgctcaagctgtgtccagtgatgatagaaggactgcatatgagattttaaagcagattaggcagcattcttctcctaatggggatggatcccagagattggcccatttctttgccaatggccttgatgctcgtttggctggaattggaactggagccttattctatagtaacttacttgccaatgtgaaagcttctgaccttttgaaagcataccaccttaatctttctacttgtcctttcaagaagatggccatgttctttgcgaacaagatgatcatgcaggtggctgagaaagcaacaacgctacacatcgttgatttcggtatcctctatggttttcagtggccaatcttcatccagtatctctcaaaaagagatggtggacctcctaatcttcgtattacaggtatagagttccctcagaatggtttccggccaaaacagagaattgaagagacagggcggcgtttaacaaagtactgcgaacggtttggggtgcctttcaggtacaatgccatagcaacaaagaattgggattgcataagcgttgaggacatagagattgaaagcaacgaagtcgttgctgtaaattgtttgatgaggttcaacaacgtgctagaggaaactgttgaaaactgcccaagagatgctgttctgagacttatcaggaagataaatccaaccatttttgttaataacattgtcaatggatcctacaacgctccattttttgttactcgttttcgtgaactcatgttccacttctctgccttgcttgacatgctggacaccaacgtatccaaggaaaacgaagagaggttgatgtatgaaagagaattctatgggcgggagatagtgaatgtgatagcatgtgaaggagaagacagagtagagaggcctgagacgtacaagcagtggcacgttcggagcttgagagctggttttcggtcactccctctcgaccaagagataatgggcaaatttaaagacaagttgagaacatggtaccacaaggattttgtgattgatgaagacaccaactggatgcttcaaggatggaaaggaaggattgtttatgcttcctcatgttgggtccctgcatagggacct

SEQ ID NO: 15711 - DNA, 5612 bp, Cannabis sativa
atgccgacccaaaacaaaaggcgatttcaatgccggtgcacgctttctcttatccaaaagagaagtatcagaaaaagtgtccttagcttcttcatcagtaggaatgacaactgtcttttcaccaacaatacctggattgggttctgtgactctgtctcgtagagtccgccgcttcgttcaaaacctaaagtcaaatcctcctttgaagaaatttcctctaatgcctcaaaccttgacccacttctcattaacccctgtgagtcacctacttcccacacattattggtagtcatgcttgcttttcttgttacaaatctcattcatttgtctctcaaccctttggtgtttggcgctagccccaggccataaactactggaatctcatgaagtatccgtgttgtatcatgaattacagaactaatttatgttctcatagtctattcttttatatatttgcactcgtatttgcaatctagtccattttaagtttttagaagtttattctcgtgtaaatatcatatcattctcaaagcttgttcagtggcggaaggtctaagccaaattagaacacattcaacgcgttccctgcccatgatatcatgcgttttcagtatgtactcgatagagggcattcggtacgaaaatttgtagactacaaaaatcaagacacttcgaattgtaattgccataaagcacaacagatgacgattcagttttacttacttcccttgagaacataacaagtacagaggaaacatgttactgagccaagattggaaatggctttgtgcagagccaatttttttgttttcttttttgcagtacagagccaaggagtatcacatacaacaatgtaaagcgatttacctatacataaaattttcttttcccaatcgaatggactgcgaaatcacaaaagtaatccagatatttacaaattgacaaaagttaaactccctcgaaagcaaagggcctatttgatgttacccaccaaatttttttaaaaaaaaatagaaaaaataatctcagttcttaagagatattaacttgcttcaaaaatataagtgggcaaaaaaattatgtacttttaacctatttgattgaataggatcgagtacaaacagactcaagtgcctctgtaaataaggaagaaaagctagtcaatgcttgaaacactcctggcaaacccgtttgaagattgtttagcgtcatggcccttgttacctcagctgccttggaatgcctcatcatttcatcttgcactcgtctctggcaagctgcaagttctgtctttttctcagcgagcgggtcccgagcatccaaggctaatccgccttctgccccagacccagattcgggcatcccaataccaaccatggagtacgactggtagaatttcctctctaagtttcggatagatgatgccttcttctcgagctcctttgatgcactttcagtgcgcttttttaccttaagctcttcactttgcttagcagatatcacatggacaacattgataaagctcttgatggcctcagatgccactgtgtctggaacacgatcaagtgcaagcttccactcatcacaaaagacatacacatcagagggctctctgttgccattgacattgtcattgtcaacaggagtaagagtgagcttgaaccatccatgcagtgacctaacaaagtcccgttggaactttatcaagcggcaaaaactggaatgccatgaagagacagctgattcaaggtcacgggttgcctgccggtgtagctcagaagttgattcacccttcgacgttctgttcacaagaccacgaacttgttgcacaatattattttgaatttcatggtactggtgcattgatctccacatatacataaacctacatttaacacatgagcgaaatataggtcagaaggatgtgaacatttgttagttgtcatgaaacctatcacaataaaatagagggtcgtaaaacttcgggactaggcagacaggcaatcagtacttaacacgaattcagaattacttgttagatagtccatatgcagtagactgaaagagaaatttcatcactgattttactttggaaaagcaacactgctgtttatttccttcctgatttattgttaattattttctcgttcaagcaatggtaccttagtactagagccctactgaatagatggaaggtaataaaggccagcggccccactggtgaagataaaagagggaaaaagaaaatctctgagttttttcgtattatgtgaacataaataattgaaaggcaattacacattttgagagccaatataaactggtttgtcagaattcaggaatcatcttactactaccactatataaaatgtacaaatataaaagaaataacaaatgaagctttttatactaatagtgttgtaaataacagcaatgccaatgatgcttaaaatgatgtgatgatgatttccttgactaaatcacatctattgataatattgaaccagacaaataattctagaatcttaaagaaagacaatagtgggtgggccacatacaaatgaagtccaactcacctaactccacatacaataactttttgggtccttaaaatggatctggagataagtgaaacataaccacccaaaagccagatactgggccaccatttagtattgagaaatatctagcagctggataacccagtacaactaaggcacatgtgcttccagagaggatgaagcaagtggtactatagcagtaatcaataatgactttcatctaccaagtcaatgcatgtagtattttgcattgtgaatgagagaattcaaaccagtacaaaagtaaagcgtatctactctaaatatatctaactaccagagagagttctgatcctcaaagcttccactttgagctatcatactgaggacgcactagcaattcacattctcaacacattttagtgccacatttaacactaacgtctataagtgacatcaagttgactgactacactatacaataagacacgtagcatataagaaatgtaaagggataaaaaaaaaaggatttttttttttgaagttcaattataatttcatgttagctttcaggtgaaactaatgaaacggcaagtggacaatttaaaatcatcaaattgatcatgaaacgccaatgtcttcatatgaccaacatatcacattttgtgtaaactctttcgatttcaaccaatgttttgtgcgtattaaatcatatgttctaaccaaacgtaattagattgagtcagttcacagccggccacaatttatggttggttaaaatcaagatagtcgatacttacccgtgacagagttcaacgagctgaggaactaggtcagtgtctctgagaccaatgatggcagttgaggttgtagaaacggcctgagaggtgactataatgagtgattgcagcttctttaaggaagttttggtcttgtctagcttaatttcatcttctcctttgtactcttgactttgtagcagtgacaacttcttttcatgctctatcttgacagtttctcttgcctaaatttcaaaaacaaagcagtttgcaacataaactttataacatttagaaaggagaaaggaatataaataaataaagaaaatctcctacaaaaatttctctaaaagttaaatacaatttatgaaaagattcaaagtagtccacacgaaaaagatagttgaaacccaaccatgttcacactcatccacatggaatgttgtcaagggcatatcagtgaataaactatggggttggagaaagttacgaaagtagcaaaaagccaacatggaataactaaacaccataaaagatgctacttctacttaatacaaaccgtccaatttacagcaattacccagatagacaggacaccaacgaagtggagcccaccatttgagcagggatgaaaatgtcaataaacaaagtatttaactttttgagaatagtcaaatactgctgtggattaacgctatccaccaccgtccataccaggtctattatctatatgattactcattacactatggtgacccattttcttaataaaaattaaatgaattaaattaataccttcacttcctcgtaaagcttcttttcccaagccaagaggcggtccaaagtggagcaaaggctctttggaccgcccggctgttcgagtgaagtggcgtcgagcctgtacctaacagccaggggcggttttgaggtccagctagagctcaacgtactaagtacactgctcgagtgataaacggtctctgtttgaaataaaaaataaataaataaaaattgaaattttgcaccagtatgaagaaacaaaacagagaagaaaaacaacaagaacgaaaaaatagggcaattgagtgaaaatgagttaacgtccaataagcataaattccattcccacttacttttaagctgcttaaagctccgatcaagctgagccctcccagtctccagcatttccgagacctggtctccggcagccgcggctttttcaaaattctctttaatagcctccacgatttccttaagatccttgtgcctcacaaccattttcatgtccgaaatctccccgtagttggctgacgagttctccgtcctcctctcggacttgctggtactggccgcgtacttgggtggctgtggaggctgaacaggtgcagttgcagcactcaccgattccgcccgagtcgacgatccaaaattcgagtgcacacccatctcggatctcgaatccctatcgtcatcttcatcctcagacgagcttgttgtgctgtaatggtcgccccactcgctgcactggacctcttccctctctgtctcggtaaaatcgtgcttctggtgatgaaggtgatcttcttgaaccttcggatggaaaaaatcgtactccgatctttcggtctctgtctccgtttccatttctatttcggagtcaccttcatcgtcgtcgtcatgattagattgcttctcctgtgggaactgcttcgtctcggtcctgcgctgattgaaaaattcggaatcgggcggtgaaggagggtaaaagttttcccagttccaaatcgatgatgcctgagatggagtactggtataggtcgagttggcctggaaagcagtgggaaatccagtagtaaaattggacttctggctctgaggggaagacgacggactcgattccgagagaatgtggggaagcttcggctgttgctgtttacggcggcgctgaatgttgtggctccgggaaggaggaaccgaagaggcgagagacgaagaagaaagtatgtggggtagctttgagctggctatagtgggagaatgagccggaaacggagaaaatggcggcggaggaggttggtggagcgacggggagggagatagaacacgtggggagatgggtttttcggagggaggcggcggatgtttctggtacagctgcggcggagggtggaggaagactgcgggggtctggtcagagacggccagaggttcataggaggcgaaggaagtgagtgcggagccggtgacgcggagggagcggcagtagtcggcgtgagcagcagccaagtggtgg

SEQ ID NO: 15712 - DNA, 5611 bp, Cannabis sativa
atgttaatgctgtgctattgtgttttaacttttgaacaagttgaagacattgttttttgttgaggccaaatttatattgtttgtcaattagtttctttgcgaaagttagattacaacatgtgtttattgtttcaggatgcagaggcagattttaaagtgaattggaaacgagtagcgatcacaagttcgtttggttttggttttgttggacctgttggccacttctggttcgtgtttcctatcttttcactgggggtcagttattcatctttgtttgttaactgctgcgactgccttcccacagccgttaaaagcatctgtgcatgtgatttttgctgataggaaagaaaatccatatatcaattctcagttcaggcaacatgtagtttctgttttcttgataaattgttttgaattgcaaaaattattctctatgctgcattttttgctatttacaagaatgggggcactgctatcaaatttgccgggacgtgatattctaaccataaatgtgcaaaaagagctttagtttaagatgagtatttttcatactgaaatttttaggggttactcaattaaaccttgtaggtacgaaggcttggacaagtttttaaggctgaagcttcttcaacagccaaagtcattgcggtttgtggccactaaggtcgcaatggatgctatcatctttggccctcttgatttgtttgtctttttcacatacatgggcttttctatggggaagagtgttcaacaagtgaaggaagatgtgaagagggatttcatcccagccttgattttggagggcggtatatggccaattgttcaggtggtgaatttccggtatgtcccagtaaggtatcagctactctatgttaatatcttctgcttgttggatagtgcttttctgtcatgggttgagcagcaaaaggatgctgcttggaagcaatggttgtcttggaactctttcaaagaacgaggaggttcgggaagattgtgattcttcttcctatcctcttgcactattacccccctttcattgtattacaccaaaaaagattgtatcagagtgtttgatcgagggtgaaataattggcccctcctaaaattactggcttcgattttcaagccagcatctcgggaatgatactgttcttttctttgttactttttttgttcccatcttgtaaacagacttcatgtctaatgactaataccaaaaaaaaaaaaaggaaaattttccatttggcaaaaaacatacaaccatatagttagtgtcattaacatctttgtataatcataatggtttagatgacagggagaataagctgtacaggaaatgtagttggaatgttattataccaacagcagaattgtggcttacaagttacaactacaaaatactaactgatgttctgaggagtaataaaatccatgatcgcattggaagataaacaccattatttatatgaaaatttgccattgttgatgaagactggagggataaccgataggactttgctattcacttccaaaaacactttttaaagaacctctatatttttttttcatttaattatatatttcaatattaagtttctatcaagcaggtggctcatgttgtataatcccatttcacatggaattatcttaacctttttaactatgaaaaaaaatgtacacaccactgtttcccatgaaagttgtctagctttattttggtaggaaaaagtaacaggacatgacagaataaaaaaaattacaacttgttaacataaatgagattctgaaatctattgctagatgacctatgttacaaaacaatttacagagcaggaagcctaaaaaacaaaattactctcaatgaaagagacgggtggttggagcttgcagagagattgtgcaccagtcatgtcattcataccaacaaatgatgttgacaatgattgtggtttaatattatagcctgatttcgaattcatgatcttgttttgaagcaatgtaaccaatttttactggaggaaaatggtctattaggtgaagaagctgctcttaggcaaatcatttccggagtgctagctgttcgcttctgtgttttcataacccagactgaatttacagttgctagatgaacaaactatgacctccgccaagaggaactcttggcttgaataccgcagttacatctaagcaaggacagtatttgaagccaatgctctgtcaagaaattatggcttgttagagctttgaatacattgtaaagacaattcaaatcccagacaaaaaaagaacaattaatagaaactaataaattaaataacatgtggctgaaatataaggacaatggagacttgtgtctctgagggctgaaaggggaaaggactagaaataataccgggatgctcaatagaagcccttgatcatttactaagacaggtaaacctcttcttgcggcagctgggatagattttaggatcagaagagctctttgtgctgaaacccttgcgtgatttaaacaagtgcttgtactgtctgttgaagatgtatctttcagttgagaattttctgaagtgggacacttcaacaagtcagcaagatatagccagtcagattcacacatgtggcgcacctcaggtaccatgtcattaccaaacacacaagaattgcaatgacagcacaaagttccccctcccatatagtcatggctatcagcttccccagatatcgcactgacaggaatttctttctctagtttccatgcgacaaagaagcgattcatgaaggaacaaattttcccatggaaaagtggttcagaatacatactaatagattttactttgtcttttgattcactttctggtattactttctttttcgtcctaaaatgcttgacttcttccctttgcaataacattatgttcttgtacgtcgactcgctaagcatttcaagccttctagctttacttagaactgattcagaggtagtgtccaaaaaatgcacttctgatgcatctggaacaagacaattaaaatgcgatttgctatctgctataatttgctctatatcatttgcagtatgatgttgatgatctgtatatgacattgcatcgaggaacttgactgtttgaggcagaggacaatcaacagaacagcaaaccagggctttggtgcctctagatgcaggtgctggacaaatgtagcaaccagctgctgtaagagatgtctgtgcatatccaaaacaaaataaaaagaaaaatgaattagaaaagggaaagacagcaaaaaaattagagtaatattcggtacagatgtttgcacaccaaaagctaacatgacaacctaatagtaaaatactgcttgagccttaaacaaacaagaactaaaaatataagaaggaaaaataatctttgagaaacaactttttcagtaatgcacaaaggaaaaactagagtgatggaacaagcagtaccctgcatgggaaagtacgcatgtagtccagcagcaattttgaggtactgcctctaattggcctgttcctttgcgagatgaactacagaatcaaagaacagcaccgagaagtgaattgttatttccaaaatctttatttattgtattaagaaaacagataagatatgattaaccttataaagttagctttacctgcaaaatcaaagcaataaacttcgagaggcatatgtcttcaatttttgaagggtttaagatctctaaatcaatgacagcatagccaaactgaaacagaaagcccaaatgaatcttcttcgaggtgttttaaaatgttcgtcttaaaataaggcatcatggtttacacgaacagttaaggaggcttacatctgttacagtgactgctttattcatcaaattggagcaaacattatcaacatataaccgggtttgttgacaagcagaaataactgcttgcagctcagaattgaatccatctggaaaaagaatattagttatccaaccaacatcaaaagcaaataaaagcacaaattactgaaatgaagatatcatttatagcattaacacagagattggattagaaatacttggaaacatgcctactgaaactcacacgatgaacaatctcttaatgacattcgaatcctattacgagcatatagaatactttgatttgtagggtcctccacccaagtttgttgacctccttgacatatctgcaacagatataagataaatagcatgatgatgtttatctcaaaatcaataacagtgcataaaaaaataagaaagaaatatggagacactcgtgtaaaaaccttgtacatgtcttccttggaaaaatccaggagcggtcgcacaagaagaatgccataatcttttgcatcggaagaatgagtgtatgaggagaaaatttgagaaatgaacggcattccagcaagtccaagcacactgctgtggcgtgatagtctaagaacaaataattcagcctgcatgcatctcagaaaccactaattctaacattttcgaagcctccaaaataaatagaaaaggtcaaaactaaaacaatgatacacctaaattttggataaataatcaattctagacagagattttaactaaagggatgctggacaaaacctggtcatccatatgatgtgcgataagtaacgcactgatctggttctggatgcagactttctgaaaatgttggtacctgaaatccaaacccccttctaaagagtcataattcactcttcagcctaacacagacaagtatactacaccataggaagcttagtgtaaaacttttcttcgaaaaagactgtcttaaagaaaatctctaacattttctcatttataaaacacaaaaacaagctctttcaatcaaccccagagagtaaaataaaagtaatcacctcatgtcacgagctgcttcctgcaagtgaccttgtttaggacgaccatcagaccactcacaatggacaatctcacatctgattcctacacaaagtgcatgtaagccatctatatatattctagaaccaaaacaacaaatcaacacaattgaatgtacccattgtagagactcgactagaaacaatgtttgcctcctccttgctctcagcacgcaggctgtgatcgatgattatagccaaaagcccgtcaataaagccatcagaatctcggcttgtattaaggccattggtcttccaatgggcagacaaaacacacaatgccatactatcaggtcctccagagactcccatagctataaaccaaaaaaaagtgtcaatctaagctaagttacgtgaaagaacagtaacaatgaaaaacaaacgacataaacaaaagcttcagtctttgtcatagaataatcagttatgtagataattatcagagatatccaaaaatttaaacttatatattaagaagaataagctctaatcaaccggattagtaataaactagcaaagtttagcgggaaccaaacggaagtaaaggaagatgaaaaatgatttaccgaccgatgcgatggtggggtttcaggccggccaaggtcattcgtctagaaaaagcgtggtgatacttggtcatgtcgatagtctcttgggtggtgaaagaagaagaa

SEQ ID NO: 15713 - DNA, 4951 bp, Cannabis sativa
  modified_base (3312)..(3328): a, c, t, g, unknown or other
  modified_base (4911)..(4916): a, c, t, g, unknown or other
ttaacaaaatacagggtccaatttgtaacttttgcaaaacacagagtccaaaatggtatttaccctataataaatagggacagaatgtggaaaaggggatgaaaaatccttagagaaaaaaatacatacggtgattgtaaagaatgttctgtatcaacaaaatctgaataagaaggactcgtagactatgcagagttaactgtaaaatcacgtaaaaatttggtgttttttctgtttctattattttttttagatcagttataatttctgtgccaatctattacgaaaataggctcataatcgttaacgaaaatctgcgttcaaattaccgtctcatatctcttctatatatatataaattttatggaagacttttataaatgaattgaattttatttataaaataaaaaaaaaaataatcataatgattattaataaaacaggtgataaaaatatgaaattaatttaattaattaatgtatttttaattgaaaataaaattttaataaatcttataaatcttgatataattaataattaattttttgaaaattgtctaatttaatgtttacctaagacatgttcaaacttcacttaaggtcttgttaaaagttgagacgacctgcttatattttttgggagtatttttaaccagcactatatacattgaggaatcatttgatattattattataaattcaagccgcaaaaataacaaattattggaaaatatttatttactttcgtatataacgaccgacccgtgatttttattttagtatatattgatcacatgcataaagctaaggccgaaagcgatattaggatatataatcgagctaaaattaattgaaataataagaaaagacaaacaagaaaaaagacccctaattttatttttttattattaattgaaataataagaaaagacaaacaagaaaaaagactcctaattttattttttttattccgcaacacgtgaaaaacaaacattactgcgtttgcataggtgtcgtatgtatcaacaaatacaataacactacctcttttatctataacaaaaaaaaatatatttctttcattggattaatttgctccacatgttatcaaccatagcagctacctaactgcatatattatatatctcgaccttctgcaattccttccactacaaggaagagacattttatctcaatttttaagttaacaacaataaaaaacgagatgatacattttatctcacttttaaatttggtgccttaaatatacagctaatttcctttttagagaaggactctgtttagtagaacctttagacaaatatcaagtgaaaattaagttcaacactcaatttttatggaagaaattgcattgtatacctactttattttacttgttttaatttttactttaattttcatattctttaagatatacctacttttatagatgatatctcctttatatcctttaggttaaagaaaattgtgtgttgaatttaagtggaaggtgagagtatattagacaatccactcataaaagtgggtagattttaatgaaatataatggacggacccatattcccaagagcttggaatactgatcacctccaaaactactatcaatagttacatttaaactaagtgaacaatgatgtgtgcattatctcaattaaatttaaactaagtgacctcaaaaaattttaaggcacttagattggtactaaggcataaatatatgtaaaggcaggaaaaaaaaccaaaaactgaaggagtaatcaatacaagtgctttcttaaaataaaaagagttgttcaaaaaagaaaagcctggggaaaggctataaaaatgtccccctaacaaaaaagaaagataagaaaaactaaaaattaaaagatatatcgtcttagtgggggtagtagtaagaggaagtgtaagaagatttaattaatctactctcgagggaaggcgaggacccatctggtcagccaggaactggtcaagcttctttgcttctcccagaagcgagccaccgtagcctcaggatccgacatgaaatggaggcaaggttcaaatttgttcaatttccagcacataaaaactatatccttgaagcgcttcacacagtgcttataggtcaccacagttaataatgcatccctcgtagccttcgcaacctccttcatagtctgatcccagaactcacaaaactccttcaactcactgacatacttgctcagtttccatgttggctttatataagtccttaagagccttgggtctggttgtgagtccctgaaactcttctcaagcatttataaggtccttcttcactttggtcaacctagtctgggtggaggcaatgatctcatccttagccatcaaagtctcctggtcccactccctaagggccctctcggccaaagtgtcattccgaagagtctccatctgactctaagcttccccaagcttctttaaaactcaacccatgccacccagctctgagatggcaaacccttagtcgattaacgtcttcgaaagacgaccgatctccgcatcaatctgacaacaatagatagaagtggatcagatctcaaggaaaaataactcaccatctcgaaagcaaaagttgccaaagtccacctaagtagcgtttgaaccagtcggtcttaggatcaagatttagatcccagacctcaccaatgtactcgcctcgaaagggtccatcttgaatctcccttagccacttttttagagccacgactttggcatcaccttttgatagctcgtccacggcatagttttgtttggcaatgcagagctgatttttctcttcgtcgggctgggccagagtcaggaggatggctggaggggcaggaaaatcttcaacctcggctggaatcccaaagtcagtactagcgctggggtaacagaacattttggctttttagaaggctcgggaatggaaaccatacttttctatttctggtcgagtgggtataatggagtgggcataaaaattggcttttatcccaatttttatgaataaatcgcgataatagaatattttttattccaattttttaaatactttttatcatactgtcatacatcccgatttttattttagtaaaaattagaataaaaagccttaaaaatcaaaataaaaaaccttttcttgtagtagtgttcattcttataaatttataattactttaaaaagcaatttttttcttttttagtaagaataaaatttcatttagacatataactttccgaaatggatcctgtcaaataataataataataatannnnnnnnnnnnnnnnntaataataataataataaacttttcgaaaaggatttcttctaatttaaaatttcaaaatagtatttttcgtactctatactgcgtaattatatgcaagattatctctaattataggcaagttattattattccgaccctaacatttacctattttagcgtatttatagttacaatggaggatccattggtcaaatcactttaaaacaaattaaacaaggaacaattatttgcccatttacagtattataaaatatataataatttaaagattaacgaggaaaatagttaatcttatgagagatgacaacatatatatttaaccagaaattagttcttttatataatttccacaaattagaccatacaataacatacatttatatggtacatatccattatatagtaaataaaatattagtaaatttattaatagggtcgctccccaatataattgcccggaggatcatagctacaaataacgaaaatcaagccactgccgcaattagctctagcacagccaaggtgaatggagttgcgccacactatctgagtgtagtggccgcactcgccacccacgcacgagttggagccgtagtcgtaattgggcttctctgtggcccaatacttaacagcctgctgcccactcatttccccataaccttcggccaagttctccccgtaaggtccacccgagtgctcaaactcgcagttgttttttactctgttgttggcgtagttgcgtgcgtaagctgctatggtctcgttccaactcataggcccaactcccacctctgcgcggatggcgttgtgggtatccacgaagtcattgtggtaaggagaagagtagcgctttttactcgctggtggtttcgaagcagtagtagtagtggtactactcattattattgtcccaactaagaagaatactattgaggatgtgatttttagggacctcatcttattagagagtattgatgaatagtttagaggcgttttcttttcttggtacgaaaatgatactaaatggttgcgactttcggttattatttatagtggatccatatagggtagatatatgtataataaagttaaatataatatattttttctttcattttgtggtttagattttttatacatgcatgaaaggaaaaagactcaaaaacttgtgtcttgtttttctttattattaaatgtcaatcaagttattcatggattctctccaaaaaaaaaaaaatcaagttattcatggaaaaccctagataatgattttgtttttctctcctttctttaatatgtgatttgaatctttcatcgttaagaaaaaaaaaatctaactttttcctttttagggggacttttgcatccgtaaaatccaataactatttaggtatatttatacaaaattaaacaaaatttcaacggccagtttattatagaatccctatactatatgtatgcacatttcattaagatgtcatttagttgcgaggaataaaaaatataaaaataaaaatgacaatgacaataggaatagaaatagggaaatttacaaaaatactgaaatttgggttaacttttnnnnnnatactgtcacacggaaaagttttcaaaaatactgt

SEQ ID NO: 15714 - DNA, 9170 bp, Cannabis sativa
tattatatccataatttatgtttttaaaaattcactttaacacttgttaaaaaattaaatttacagataatcttttatttgatattacaaaattacataaaatacatatataaaattactaaataactcctataataaataaagaataataataataaaataaaacaaatcgttaatatatataaaaaataataatatcttcacaattatataatcaccaaaatgatgagatttaataatttataaaacaccaaaaaaaaaaaatactaaaaatctattatattcttcatccataactgttcatacgtacttaaataatacagaccatccattaattactagatacataaccagtctttaaaaaaataattaatttataattaagataggacatagctaatcacatcgctctccatcaatgattttctctcatccataagtaccaaactaagttcctgaagagaaaatatagagggtgggcatataatcccagtaaaaaaatgactaatatcaaagggtcagtactttcataacccatgcatagttagcccttcaaaacaaatcatatcatcatcatcaagtataaacaaaataaagagagcgcaaataatcagaagagacaagctacctgtgtatatcacactgtccactagattcctagctctcaatactaatagaaagcaacatccaaaagggtagttgcgactgataaccaccattataccacgactaagactcaattcactttgtataaagattctatctctttcacctataagtgagtgcacacctaatctacctatgatgacttagagactaggtcgtaaataacaatatctacaaatcatgatcatatgactctcatcaataatcagttcaaccaaaagcaggcaaacaaaaataacaaaagaacatattctttttttattttagaaaaattctgcagcacaatgactgtaatttgaataaacccaaaaatcataatctacataaataattgtacaaagataaatttgacacttagtgccccaaaacagtccaaaaaaaaatatacagattaagtttttaattattcaaatattttataaatcataaaaattagaatatgtctaatgctattcaacacatataaaatcaagtccaataaaaagttgagtctttacctcagcatcgtcaaactttctctgaaggagacacttctaggcccttgattcttaagctctgaataacttagttagctaaaaaatcactttatattaaactctaagcactttacaaagacgatcgatggcagtaaaattggtgtatcggaaacgttattgaaaataagagtagtatatttcaaaatgatctacttgacgagtagatcataaatgtacaaaccgttagcccaatcaagcaccaaaatcgccaaaaaattcttccaaaagggtggaatacacaaatctcattgtgaaaaaataacgagttgatcagaatgacttggtggagaatgtttttctcgcgacactgattccaacagtaccaaccatttttcaaatggtggctacagttgattggaatgtcatctcaaagtttttatgttaaaactttgcaccacccatacgagtgtgtctcagctctaattgccaccaaaattgaggtgtgagatcgccaccgatctgtggtcgtttagctttagcacgcgtgatcccatggtgaccggagctgggtcatcggtgctccacatgtggcggttatgggtgttttaatgaaagagaaagaaagtaagagaaaggaaagaaagagagagagaaggtttagggggaaaagaagaaagagagggttcattgtcaaattgtgggtccgtcccactaatatataatatatttattcttttttttgttggatcgagactttacattctttcctacctaaagaaatttccttccaaaattttaaattacaagtagggatgctttatatatatttttgactctatttctcaagtagcctcttcttctttataattctgctatatgaccttgactagcaaatcactctgttccttaacactttaaactctctcaccgaaattctgacaggttatccttcatacagaacatatcttaaagaggaatagcctctaactaaaagacatgcaatgagtaatattttcttagcatcaacacatggaacacattataaatgtgctccaaccacactggtatttaatcaatatatgacctccccaaccttctcgataacctcgaaaggtctaacacaccaagggctaacttatacttcactcaaaatttcattacaccgttcataggaggaattttcaagaaaatatagtcaccaaactcaacttgccatgagtttgacataactcttctaatgactttgagaaaattttagattctcatgaattcccttgatcttcttggtggtacaagtgataatttgtggcccacaaaacatgttcatctggttcccccaatacaaaggtagtctacatggtcccccatacaaggcatcataaggagctatgcatatatctacttggtaacattgtgataaattaattctattaatgacaagtattttctacaactaccttcaaaatctaaaatacaagcataaagcatgttcttcatggtttgtatggtcatctcaaattgtccatttgtttaagtatgataagcagtggtcaagagcaactcattttttccaaagcttgtggcaagactttccaaaccctttgtgtagaacaagaatctctaggagaactatgcttgaaggcatcccatttagctgaactaatttggtaagcttgtaatccttgttgatttaaataaattgagtaaaattagtcaaaagatcaacaattagacttgaaatgtcgtgatttaaggatttcaatggtaatttgttacaaattctatagtgatcttatccaaattctactatagtatcaataaaggttgaagcaaacctgaagttctttggttctctacaataacatgtgaacaaaccatacatctagcttcaaagctagccacatcctccttcacaacttccaaatagtattatctcttcaagtcaggaatctttatactaccacaatgtacaataagcttggaactatagcccttgatcataatagaccttctaagatcacaaatatttgtaacatccaatctttccttttggtatcaataccttttagcattaactgtctattcttgatatataaatgttcaccatcatagattctattctagatatataagtcttaatttattagcttgccaataatgttacttaacttgataaataccatgctagagtcacaagctacctctttttctttgtagaactgcaatttataatcacccatagttaatattttgtttctggtcttcaagagccatacatgtcaaagcaccctgaggtttcttacttaacacatcaatgatcacattaaccctttcacgatgatactacaaggtaaattcataatcttacatgtactcaactcattttctatgccttaaattaaagttccattgattaaggacatactttaagctctcattatccaattataacttaatctttgcatcatagaaattatgtctctaaatctttaaggcaaatatttccaaccagttatgtgagtcatgtgtgtggtagttctcctaatgtggattaaattgtcaagaagcacagacaataactgttaatctaaaaaattagcactcataacttttgagattacttaaccgacaatcgagagattaacgagaccgtgccaagagagttgtcttggaggggtagggatgcatgatcactctttatagtcaccatgcaaatcactaagcatggccatcatgaaagtaactcggcatggtctccatgcgagtcactcgttatggccaccatacaagtcactcgacatggtcaccgtgcaagtcactcggcatggccaccgtgcaagtgccaccatgcaagtcactcgacatggtaaacatgcaagtcacttgcaatggtcaccatgctagtcactgggcatgtacaattctcaaagtcactcggcatgcacccttcaaaagtcactcgaaattcaccaatctcaaagtcactcgacatgcacactcttaagtcacttggcatgcaacctcctcaagtcacttgacgtgctcattctcaagtcactcgacttgctctttctcaagtcactcgttatgcatccttcttaagtcacttgacatgctcattctcaagtcactcgacatgctctttctcaaagtcactcagaatgcaccattctcaggtcacttggcatgcacttactctcaaagtcacttgacatgcacccccaagtgctcactccacaggcatttcatgccttccactcagtatgcaacttccatagaaacatgactacacttagtgcaattttcttgtggaaatgaaggtaacaagggtacgatcacaagtacaaggcgtgcatgcatggtgtgtacaactatgcttttgcaaagctttaaaaataaggaggtacgagtagtggaggcaccacacccgcaaggcctgaccaactaaccaagggtacacaacaaccaccactcctataaccaaagaacaccttacacaaaacaaaggtactaaggtgcaagaccacctcatataacatacaatctgtagatcatcaatgtcacaattttcttaaggacaccaatgcatcaaaggcaattagagcctgtaaatactcctttctcaaatgtgagaaggggttggaaaatcagtcttgtaattgacgcattgaaagcaatagaaagaatgttttctctctagtctgaaatctcatttttttaattcccatttcatcttcatcttatttctaagttttgaagttagattttgattttttggccgacaagttagctaacgagtttttactgtcaatagtttggcatcgtctgtgggaacaacaagctaatgctacattgtttccttatatacaatcattgcaaaatgcgtagatactctcatcatctcgaagatatggaggtttaccttgacagaactcagctgattacttcaaggtgagacccacaaccacctgtcactggaaaagagggtgtgaacagtcataagcctcaagcaagagaagagggtgtgaacggtcacatacctcaagcaaaagaagagggtgtgaacagtcacatgcctcaagcaagagaagaggatgtgagcggtcataggtctcaagcaagaaaagaaggtgcaaatgggcaaaggtctcaagcaaaacaagaagaaagccattgtgaggaagttttgatggacaaatagcacgatggggagaccgcttccatcacacttaataagagaaatgggtcacaaaggtaaagagttttctagcctataagggacactttgccactgacaccaaaagatcctggaaccttgcaccatagatcgggaaaagagaaatgagtttatttagtaagttcaagctcccaaagttgtattcacaatcaatagataaaagagatgagaatgaacaacttatggttggaagaaatcgtcacaaacatgcaagaagtgatggatgaactcctaaaaggacggtctatggcgcttttggtcaagcaaagagagccaaaagttagaaagaaagtcaaaagtaagttgggggaggaaggaatgtgcaaatatttaacaagtaacatgccagaatcctcaccactaaaagctcaattttgaaaggaactagaaccctcatagcgacctaacaaatctgagttataggcgatccatggtgatttgagggagaaactaaatcaataggccattgttgagaagaaagtgccatcacggataacacctttcaataaggagggtccaaggcacatgccaccaaacctttcaaaaaagttgaacaaaaggaggcaagaacttgacaaggagatcgagagcctccgacgaaggatagcattggccccgtctgaggagtgtaatttcgatgaagatgattttggtgatgaattacctttctgtagagaaatccaatttgaacaactacctcaaaaatttaaagagcctaacctactgccctacgagggaattactgatccaaaataccatttggacgccttcaatgaaatcatgaagatgaagagggttacaagcaatgcaatatgtcaatgatttgttgtaacacttagaggcacaaaatacaagtggtttaaaaggttggctcctggatcaattacctcatggaagcaattcactgatgaattcttagcctaataccacaccttccgagattacattgtccgaaggacgagtttggccaacatcaaactgagggaaactaggagctggaaaagctacattcagtgcttcaatgctgaagtggccaaagttggaagattgtccatagataaacataagatggccatagccgccaaagtcatgccaaaaagcaagctatggaacaatatgctcaagagagaattagatgatttggagaatttctatgaaagatcccataggtatatccaagtggaggatgggcatgagaacctaggtgtgggaagaagtagccaacccaagaaaattccggctgatgagccacaaaagaaaatggaattcaaacataaagggaatggtcgaaacaagaaggtcaagagagaagtggagtcgcaacaccgagaatacacccattacatggagttgactcactcaagggagcacatgttcttgacaaacgagtgtcgagtgcccttcaagagaccaccacccatatggaaggaaagagccaagagaaacccaaacaagtattactgattccacaaggatattgggcatctcatggaggaatacaaacatctcaagattgggatcgaagagttgatacaatgtgggtacttgggaggtatagaagagaaaattagagaacagacgaatggcaccactgagaagtactcgatgaggcttctgaagtgttgagagacatcaaaaccattattggagggcctgacataggaggtgatactcacaatgggagagacaagtatgcctaagaggcaaggcgtgaaccccaagtcttaagcttagaaaaaaggctgccaaatagcttcatgggagaaaaagactcacacactttcatggaggaagatgcaaggggtgtgcatttccgccataatgatccattgatgctcacagtctagatggccaacataagggtgcaccgaaccttggttgaaaatggaagttccatggatatcttgtacttcatagccctcaagaagatggtgctagagcttaaatacttgaaaccatgtgcaactgtaatatacagatttattggagactcaattcaaccagttgggaaaatagagttggccctcaacattggagagtgacctcgacattccacagtgatggccacattcttattagtgggttgcccgatagcctccgtatattatttggccatgaaattccccactcccaaaggagtttccaccttaaagggtgaatagaaagaatccaaagaatgctacaacatggtgcttcaaattgtaacaaaaccttgagaacccatgacaatgaccatacatggagggcacaattgaatcagagaaaccatggtagagttggaccccaaaatctgcgaggatgtgcatgtagaaacaattaaagaattagaagatatcataattttagataagccactcattctcctcaagatcaagaaagggctcctcaatgcccttaagggtgagttgaagaagttcttggaacgaaatgtagatgtgtttgcttgggggcacaaagacaaggaaggtatatacccatccatagtgggccatcatctcaatatagaccctaaggtaaaactagtgaggcagtagcatagatctgaagactctaaaaagtatgcggccctaaaaggagaggtggatcaacttgacatgatcaagttcattcgagaagctttctacctggtcctatggtgtccaaccccgtattagtccccaaatctaatgtgaagtggagattttgtattgatttcaatcatttgaacaaggcttgcctaaatgatagcttcctgttgtcatgcataggtcagcttgttgatgccacaatagggcacgagctactttgtttcattgatgcatactcagggacaaccagatacccatgaactctgtgaatgaagagcacgcctcatttatcagtgatagaggactatactactatccggtcattccatttggcctaaaaaatgtgtgggaaacatactaaaggcttatcaacaagatgttttccaaccaaattagccacaacatggaggtctacatcgacaacatttttataaagaataagaaggcagaagacttgatcaatgaccttgacgagatgtttgccacactttgaaaatattgaatgaagttgaatccactaaagtgtgtatttggggtatcattcgaaatgttcctaggtttaatggttaatgaaatgggtgtagaggaaaatcttgagaagatcaaggctttgatggatgtagagtcactggagaatagaaaagtttgaccgaaagggtggattccctgaacaggttcatatgaaaacttatggttactccatatgaatggttttaaccatagttctcttagctttgcttcttagttcttattctgactttccattacttgtttaaactaacaatggatttttgtcaccggtgtcttccacgtcataacagggtgagttccttgaaagtatcccactacgacaaggtaccgtgactttctgtctaagaacactaaatagtattgtcctcatcggttgtgtcaagacaatagaggcggtgggatcatctcatgtcgaataatatgataaaacacgttggaatcaagaaaaaaaaatatctcctctactttgctactttctcttcatatttagtcattttcttagaaaagtagtatttttgttgaaacaaacactttcttatcttaatgaccataggatggtgcacccctaatcacttagaatagctatcaaacatgcaaacctcagttaacaattctaacttttcttaagtccacgatcaggagatccatgaatctagtaatggtttacactaagtatacaaccattccctcatt

SEQ ID NO: 15715 - DNA, 7221 bp, Cannabis sativa
tacaatgaagagctgttagttttctatgattacaaattgcaccagaactccccaatagaataactcttttccagcttcaccccaattcaaaacataaaacctcagatctgtagatcatccagagatagttcgtttactgtcaacatcttcaatttctgcatattaatacaaaaccaaggctataaggagttgttgattggagcacaggtgaaacagattctgttgagagtaataatgaagcgagtgcaattgaaatatgaaaaatacaacttactgttaaaaattgaggaggatcatctatgcttgaagaacctagaacgacttctctcttcaacttatttgtaagcttgtggcaaacccttagctgaaaatgaatgatactttgtaagacctaagaagcgttgaagaaagcctatagcatgttatattgaggaatgtgaattgaatgcttgttttacctctgatcgagtagcaccaccgacaataaatacaaaaatacgttggcccatcttcttgaaatcactggatgcatgtctaagtactgagtcgctataaaagcagaagacaaacaatataattcatggatcgtggttaccaaggtgaaaaactcaaaataatcaagtaggcggaatagatgaacccagtcagaatgcttcataaaaacagcaactgtaccttgaataaccatcatcagagttccgaggccgagcccatgttgctgtccgtcttgatctcattgaatgagcaactactggttgttgtattgatgaactgtgagatgatccatggaaagttggacttgggtcatttaaacatgggtaatcttcttttgacagttcttttttgccgagtttttcaataagctcctggaagaaaggaatttagagctagtactccataatgttagttactcagagttacttctacaaaaattatgtacctctattatgggatagaaacgtgaaagctgccatgttttttcttcttcacctgtgcgatctttcctacctacgggcttcttctgaaaataatttttagaaaatggttgcatatcagagacacgtttactgaccagaaatgcatttaatagtacaaggatattataataaccttatgcatgtcaaacttcaaagagaaaggactcattgagcttttcttggtatctgtcgatcctccaagaagcttcaaattatgcacagcattcatatcttcaggtggtaattttgccagctaaaaccggaaaaaaaatgcaaaacatcagtgttaataatgataatccaccaaaaaaaaacagctgatgacaagcaaaaaaagaatccaaccttcatcaaattgacacctttctcaccctcgaatttttctggataaatggctgctagaatcatcaataagcgcaacttattttcacgtgttgtgtcctgcagaaaatcagacaacctgtttcattatagatcttgataactagtgttgataacccatgtatatttctacaacttcttacatccttcgtagtcaaatatttgatgacatctttcattcctgcatctccaaaaacaagatcctgctctagctgtccaagctctataagtccaacttccctgataagcttgtttaattttccggcaatctgatataatgtaacaaaacatgtaaaagtttgaattatatcacagaataaaacttataaataagactatctcttccaatgacggaaagactaacctctacatgaagggagagcttgtcaatttgttcactatattgtggtaacgcttgaaccatcttttgcaagtcccgtgtagaaagttcacctccatctctacacaccagatgatctaatatgagagacatattaagcaaaaagaccaaacaacacccataaatttgtatctgctgtcatgtttaaactgtcaataaacagaacacttgcttattacaagcagtcaatgacagctcaatgagtgcagatataagtttaagaggcttagtgtgatcactcagaaactacacaagcattcctgggggagggaggcaatggtttcagaaacaaatttttcattaaatccacactaccttgaaccatggtgcatttgtgcagccttattctttgacacgaagttggtcattttctcatgcaaccgttcactagcctggcagatcactggtgatcaaatagtgtatattttaaaattaattacaatactaataaagcacggaacatacatcggctatatgtgcatgccgaagctcaagccatataggatcatgatcctctaaaagaacctctttcttctcgggtagaccaccagctttgccaggaacctgaaagtaatgcacctttagcaaatgtttctccagcgaactacattgaaggtttgatggtacacagtgatgtttcaaaaacaaaactcacctcgtgcacatatttatttccttccatatttagtaaatcatgacacatagcatcataagtccattcatgtatgataggagcaatctgaaaattcagaaaaagtatatttcatcatgatatacgaacaaggtagcagcaagcataatgtgtattcctaaccaacacatgcacctaaaaacctgatctacagatctgtcgaggattagcaactcgcatgtttctgtctctggaaaattgggaattgttttcttatattttgtgatacagtcccaaactccggcagcaagctttgtaggaattaaatcacgaaaagtagtcatagtagttgcatcaagggacttggcagctcggtagcgcacattaggatattcctggaaagtcgcatatataaaatgcttaagatattgtgccttgatgttcaagcaaaatttaaaaattatgatgtgaataaatatatataccctcaaagaagcaaaaacagtggcaatacgagtcgccatcacattaaggcaagcaacggccttccgtgtatcctcctcatccccaaatagttcctctaaggccctctcattgttagtgatgaaaccctgaacaacaaaaagaaaaattagggaaaaaaatggaagtgacattagcatcaactgagaaaaaaacatgttcagcagtatgcataaaagcataatccactttttctattcccttgaacattttctacactttcttttcaaactaggctccatgcctaactttacaacatttggtagcaaaaaaaaacatttggggactgggaatttgctatgtaagtacccataagggactcgaacctcagaccatggaatggcctgatacaaacttacaaaattacgagtgttaaaattgtgcataatttaaatatgagtagtaaaattatcccagcagtttatagcaaaaaggctgaatgtaacactacatacctggctgtctatagcaaaatactccagattcatctgcaaattttaaaccaataattatctatatcataattttatgcaagtacagaaagaagtatactaaaatacgaaatcacaatttctgagtacttatcaatattcagacaataacattccaaataagagagcatttacctctctcaatgcacctatgcgaggtaaaacagttgcatccttcttgatatgagcaacaaattcttttggaataggtgaactgaaaaatacaaatgcccttcacacgaaaaaagagagagagtataaaggtcaaccatcagaacattaatatttaattacaggaataatactggaaggtcaaaaacagctgtaactagaaaaagaagaagaataaaaaaggcaataatcctttacatacttcctgtaaagtggagattttccagacatatctgacaagaacaagataacactgcagatgaacatgaaacaacgtgagaatgaaggaatatacatgcaatttcaccacagatagaaaatgaacacaaacctaatttgaagcaattttaactttataaaagtcattttcttgtttttatttggcctaaatactaacaatctactaaaagactgcattaaaaccgtgaactatgaaatttgagattcatccaagaattgaagaactgaagtcacacaaaacacattcctgaataacaactgaaaacaacatcaactaggcttactagaattttgtaataataataatgctcaaactaaaacatggttttacacgtcatactttgagattcatccaagatgtgaagaattggagccacagaaaacacattcatccacaagtcacaaccatgataaatgatgtcaactggcattactagaattacaaacatccatagaatttacaagaaaaaatagcttacttctctttggtaggctggatgaagtagatagcatccatagagggtaatggttgccttctcttgtacatatcttccaccactggcatatccaaaaagaaataaataaattgataagtgaaggagttataaaaaacgaccaccactgttaaactaaattcgtgttcctacacatctacttcttgtacattacataatcatatcctaaaagctaatactcataaatctgcacacttgctatgtactaatgcaatctaaaataatttagagataatgatacaatttctgacagccagagcaaaaatacttttaatttataatgacaatagaaataaccagtttgtcagagttaactagccaaacaattggctcttaacttttttgtcaatattttcaaaaggagagaagaagggagggggcatgcttaatatggaatctaaatctacagttaactatactcatatatgaattacccccactatatctagtaatattaatttctcaatacctacataataatttttaataaaaaactgcaataacacaatgtgacgtttataacaaaatgcactaccataagatgtattatatgtgcatcaactaaaacctcccaaaatagttcaacgcaagtactttgttgtgaccatacctcactaactggaatccaatagctcagtatcaacgaacaaccaagcatgaagaaatttggaaataaaagcattacaaaatctaagaagcactacaagagttgaatgtccaatgttcattaatacagttgtcagaacagtatcgaccaacaataatccccatgaaaatgacaatatggattgttcaacatgcataacaaaaaagaatatatgtaaatatttacaagttcaaagtactgagttcgaactcttacatgaaacaccttcttcagtaatatcagccattttgcatgagtaagacattatttttacggtaagtttgtccatgataagtacctacagtgaaatagattaataaaatttgcctgaaaaataaataactatatagcagcagcaacattttgactgtgaagtgaacgaattagagacaataaatgcaacactccaccactaaagataacccataataaaaacagtattgcacaagcaaaaagaaatttccatttttttaaaaaataaataaatcaatgaaatgaaattattgtagaattgctcataccttccaagtggattttgagtctcctgttttggctgaccggagcatctcaagcaatagccctgaaacgtaacaccaattacaatagaagagtgaaaaaattaatcaactgaaaaataaccagaaaactatagccctgaaacataacaccaaatatggtaaatgtggaaaatgtatctgaggaataagaagaccaaagcagtcaaccagccatttctatttattttttatttatcaatataacctctttcaggaaaccgaatcgtccccgaaatgctcctataaacctcgactccaaaaaaaactcaactaattaacaaaaaaattcccactgtccattatttcctccacttcctaagtaggcatcccagaaatcacaatgatcatcagttttgtactcctcattatatgaagaaaacttaaaaaacacataatggtctttcatttcaaggtctcaattcaaatccaaactttttaagttttaaaatggtaaactacttgtcaatgcgatgcgtacatcgccaatatacacaagctagctcactttaatcagttaaactaattcaactctaaccacaaacacagctgccacgatttctaaatgggcattgtagtaaagcataagaaagccccaaagacatcaaaattatcaaaacccatcaatatcttaaccaggttcttctcttgtatgtaatttcaataattaagttcctcccatgaactcaaaatcccacacacagacacaaaattaaatagtaataataagctaattacaatctcaagcaaaattcaaaacaaaagtactgattattgctcaataagaaaaagcccaagtacggaaaaagatgaacgagactcacggtcacggctgatttgcttgaaattcttgtagtcgccgccatatgaggaggaatctgaatcagagagggagaacgacatggtccaagtccaagctcgcgagctttctctcccgattgatccaaaacaaaaaccaaaaaaaaagaggggtgagagaaagagcgatcgcgaagtgatcgacggtaagagagagaaagtggtgggactgggaggttagagagagagagtggaatccttcgtttggaataataataagagagagagggaaatgaaatggaattttgtaaatagagagtaattaagtaattaattagtaattagtgtcgttattaagttaagttaattaatctaagaaggaaagaaaagtaaaaaaatgatgacgtgttgacttggatttggattgggaaagaatcatagaatctgttgagaaatgaaacagccaaacgtggcgttttgcttccgcttttgcgtttcgtctcagaaacgcggtggatgaactagcgatggatggaaaagtaggagacgcggaggacggaaaagttgactggttagttagtccttcataaaagctttcacttttatttttcttttttacaaataaaaactttgaataatttaaaatttgtttgtaactgtttttcgtagtcgtacaaacattttgtaactgactaattcgaaatttgagtgaaaaaattgtagtttagaattttataataatttattattgttgtgttgtaaggtaattttaattaaaagtaaggggcatgtagagttgtagattggatgcatatgacaaggaaagaatgtttggttgcagacaaagataaaatgtgtatttcaaatataataatgagataattttattatatta

SEQ ID NO: 15716 - DNA, 4979 bp, Cannabis sativa
  modified_base (2599)..(2600): a, c, t, g, unknown or other
tattactattttatttttataattttagaacctatacgtttggggctcgagatgtatcctacaagtaatgtaactgaagaatctatataccttttattgctatgaaaacatgtaaaaaaattgaattttattgtaacaatatatatgatctaaatggatcattattgttgtattagttgtacaaaaactatgattaatttgttaaacaatgattgcatataaccataaatttgtttagaagtcaattaaaaacaaaagcaataaatgggaccatgcaaggcctaaaatgagtttatttgattagttatattattacagctcactcattcttgttgcttgtttacttgtttatgcaaatcttctttcggtcttttacatgaagatgcttgcatttggtcgacatcacattttccaataaccaaagtatctttacttttattttaatttttaattttctaattttttttaatgtgattttttatttttcaaatgattagtttttttaccaccacgctcttaatagcgcgtgtaatacacacactctcttcagaaacacaaacaaacaataatcccccgatgaatgtgtcagtctgtcaaaatgcaaaatctgactttcaatttaaaactctataatagtcactctttcccaaaatttacattttatttacataattattggttttctttttatcttgaattgcatataaaaaatgaccatttaaaaaacagagtacatactttcagaaaagaattaagaaaagagtacagacactactggtcctgaaaaattcagccattgataaaagctcttttctattttcatccttgaatataaacttgtcagcattagttaggtttgaaatatttctcttagtttaattatatttggtccaccttacaattaataattttgagaccctacgatcatgagtggcacataatttttaaaccatataaaaaaaaccaatcaatattcaaatttggctgaaaataaaagataagtattaagtactaggatgaaattgtttaattagatgtggacagtggagatgtaatgtgataatataataatgttctaaaaggaaattttggcactaaacttctagtttaagtgatcagtggatcaagatgtaagagaatcatattattattattatatatatactcttcctcctaactgtgtacaatacaaatatttatatatatatatatatcaaattgctacattgtaaaaagcattttatacattgttttattaattttctcagagttaaaaataaaataagtagaaatatttgaccaagaatattgaggcttcaagactttggttttccaccataggcttgcttacatatggaactgggtttctgggtaggtaggcacagctgtgaggatgctggacagccccacaggcaattatctcccaagctgcccgagaccggcgcctgcccgccgaacaaactcgctggcggctgaccgatcaaaaagtttccatctaagaaaagtctctttaacgacttcttttgggcgagaaccaatgggattttgccacgtaaacggttgtacctaagtgttagtgacgataacagaggatacgccgcgaaattaacaggcacgtatccttcgattctgttgaaccccaaatctaccgccacgaggtcgctttgtcctgcggtggggctcgagatctcgacacctgtcaagctgttattggctaagttaacttgttgaattgacggtaggagaaagaaccagctctgaagtgttccagtgaacgagttctcactgagttcgattacttctaactgagtcgaaccgtcaaacgacgatttggagagtggcccagatagcgaatttctcttcagagcgagttcaagcaaattcggtggaagtttggggatcgaccctttgagttggttgtaactcagatcgagtcgacgcaatccggacatccaattcatggtactgggaagaaacccagaaagagaattatgtgaaaggtccaaagcttcgaggagtttgagtttggtaatggaggaaggaaccgacccggagaacttattggatcggagagttaggctttggagattagcaagagaagatatggaaggtggaataatgccatagaaatagttatcagcgaggtcgagagtagcgagttgggtgagttgggaaaggagtggggtgagtgtaccagagtaaccaaccgggtcgagagtgatctgggtaactcgtttggagtcaggagaacaggtgagtccgcaggtgaaatgggtccggcgaggtgaggcacatgggtcggcggcggcgaagtcccaggaggctaaacaagaccaagttggaatggaagagggtttaacggaggctttaaaagccttgagggctgaaatgtctgagggtgaagtgagagcataggtggagaggagaaaacaaaggaagaagacgagggagatgaagaaggtggccattttggtggggtttttgagaagagagtacagagagagagagaagccttcgattttgaattgagagagagagctatataggagtgtgaactgtgaaaagtgtgaatgaatgaagagaagagagagagagaganngagagagagagagagaggggtcaagaggattcgctctctggctggagggcacttgaaattctattggttttgattaatggtcgacacacacgtatgtcaatcctttggatattttattatgttttttcactataccaagttttagtaaaataattttatcaaaaaaaagaaaatatatatattaattaataataaaaataaaaatataaatttctcataaacaaataaaaaagaaaaagtctatcaactttatgtaatttttttaaaaatctcaaataatttgtagtgttgaaaatatttaaaaaaatttgaacacacgtggtaagttaaaatattaaaaattctgattgggtattgtaaactatttagaattttttaaaaatttataaatttaatattataacaaatattactatgattgttttttttaaaaaatattttaatatgtgattttatgtgcgaaaattaactaaaaaattataattaacattgtttgataaagaaacttttggattttagttgtaataataaaattctaatttacttccaaatttaacatatttattatatttttcttcaaaaaaaaaaaaaatgagtatccttgcttttaaagctcaacaactgtgagtagtatgcagatcttggtagcgatgttagtctagtttgatccgcactattttacttgtagtgtatttatttaatatatactaaatacaaattttatattttaaatctaatccattttactgcatgaagagacaaatactccatgatgtataaatagaaaaatgttcaacaacatgtgtagatttatgatatgcaacactatccccatgaatagattcaagtgggaaactatttctaaagctagaattaatttaatggcgtttggctgggaggaataaaaatataggaatgagaattaaaataggaatggaatgaaataaaatttaaaatgcataaaaaaattaataagaaaaattattaaaaaatttcaaatcttgcattggaatgatttttcattccatttcaaaatggaatagattccaccaaaatggtgaaaaaagaggttattccattggaatgatattccaatactttaaattgcaaccaaacaaaggaatggaataaatatatatatctcccattaacaaaatcactttgattatgtgctacaagttcaagaataaccttccttaatctagagcatattatcttggtagcaattttgtataagacattacaacaagttataggtctaaaattactcactgttttggggcatttgcttttcggcactaatgtaagagaggtagagttcagatccttcaatagtgatccaatttggagaaatggtaatactgcctccactacctttccaccaactatctctcaattatcttgaaaaaatagctaccaaatccatcgggtcctggagccttccctccaaggatgctgaagacagtttgttttacttcctcagcattgtatagattaacgagcaagtcagcttatttttgtgataattttggcccttgattcatgactcttataaattaccattgttacgttgtgactaaaaagtctatggctaaaaatattagtcacaaaaatcacaatttattgtaactaaatgtgtttttagtcacaatacttgttgtgactaaaactaaattagtgacaacttgtatctaattactatattttagtcacaagtaacattctgttgtgactaatcacatttaatcataaaaaatgactaaaaatcaataatagtatttatacaataaaataatgaatgttgtttcagcataccaaagaattggtttattacatgatggctgcttgaaaaaggttgaacatcaaaaatagactcaaggtctttggtttagagttgatgaagtgtgttctttgtgtaagagtgagttcgaaactcatgggcatttgtttgagcaatagatttacaaaagagatgttgaattggataagaattggctctcataattaccatttccaaggtaacttgaattatattagtaggagcaaagtgagcaaaccaaagtttatattcttgtctttaattcttgtgtttgtttcatacgggctgaaagaaatagagtcattcttgtttgcaaaacatttgattgtaaatagattgagaaaaacttttcacacaaaaataggattgatagatcaattttggctctcaaagactcaaacttgtatagatttgattgagagttggctagctgcaattgtctgtatttttctttgatgcaatgtaatgatcttatttattagaaaaaaaataataaaaaaaaataaactttaatagggcgggtaccaacaaaatcattaggtgggtgaactttttttttt

SEQ ID NO: 15717 - DNA, 5514 bp, Cannabis sativa
  modified_base (5489)..(5489): a, c, t, g, unknown or other
gagagagaaagaggagagagagagggtagtgactggagagaaactcctatgtgagggccaaaaggaagtagattttgctttgaaagcttgagcttactattttgagggtttgtttgaaatacatgactgtgactatggtggcctatgatgaggcctatgatgaattgaataaaaaataaaaaaataaaattaaaaaataataataataaaaaattaattatagggacaggctgtttgttgctttcaacttttgtgaaccaagaaaaagaagtaagtacaaggatggatgcttgagacaaagcatgtggcattgtgtttcacatttcatggtatgtctttcttttgggcttactttggatttttctttggggggctctttctttagtgtatttacaataccaccccaactataacaaaatttgttcttttgaattttgaattgaataccatgaaagagaagaaaaaagaaatttaattatcattaactgagattttatgcttagatatgtgttgttggtggggacccttattagcttttgcataaataattgtatagagtatatattatagaccatattaatgtgaacaaaattgtttgcttcaaatcaggtaacagattcaataataaaaaagaatagcctaatatagttaagaaagaaggaaaaatggtatggtgagagaaagtgacatgacatcaattccatggatgatgaaataagaattgttgaaaatgatatatattaaaaaatttcttgcatgttttacatctttataattagaccccatagatagaaaattcatatttagcaaatttaaatgaaattcacattataatatgatcagggctcgttggttggttgttcatggctgtgggctaggcttgagtgttttgctcactacaatggatgttttcttttctctggtggatatttctttggccgtaagatactagtttatgtgcattttatggggtatgcattttcggtatcgtgtggatccaatctactagggacggatccacatagaagcaacgtgggatagtttctctgtattttagttagttacgatatatatttgtaataaaaaatatatttaaaacataatattaactttaacttaatagttaaattagatatgatatagattagagaataagagtcaaatcccaccaaaagttttttttaaaaaaaaattacttttgaaaatctagaattcttcttatgttatatttatttttctaattagttagtatcttagttgaagatattgttaagatttttttattacatatgacttgattaatttattattgtttgttatactctttgatattttaatattcttgattaatttattattgttcaatttacttattaatcaatacttctatttatttattaaagaaaaattcgaatttagatatgtggctttaaatattgatatttaattaataatgcaaacttaaaacatacctctccactcctcttaaaaaaatatggttcaatagtgtaccttaatttagaacaatattgttataatatcataaatatactatttttttttttaattttttttaatgttatttttataattttattaatatatttagctataataataaattatagataatttatattctttttttaattgttgtacataacaaaattattatttttaatattttaataaaaacattaaattttatatcatattttgtaactgtgtattagaacacataaagatttatataaatatatcataaaattattttttatattaattataatacaatttttatatctatcattagagataatctgaaattttgatctatcttattattgagtctgtatttgtagtaaggtgattgtataattaattcatatttaatttggtgtgatgataattgtaatagaatttattacaattctacatttggtttgatttcaaaaaaattacaaatgtctttaaaatataatatagataaaattttattataatttaataagctaaaccttattttggggagtggattgtaatagttattgacggcttgacttaaccttgttgttgtgtaaagtatttaaaattaaagaaaccctaaaaaaatgaataatcacctcattaagtcccattattggttcttaagtttcaaattctgtttgcaaaattttcaaaaaaagtttccataattaggaaaacaattataaaaacaaatcaaatgatgtacagtagcaaaccgacattttatcttctatgaagaatattttgaaaataatgtttaaaacattaaaacattttgttctttttagtttctttaaggttagtataataaatagtgtgtacggtcatttcactctctctttaaattattatattatttttattattattattttttataattaattacactaaatactttttttaatacaagacttacttaattactaaaatacaattataaaatcaaaatagtatttaatattttattattatttatataaaatcattataaaacaatttggtaaatttacaaagactacactagatgttgtaaagaatgataatggtgcatagcacaatttgagaaagagagaagaatgaagcaaaacattatcttgatcattcacaggagattctgtaataataagagcatcaaaaattgacagaactttaccaacatattcaaagatagtgagacttgaacatttgagaattgtccattcaactatagtcgacgagcctttgtctatgaagagtatttatgctcaagagcacaccacacagcagaggaggtattgtaattagccacaggggtaataacactctctgacatggaagattggagccaaaaaaagagaagttgatcttttcttcgccattgctaatactctgggttgagagcacctgtaaccaagagctctagaggagggataccagtaaagaggatctcatctaggtcgtgtctaatgactgtaggcaccacctgagacttccaagaaagaaagttttggcggtctaatttgagagtgagagacaatgtaagagagtacgagaaaggattccatggtgtttgagaagcagcgatcgtagcaacaggggtgaacatcggtcgatttgatcgggttacaaaatattttttctaacccaatgtaattgttgagttgtaaggatctaattataacccacctaattaagaaaaaaagtttaactcgttcaataattttatcagtttattcgaattaactcgtccaaactattataactttttttattatcattattgccagtaatatttgttaaaactagaagaatagaatgaacttctgtatatggattatgagagagttttacatatatatatagccaatacaataaactcaattgagctcttgagctataaatatctaacactagccaactctaactgaaagcaactaactgtacaattaacaagatgacagctcaactaactgtctaactaactctcaactagcatattaactaactctctcaacagccccctcaaaactcagattggaagaacttttaatcttgtttttgtttcttaatagtgaaaatttagaacttaagatggctttgattagacaattcgcaacttgatcaatggtcaggacatgtcaaacttcaagctctttgttcataagtttttcccttataaaatagagatccaactctatacgtttggtcctggcataacatggtcggccatgagtaatactgtactcaagtaatcacaccacaaaactgatttgttgaatagagttacttgaagctcagttaacagtgatttgatccaagtaacctcagtagtgagagatgctaagctcctgaactctgcttcaatagatgatcttaacatggtctgttatttcttagattaccaggcaaccaaattagaaccaaaatagattgagaacccactggtaaacctcctcaatctggatcacataaccccacaaggtcaagaaaggtaagtttaatgaggtgcataccataatttattgtaccagacagatatttaagtattcttttcactacagaccaatgtgattgaagagggctatgcataattaacatactttatttacactatatgaaaatctcaagtctggtgataattagatattgttaacttctaactattgacctataatactcagggttctctattggatcactcccttgtgctgaaagcctgaggcctgatgtcattagagtgttattaggcttggtaaattacatttttttcctgagctgaaagatccttgagatacttggtttaagatagatacatcacttgtgatttatgcatcactccaatgcccaaaaaatacttaatttcccccaaatgcttgagggcaaagatgttatgcaattctagaaccagagaagagatgttagaaaggtgacttcgtgtgataataatatcatcaacatagattaaaatgagcatgtgataaccattggagcttctagtgaagagagaatgatcttccctggaagaaacaaacccaaaagagactaggacagaagccaatttatcaaaccaggccctaaggacttgctttaaggtatacaatgctttgtgtagtttgcatacaacttaaggatgattgagatccttaaaaccaggaggttgctgcatgtaaatatcttcttcataaaccatactactaatgcatgtaattaaaacattaaaataatgctcaaatcctggccttgcataaagctttgttgtggcccgagctgccacaatttgaacaacgacaatgttccacaacttttttactgttagatggatatcggttagtccgtattcttcctgcattactcttttttggatgacctacaagtttcttctccactggtaccttgactctcatgttctggatgtattccgaagtactcaatcattctcctcaccgacaagattaattgttgcatcgcaagtattcttccacgtcgattttatgtaataggagaggtaagagcgtacacgctaacattctgattaatcgacacgacacatgcatgggcataaggaatttttaacaattggaacattccgcatgtgcatgttttctcaactaagtttacatcaccacctcgcttaccctcatgacctctaccaacattaaacaaatgtgcaccattacgttggacacttctgaacctaccatccttgtgttgtgctaccaaatcttcctcaaaattagtaatcgaaggggtagcgcacttgccttttcaagacgttcagcgaaccaactttacagtgtgaaccttatgaactcaacgatagtagttattggatatttccaaaattcagttgtcacgttgttgaggctttcaacaacattgttaatcattatgttgtacctatctcctggacaataaggacgagtaacccttttccaatcctataccctcaatataagcagtgtgacagtcagtagtcccgngatccgtaaggggaaacaccgggta

SEQ ID NO: 15718 - DNA, 11059 bp, Cannabis sativa
  modified_base (10195)..(10196): a, c, t, g, unknown or other
tcaactgaaatatcacaattgtatgagccaatgtctgttccaaataattcagtaacagcctcttctgttgagtctgcttgagtattgctcccctgcatttggtcagagttgggacaagcatcctcttttttgctaacaccattaatgtaattctgtcgatttccagccagccactccattagagtcgatggtgtaataactttcatattagcaaaaacacttttgaagatgttagaacttgtaattgatatacaagaagaatcttctttgttgtaaaatctgttatcctctgcattagtatgagaatgagagatcaaacaattatcttcattgcagtgttcaagttgaatatcaggtgcgtcggagttaattctctccaatctaccagggcctaaaaaggaagaaaacgagaagaaaaataaaggcacttccactgtacaaacagaagagtaagatttttattgacattcaaattagcacttcaaaaagcaacaatctccacaaggcaaaaaattgaattgctaatacgatgtaaactcttactttttaacaacaattttatttgtcatcatacatatatcaagataaatgtgaaatgcactctcttttacactcttacttaaatatttgacacatggctaatactactcattttacaacgtttttaaaatatgaaatatttgagatgtccacttgttaagcattaatgcattagagtgcaaaaagaaaaaaccaaatggaaatctaaaaggaagtgacctccataatcagattgttcaccttcttctgcatcagggaatggaaaagtctgtaaacttgtttgggttttttcactgttgacatcattttcagttccctgttcgatagtaagggggatattattacatgaaccactgttctttgacaaattttttgcccctaaccttgcaaaaagttcagatctcaatgtttcttcaagtagaaaagattccctcgagctatcagttgacggttttctaccaggtttcatatttacatccttctccaaatcaccactactgttgttttttgtaaaacacccaaagctagatttgacattttcacgttcaaatgaaaatgactcatcgtcttcatcaatatttggatcattagaagaagatcggaccccatcagcagctgctttgcccatacagcacaatggctcagatgtactagcatctggttcactgcccagttctgaccccaaatgttgtccactcacatgcctatctgatgtttgagctggaagaatgttgatataactgaagttggagccaactcctagtggattaacaccatcatatttgagtaagtgatttcttgatggtaacagaagcatattttcagacacatctttcgagtaatctgacccaattccaactttctcattctgtcttgaggagcctaataaatctgaactgtccatgataaatgatcgcaagtgggaagagtacaattctcttttacgatacagatcggaacatctagcattagcctcaaccagatccctttgagctttacgataagctttgagagcatttctttcttcaatttcacatctatgtctaagctcttgagcttcctcaagatctttgtctaatgattcctccatttcaaccaatgactgcacatttattctgttacgttctgacacatttgcattacttgaacaattccaaaagttttcattatttaaagatgcctacaacattcaggaagaagaattattatgaataataatataattgggaaggaataacattgagagatgccatgtggctagagtcaaagttttgccttaagggaataggaatgcttgatgtatttttctgtattaagttttgtactgttttgtcagttttatggcctctaacttgcaatcaagacctggaaacaaacctgaatgttatcattgaatgcaggctcaagcatcttgtcaccggatgagatgtgaggatggttgtcaatcataagattttttcccactgtttctttgttaaagaaagtactttgttgctgatgaggaacaatttttcttggattcaactccacactgttctgcaaaaatttaaaggaaaaataaaagtaaaattcagtgattaagttctcataatatcataccatatttcacaataattcaaagatctgccaaaaatatcttgggagaaaaagaacacccactgagaatagataaatgttatgaagaagtaacaagaagaagcacagaatattcaaaatgctattcatacaaattgataatatctattactttccatatgaggtattgagcaaaatcagcagcttctaaccactcatgcagtaaaccctagaaccatagaaataattctggtggtacttccataaagaagcacatttaagctttactgagatcgtcaaaaagtgatcacatgaaggtgcttaaacagggaaaagaaggctaaggcttactaagttctttgggataacattagaaatcttattccctgctgttgatgtatccgggtttaacaccgaaaatgattccacatgcttattattcccaccagactcaatgcaatttctgacaacagtaaaacctgcacagaaatcctactcaattagccaggacatctagaattatgacccatgttaaaaacttaacgagaataataaaagcacttaaccatcttttggcacgacagatatattttccgctaaatgaggtccttgtttcccatttttcggttgccctttagtgatgcttggttttgctctacctgcagtattttctttctgtccatgatctaacttcgttgcttctgctatgttattctgcactggctgctttattggcaatatagatcttccaacagactcgtctcgctgacccattgaatttggctgatttgagtaagatccagtgactttaacccgttttttctctggttcttttgattctctttgtgcacttttggcagatgtcgccccaattttcctaactgcatcactaggcaaactcacagcattctcatctctgagtgaaactgcttccttacttcgttgtgcagacttaagcttcaattcactttcccgaagtgcaatctgctgacgcaagtcttgaagcttactattgttcaggcctacaccttgaccaaacccacgttcttggcttgatacatttttgttcacagaattaacttttctcattcgattactatgctcagctggcaatgccccagcaccactaacattgggtccaggaattttggccactggtgaaatatatgttcgatttaaaggcaatcttttgggtataactttgcctacaatgccagtggcaacctgtttgtttaactttgaatgtaaaggggcaggaggtttttgattgctaaccactctagctacactacttttagtttcagtagcttttacttttacacattcatcagaatcactgccactgtcattatccgagaagcgtattacaagattatcagtggctcccaccggagcacaccatccagggccaggactaccagtatttgacgatacccaactcttatcaaaattcttcttagtcattggttttatagatgctcgggactgaatatccgcagtcactacaggattattgctagaaacaacattatctgattaaaaagacaaatcaatgtcagcatatgcttaaagaaagaaaatattttgctcaaacttaaacccttcccccgtgcatggtagcccgaaatgtctccacaagtactaaaaatgtagaaaggtgcatgagaattcaatggctcaactctatagttccgttattaataaaagcatctgcgtttcaatcttttatccaaaagacggtaagtgattacaaattggtcacagcacgttagtaagagagaaaagctgttgaactatattttagaatgcaagcgaaaactgaatgaaagaatacaaatgcataccaaaccttagggaatttcaataaagtgaaaattacacagatatctagctactaaccttcttgaaagttgtcactgcatttgttttctgtaggaacaggacccgatccagcaggagcatcaatactagtgcactgttggacagagtttacgtgatctttctgaggcagaaaaggcacctgtataaagtattaaaatcatcaaccagttatcacataaatgaggagcttacatgaacgaaccagcttcgtttcttggccccactcccagctgcaaaactaaaatgaagacgctaaagaaattgacattagaatgaccattttccagtccagaataattttaatttttttttgaacaaccagaataataattatacattgaaagctagttcaaccataccaaatgaaattaaaaatgagagcaataagcacataagtagtaaatggaaatggaaatgtaaatggaaatgggtttagtcaagtaacactaaatagaataagaagcaacaacaagtgaattccacattcaaaacctacgtctcaaattccaattccatcatttattaggacccagaaaaaaaatccaaagctcaattaaaaacgtttttcttcagtgaaacgcaaatcacaatcatattgaacatctatctagatgaataaatgaataaatagaaatttgatataagcatgaaattaaaccataaaatgaatgaaaaagcaaaataaagatctgaaaagtataataagaaaagagggaaatatttattagggtttggaaagacggtacgtcctcctcttcgtccgaagatagttcgccttcttctctgaccttggtgaagggtttatcgtgaagctgagggttgaggattgtcagctcggggtcgtcggactccatagtcagtctcctatcctttttgtttgtcttagtcttgattgaagagaaaggtttgttaggtttgtatttgtaatggaagtcagtcaagaatccaatccagccaaaccaagttttggttttgggggcaaaagccttagcagccaacccattgtcgacgtttccattattaccgaattaccctcccttcctcaatcgaccaagtttttgtcatcagctaacctttttttcctcgtcaatttcaatttcctattaaaagggtaattttgttaagagtttttttttttgttttaagaaaaaagttctcatcgctattaataagttttgaatacaagtaggattctctgggcatcaaattatatttttttacagtagtcagagcaaatttgggcaaagtatgggcaattccattacaggatctattacaatgaataaatttaaccaaatagagcctattgccaaggttaacaatatcatctagaacaagatccaaagaggtaataataaaagcattgtttttcaatttaagcacaatattcaagcaatcagacttaataataatgttttcatacccaagggagatgcattggaccaacgtcttgcgaatagccaaagcttcagcaacttcaggaagaaagtagacatcgatatgccaactcgcaaatgctacagctattcccaaataattacgaatcaccatacccaagccactacatttgcccaaggaattaatagtggcatctgcattgactttgagatcaccaagctagggaggtttccattttgggaccatctgagaagggcatgccgagataccatcccaccagtagggacgtcagtcgcctccatacaaatgggagccatcaccaaggcctgtttgttgtgaaacgttcctagataatcacgagcccaatgcacagtaagctcgagagtcagctcaacgttgttgtggatcattttattacgtttgaaccagatcctccatagagtcaccataaccaatttaatcaactcctttaaaagggagtcaataatcttgtgaatgaaatcaaaaaagtctacacaatgaacaaaaggatcccccaacgcaaactcacatcgtttcctacaatgtaccaacataaagcaccccaaaagaggatgatgagtagtttcatcttccaacccacacaaaagacaaagcccatcagataacaaaccatgaagtgcaagattaattttagtggggatccaattaagtgacacttgccaagcaaagattttaatcttaggaggaagattaagggactatattttttttcgccaaccagaagcgccaccagattgaaaagcatgaggcataaccaatttgcgaaggctaaacaaataaccactcttaacagaataccaaccataattctcaaagttccaaattattttatcaggcacatcatgagaggaccaagggatagaaaggatatattcagcttcatggggcaagaaattggattgaatcaacatattatcccaatcacttatatctttccttaacactaacaccttactagaaccatcagttgactagacgcagataacatggatggcagcacagaagggatccaattgacagaataaatagtgatgtccttcccatttcccacacgccaaacaacccaagagtcaaaaagttcttttccccataaaatatttttccactcaaaggagccactcttagatttcttgatctccgcaaaggaccgctttcgaaatacagaccttttaacacacggccagccaaagaattagagacattgtaaatgcgagaagtttgcttaccaagagagcctgattaaataaatgcaggtctctaaaacccatactgccatcttctttatgtaaacaaagtttgtcccatgtgcaccaatgcatctttttttttcacttcattctcaccccaccaaaactgagcacacatacgatggacatttttgataaaggttttcgaaagctaaaaagattcgtagaatacatgagaattgactggataactgctttgataaaaatctcacgccccgccatagagaataattttgatttccatccatgaagcttcttccagatcctatctcgaatggagtcaaacaaccctgtcttactatgtctcgcaaaataaggaaggcctaaataaatctcatgacactcaacaccattcactcccaataaatcaatcaaactttcttgatcagaactcaaaacattggggttaaaaacacaatgcagacttgtcaaagtttactagctgacccgaagccgctccataccaactcaaaagttgtcaaaatctcacacaacacacttcataagccttgagaaagaacaaactatcattagcgaacaataggtgtgaaataacagggccgccccgacctagggctggcaaaacaggtcaaacacgataacacgactcgaaactcgcacgagagttagcaagtttggatttgccttaaatgggttcgggtcgtgttcgggttgacttgtctaacccgtttaataaacaattcgtgttcgggttgacatggctaacacgatattgacccattaatgatctatttaaaattatttagtactttaatgtgtcataaatggattataaacgtgttattggttgacatgtttaaacaaaatatgcttataaacgggttacacgggttgtgtcgtgtcaaccagtttataaacgggtcgtgttcaggttttattttttgacacggttattaaacgggtcgtatttgggtcaagcatgtacctgttatacatgggtctcgacacgacacgaacatgacccgcgaacacgaattgccacccctacccgaccacaaggaagcctaaaccacaacttgtttttacaatcccttctaaccaagctcaaaaggccctcaacacaaagtaaaaaaaataaggggacataggatcacattatctaagcccacgttgaggagtgattgagccaatgacctcaccattcaacaaaatagagtactctttagaagagatgcaatcaagaatcttacaaatccaaacaccatgaaatccgagcttcaccatcatctgctccaagaaacaccactcgatccgaccatatgttttgaacatatcaagtttgagagcacagaaaccatcacctctcttttttttcttcaaagcattgatacatttaaacctaataagagcattgtcgatactaagacaatttggaagaaagacaccttgttcatccgaaatgatgtgacccaacacctctcgcatgcgattagtcatagccttagtaataattttgtaaaagacattacaaagactaataggtcgaaagtctaaagccttgatggggttgtcaattttaggaatcaagaaaataagggtttgtccattgctatcagtaacgacataaatataatttacttgcaaaaattatgtcaaaataacgttgtattctctttattctcaagatcacttagtcttcttatgatcttgatagtaaatttataaataatataaacccaagagtataagactattaccagggctaaaccttttataaatcctagggttatttattgtttatttcctttgctctatcattttttaatttttaatttgattatttattgttgttcttatgattctgtgtagttggctaaaaattgagtcaacatattttttttacctgtcttgtaacatgagttaaatatatcaaatagagttgtaaatatcggctggaattctaacacgacacaaaactgatacaaattcggtaggcacgagcacgacccgacacaaaaaattatgggctcgagcatgacatggcatgatactgctaattggcacgacacgttacgaaaaaaataagtttaatcacgacacgatacgacaagctcaaaagcatgtcacgtaagtacaaatatactaatctaaaagtaaaatacattaataataatataataacagtaataataaaaagatacatatatatttatttactaataaataaatatttaaataaatatttaaatgttaatcattctaattaatttttatatgataatatgtaacgtatttataaaaaattatataaaaataattaaaattataaatatatataatttagtgattaactcattaattataaaaaaaatagtaaaaaaataaaatctgagttcgacccctatataaaattatttacacatactaaaattttcaattttttttacttttttactgtggggcagaatttttttcaaaaaatactatgtaagttttatactgtgtactatgttaagtttttagtgttgttctacggttattttttagttggttcactgttgtttttagttgttctgttttgtgttccactcttattttataaaaacacaacatttttgaaaaaatttccgcgtgatagtatttttgtaaaagtgaacccaaattccagtatttttgtaagtttcccataaaaaaataagctgacccttttatgaaattggattggcccaagtaaagtagaatcgaaaatgtgagcttacaggttgtgctaagcttaccctttaaaatattggtgcagcacgacacaattcatatacttttatgagccggcaaggcacgacccatattattgctagtttttcaaaatatggcccaaactggcattgcacacacgtatttatagctattctcatatatatagttcaatttaacctcatttttctctagttaccttaaacctttgagtatcaaaaatactgattgttaaaaaaaaatcactaaaactacaatatatgataaaaatataattttattaacaatttcgaaatacaatgatataattaaaaatagagttatttgggtataaatacttaagtgtaactctcagttgcagataaatacttaagtttatttttttaatagtaataatacttaaattatatttttgaagaccttgctaataaatgtcaagtcattacccatgttcactttcttattggtgtatttaaattgatttttaaataaaaatttaataacatagaccagttagagattgccacataactattgacatacctacaaaagtttcaaaaatataatttagatattataaatgtcaaaaattaaaccaaaacttaaacttatatatttatgtgtaataataaaaatacaaggtactataatccctaatatttgcacatatcctatagtattgagcattgctataaagcaccagtggtgtctaacatcttctcgacatgtcgcgttgtgattggctagcgatactccttaaaagttattaattaaattatataagacccgatacttagttnnaccaatagcgatattgacacataaaagggtgctaagcactactggtgtcctttaacatttctctatagtattggacaatctatttgacaattccccttttatattgttaaaaaaacaaaagtggggccaaactctcaatatctcaaaccgagggttgttctggtcatgaggacattgtttccaacaccaagaaattaaaaataaattgacgaagacgaaagggaaaaaatgacattgaatgtcatacattaaacaaaatttctcaacagccatacatgaagcaattttctcagtaggcattttacaacaatcgcaattagttgtgatggtgaaaaaagaataaataaaagagtaaccccaaaaatggtcacatatttacaatgtcaataatataccatgaagattttaggggaaggaagagaaaaaaaaaaaggaaaataaaagagactatgaagatgtccttaaaaatcgacatcttgtggttgcccctaaaaatggtatcaaagagtgtttgtcatccaatctatggtcaatcaccatcacttttgccactaaacctaaaaaaaccatgattctgtctttgccgattccaagatggtgaatcgccacaaggtgaaaaacttgaaattcaaattatctagctacacttacacaacaggtgagaacgagggccaccttcagaaatccaaaataaaacgaaggctcggaaaaagatcagatcctgtacaaagaatggatctttggaaactctccaataaagtctgtatgcaaaggcaatggctaccaactgctgtcacattaaaacagaaaatactaataaattcatgagaaaatgaataattagattgtcttcaaatgtgcaa

SEQ ID NO: 15719 - DNA, 4391 bp, Cannabis sativa
atacaaaaatatgtgatttttttttactattgatagtcttttgaactacaaaataaaataaagaaatataattaaattaaagaaaatgagagaagaaagattaggaagatgctacgtggaatatattgattgattgattgattatagataataattaaaaaggatagatatatattttgaaaaaaatattatatttaaaaaaaaaaaaaccacaaaatagattaaataaataaacattaggatcagatagatagatatttttggataataataataataataatagaagatatcataaataatgtgagttataaaattaaagagacactataatttactataatttaatgtgattttttttttactattgatagtcttttgaactacaaaataaaacaaaaaatattgagatatgtaagatggagtgttagttgaaatcggttaagagtttgttagagttctgttatgttagttgctagctgtcttgagtggttggtttagtcctgaaatgtataaaatcagattgtatttctatgtaatcaattaatgaagaatcaatttctggtgttcatattttctctcttctctttcttgttttctctggtttatcaactaaaatggtatcagagccgttcgattgacatgctcaatgcttccgcttcttcttcggattctctttttctcattactataatctgatcttccatggctcggggaagaggaactcaaaattacagtactcgaaatcttggagctgaggattccaatcctttttcagctctcgatgaaacaaacagatttctcacgatcgatccacgcagtccttattttcattctagtgcagataatgcctcatcatccttagttccaaagatcctcactggagaagataattacagttcatggaaaaggtctatgatggtggcgttgttagcgaggaaaaagattaagttcataaacagaaaattacctgctccagatgaagacgatgaggattacgaagcttggatcagatgtaatagtctggttattttgtggattctgaactctgtttcacctgcgataggtgacagtgtcatgtacgtgaatgatgcttctcaaatcttgtctgaacttgaagagagatttcaccagaaaaatgctcctagaattttcgaggtcaaaagatcgatgcagagtttgacacatggatccagtgatgttacctcttactacactcgacttaagagtttatgggatctgttgcaggaatacaaaccccaaccagtgtgcacttgtggagctatgaagatcatccaagagtatcaagatgaagataaggttcttgcgttccttattggtctcaatgagtcttatcttaatgctagatctcatattcttcttcaagatcccttgctaatgtgaataaggcttttgcttccataatttaggaagaaaagcaaagaggaattatcattcctcaaagtgagaattcgaagtcttctcttgagaatccagctcagtttgctgggagtgcacaaggaaatcgaaacaataatagatctgataacaggcaggatcgttttgataatcgttctatttgctctcattgtgggatacctggccacaccatagccaagtgctataggattcatggctatcctcctggtcaccgtttgtttggaaggtttcctagagaaattcctaaaccaggaagccaacaagaacgttcatcagccaatttctcttctggtggcagcaattttaatgaaggaatgagtgaggaacaaaccttggctgttcaatgttagaggctcatggctatgctaacacaaacgatgcaagaaagttcttaacaatctcaacaatctcagtcatctcagcagcctgagcagcctgttgtgtccaacatttttggtaatccctatcctattcccaaatttagttagataattgatacaggtgccacgcaccatgtttgttccaatcctaattggtttcattccattcaaaagaatactagcttaacacatgtaaaattgccaaatggaaccaacattaggatatcattcataggcactgttaaactgctcaatatcactctcacaaatgtgctttgtgttcttgagtttaagcataatctgatttctgcatgtaccttgtgtgattcttctaattattctttcctatttttgcctaaacaatgtgttattcagtatatcaccaagaatcgtgtgattgggatgggtgaaaggattggcaacctttattacttgtctgaaaccaatttccctgttatttgttcaatttctgattctaaaatcagtgatgacacattgtggcattatagattaggccatgcttcttgtattaaaaatcattccttgaataaagccttacaatttcaatactctcatgattccaattttcatcgttcaatatgtcatcttgctaagcaaagaaagttgccttttgtttccaatcataatatttccaagcaatgttttgatcttattcatattgacatttagggaccatatcatgttcaaactgttgaagggtatagatactttattactattgttgatgattgttctagatatacttggatcaatcttatcaaaaataaatctgatgctcaagtagctataccagcttttattcacatggtcaaaacccaatacaatgttcaaataaagggggttagatcggacaatgccaaagagcttcaatttcctcaacttttctcttctcatggcattgttcactatcactattgtgtccaacgaccacaacagaattctgttgttgagagaaaacatcaacatctgttgaatgttgcccaagccatcctatttcagtcacaggttcctttaccatactggggggagtgcattagcactgctacctacataataaataggactcctacacccaatctcaagcataaatccccttttgagatcctaaattctagagttcccaactatgatcatcttaagacatttggatgtcttgcttatgcttccactcttggggctgctagatcaaaaccctaaagccatcccttgtgtttttctaggatatcctatgggaatgaaagcttacaaattacttgaccttgatactaataggattttttgttctagggatgtcatatttcatgaacaatttttgccttttctcaaacatggtcaagtatcacctgatatttttgagttttttttttctgctgatgcatttcaaaccagtattggttttccccacaccagttcgaatgcacaacagcatactccttccagtttgcctcatcccatagttgatcatgatgacattatttttcataatccatctgttcttcacaaatctgattataccagactcgtgcctcctgttcttcaggatgatgttcatgatttaccacagcagactgttaacagtaggcctattcgaaaagtgcaaaaaccttcttatttgcaggattatcactgctatttgtccacaaattctgttcacacacaggagctcaaagcttctactaactattctatttctcagattgttgattatagcaggttgtcacctaaatttcaagccattgtgtcagctatttccagccattatgaacctgaacattttcatcaagctcatggtaaatctgtttgggataatgccatggacactgagattgaggctcttgaagctaatgatacttggattattgtttctttacttgctggacaacatgctattggttgcaagtgggtatataaaatcaagtataatgctgatggtttagtggaaaggttcaaagctcgccttgttgcgaaaggatatagtcaacaagagggtgttgattataatgaaacccttgctcctgttacaaaattggtttctgttaaacctgttcttgccttggctgccattcaactatgggtccttcaccaacttgatgtcaataatacttttctccatggggatttacatgaagaggtgtttatgactctacctcctgagtatagtcctaagagggagttgccacctaatgttgtttgtaaactcaagaaatctctttatggacttaaaagcaagcatcaagacaatggtttgaaaagttttccacaacctttattgaagaagggttctaacattctgcatttgatcactctttgttcatccaacacaaaaggctcaaccatcataattgtaatatcctgaaaattttattgatatttatttggccatatttaattaaatatgtaattatgtggatattagagtaagattttaatattacttaagctatttacgagttaattagtgaaatttgagtaaatgaataaattaagcgtaatttattaattacggagattttattaattttctaacaaaatcttcaaccctaggagcta

SEQ ID NO: 15720 - DNA, 8317 bp, Cannabis sativa
agttttgtcactttttattattaagttcaatatttttttagacattacttgaaagctaatctttcatttggaagaagattattttaattaacaaatattccttactcgataagaacggtttgtattaatgtaggtcgagtttggtttactaatactattataattttttttattttgaaatgaacattataatcaattttttttatttgatataaaaataaaattcaataattaatatattaaccaaagtgtcctcatttcatttgttgtcaactatacatatttgctaaagaagtaagagaaaagagtgaaaagtttttatgtagaggtattacaaatgttaaaaggctcaactaaacattaaacattgtaactgtaatctctaatccatttcaatcttctttataccaaagaaaatatgctaattagtttgtccggttcttacattattttaaaataaactattattaattatggtttttaaaaggtatttttttttttcatttatacatttcaaataatttttttttatatatttttacggaaattcacataacaatccacatagtaattaactgaataactttgcaatttaaattcacatagcaattcatatagcaactaccgcaacaatacaagccgtaaaataataaaaaaaaaatcaaaaatggtatataggataattcccctttcgaaaaattcaaatacaaaccaaaccaattaaatagtcaaactaaactaatccaattaagaacgattggtttgattcaaaatcatgggttacaccctcaagcaaattctaagggaagaaaacacaactactaatgccttagcacgacttgcgagcagcacggtgatagataaggctaatctagttccaatttaattcttagaaaaacctagtatcacctgcatagaagaaatcaaaatggtagatactgcaccaaatgggatgactcccatagcagcttatctcaatacttgagaacttccaagcaaaagaaatgaggctcaaaagatcatgagaaaagttgtacggtacatcatagtagaatgtgtagtgtacagaggaggcttttccatgctattgttaagatatgtgacaaaataagaagctgcacgactcccatctgaagtacatgaaggattgtttggtaatcacgctgggggaaaaacttatcaaagaaaattctaaggcaaggatatttttggcctactatgatggaagattcaaaagcccatgtaaagaagtgcgtcaagtgctagatatttttaaagattccccgagtacccccaaatgagttaatacagatacaaagtccatggccttttgccatatggggaatagatctgatcggatagttgcccaaaggcaaaggtggagtacagtatgtaatggtcgcggtagattacttcaccaaatggacaaaggccgagcctctagcaacgataacatctaagaaggtactagattttgtagtaaaaaaacatcatatgtcggtacagacttccacacaagattgtctcaaacaatggtaaacagtttgattgctagatgttcacagacttctgtatgacacatggaatcatcaagagtttctcgacagtagcataccctcaaataaataggcaagtcaaagcagtcaacaagacactcaaagataccatgaaaaaatggctcgaagaagctaaaagaaactggttagaggaactactagaggtattgtggtcatacagaataatagaaaggacgacaatttggtagacagacactatttgccatggcttatgattatgaagcaatgttgcctgtagtaatagaacccccatcccacagaagactaacttatgatcaagataccaccaatcatgccctcctgacataatcactggatgaaattgaagaaaaaagatcttcaacaaacctaaagctagtggatcattagcaaaaggtagctcgatacttcaataagtaagtgagggcaagaaagttctttgtggaagatatggttcttagaagagtattcttaaatacaaaagataggacaacaagtgtgcttggacccaattgggaagggccaaccaagtaacaaaagttacagattctggagcatacaaacttggtcagtatgatgaaaacatggaactggtcctaataccaaggtaatggaacagtaaacatttgagaaaatactaccaataagtgtacaaggtctgatgacccccacaaagtacacaatgctcgaacacccattcttaaattggtggccttttgagaggaccttgctcaaaggtttggaaaaaacaactgatactcaggtcaaatgattactcgtaaagtatagtatgttcaaaaatctttgctcttaagcaatgtctcttggaaggactatactgtttaaattgttttatgttttaattagccatgttatttttccacataatgaccctttagtcgttgaggtacagattacaaacaagatggtggcacggactatggtggacaatggagcttcctcaaatattctattcaagacaacctatgagaaaatggagctcaagcttaaagacttaattccttgcacccaactggtctacgggttctccggctagagtgtagcaccacttggacaaattcacctaccacttatagttggacaagctccaaagagcataactgcaatggcacaattcctggtgatcgatgtaccctcaaattttaatgtcatgttagggcaactaaccttatatgacttaaaagctgtcacattagtattccacctgttcgttaagtcccaactaatagtggggtaggctttctaaggggaaattaaatgattgcacaagaatgctataaccttgctctatctaaggtcaaaacggaaaatacttctggccaaagcttagagaaagggaaaagattgcccaataggaattcatccaaggtagggacgaagacatggatccctaacatgggaaaacgaataaaaatgttgggctaatcgaatagttagaagaagtggagatcgatcaagctatcctagccatgaagctcaaaatcggtaaaggtttgctgctcaaaataaaattagccttaataaaatttctaagagcaaactttgacgtttttgcctggtcacatgaggatatggttggtattgacccactatcatttctcacgccctaaatattgatccaaactttgatcccatccagcagaagagaagatttttggacaaagaacgtgcacaagcgctaaaagaagaggtagaaaggctatgcacaaacaagttcattattgaggctttctacccggcttgggtggccaatcctgtgcttgtaaccaagccaaacaaaaaatggcgagtatgtatcgactacatcaaccttaataagacgtgtcccaaggactgttttcctctcccaaaaatcgatcaacttgtggatgcaacagctgggcatgaaatcctaagctttatggacgcctattcgagatataatcagattagaatgcatccacctaacaaagagcatacaatctttcgaacatatatgggtctatactgctataaagtaatgccatttggtctaaaaaatgttagatctacctaccaaaggttagtgaaaaaatgttcaaatactagattggacaaaatatggaagtatatgtggatgacatgctcctcaaatctaggaaggttggggggcacatagaggatctggatgactgcttcaaaatccttagaaaatacaacataaaactcaatcctttaaagtgttccttcggggtttgctcaggtaaatttttgggatttattattaatgctcgaggaattaaagccaacccagagaaaatacaagccctcctagatatgaattcgccagcaaaaataaaggaagtgtaaagctagccgatcggatagccgcacttagcatattcatatcaaagtcaacaaataagtgcgttcccttcttcaacatcctttgaggtaataagatgtttggatggacaggggaatgtgaaaatgctttccaagagctaaaaaggcaactcgcaaagcctgtcgtaccctcaaaacctttggacagtgaagaatgagggatatatcgcatgatcaacttgcatgcaccggacatgatatgtgagctggcaatttcaaagaacaagcctcgttgcttccaagacacgaagataatccctacgttcgtgggattaggtcaaagaataaaggtaatatgccttggtttctcattctttacattgtaattatagaattaatatagtttcctattttatttattatagattaagggaaaccattattcatgtaataagctcctataaatagtgacataaattcactattgaaggggagaaaattttgtttagaagaacactcaagagagaaaagagcaatccaagagagaattactcagagatcaattgtaagagctttagagaggaagaacatttcattcttattctcaagtataaacaacaaaaaggagagtaggctgctaccattattacagggccgaacctctagaaatttccgtattctttttatgtttttgctttttattatttatttttatctaatcgctttatgttgactcactaccgttggttaaaagtgaggtcaataattattttatcttttttattgcatataatttaaatcctaaccctagatgaaattttatataaagaataagatgactctcattctcatagcctttgtaagacaactgagaaatttcgtcctttgtttcttcattaattttgaaccaaatagtgatagaatacatgcccacttatatcaagtcagtactcaattatagtgtagaagattataaagaatttcaatacctgaaggaaacccagtttcaaacttgttattattctgcgacaaaaagaaacaaagattagaaatctaatggaaggagccataatattctacttacactaatcaaaggtaaactagaactttatatgtatttatgtttagaaaacatacttgttaataaatttaaattctaataaaataaattctaatagattagatggtaaaatctaacatctaggatctaaatagaactaaaaatacacccctaatcatcaatctaaaaaaaatagttataggaataatagtttcacactttcccaattcccctccctgctgtccaaaacaaaaataaaaaaacattatatcatcagcatcagcatcctctctttcttcagcaacataacagatcccaatcaaagcaaatctcatctggtcctggtcctggttctgataaggttgatatcaagctccatcaaaactaaatgtctggaatcctaagatggaagaagcagctctaccaaatatgtgcggttcatcatcgcttcactcaggtctcacccatctccactcacctcaaccacctccacataaccacccatcgacgccgtgagtccctcgtcggagtccaagagcgctacaagtgggaccatggcggttcccacgatacccgcactcgcaagatcagagccgaggcaaattgccctcggtgttccttcaaccgcatggaccttctcttctcttccagtgtccgcttccccaatctcatgccttctcccccttcgtcggatgccccctcgtccgatttacaggcagttaatctctgccccaattgcaaaaccgcctactacttccgtcccaaccgtactgcccctctccaaggcaccttcgtcgagattggaaggctaactaacaccaaagtccacgaccaggacaagaagggtacctctagaaatagtagctccaatgatgatgtcgagctgggctctctcaataataagtttaaaacctcgttttggaacacgttgagatcatatggtaatggtgccgaacctcctgagaattggccaccaccaccgcctccttctcctcctcctcgttccaatggactgaccgtacacactccaccaggcccgcccttcgcacctggcgttaatgtgattcgagcatcgggttcaggttcaggccccgctggaaatggctctgctgctagtgccgcagacaaacaaggctggggtggctccaatctggggaaggatttacccacgccaaaggagatttgcaagggtcttgataagttcgttattggccaacaaagggccaaaaaggtctttctttttctgaaataatttaaatgctgccatttattcttacttatcatcgatgtcatcatatgccatgccttctagccatgtttcgcttcacataatttgactcgttccttctcctctgaatggcttatatctatgctacaggtgctttctgtggctgtttataatcactacaaaagaatctaccaaacctccttacaaaaagggttagctttacataataaatttgcatttggcagcccagtccactagggggttggctcattttgttattaaattgctcacccctagttatttcaattaattgaactaagttgattggttttattattattgttatgttattctaggtcaggaacagaaaccggaattcccaagacaacgtatgatgacgatgatgatgataacgtggagctagaaaagagcaacgttcttctgatgggtccaactggctcaggtttgatatctgcattcgtgatcacaaaattatttccttcattgccttgcatcaataatttagagcctttcgatggaaaaataatgactctcaactgtcatgttaatttacacatcctcctatagggaagacattacttgcaaagacgctagctcggtttgtgaatgtgccttttgtcattgctgatgcaacaacattaacacaggtcagtctcatgctgaatttgactgttttaatatacttaaattttacttcatagcttttgactcttcttggttggaatatgtttttattaggctggttatgttggagaagacgttgaatcaattttgtataaattacttgcggtaagtcagttgtttcgtagttgatataatatattttcttgcagtttttctttataaccttagactcgagtatgtcactacttttggttcatttgtgaactgaaaatacttttttcactaacaggcagcagaatttaatgttcaagcagcacagcaagggatgatttacattgatgaagttgacaagataaccaagaaggttcgttgttttttcttatgttttttgttaagtattgcgtagctgaagtattttaagtatgttgctgtcattttttcaggctgaaagcttaaatataagcagagatgtttccggtgaaggtgttcagcaggcgttactgaaaatgcttgaaggaactgtgagctactgtgttacattgcattgagtgctctttttattttcataaagaattattccaatgctaattatatatcactaagaacatttgaaattcaattcttaccagatgaactctcccttcaaacccataaaaagcaaaaaatgaaataaagaaaagcaatagacatagaagatgtaaacatggtattatattatctgtgctaaataaagatttaatattaaattacttggtaagtatatctcttaaataggtgtgtatgtctcagtccagaagtagaaacatattttggttagatatggcatttcgttttcgttgtaaaagagttcaaagtacagttattttgatatttcttgaggttggagggtgctccctccagtgtgttagagcgaagtttaatctgaagtatgtcaatgctgtttatatgtcatctttaggaagtcatgccagcataataagcaattttctattgaatttaaagggcaagcatgtctgggagttaagaaatagaagcttgagcacacaaaactgttttagcttttcggcagataacttgactttccagtttgtgactccaaaaagtcattgttatgtttcgttaaaagcctaaactgccagcaaaatgttttcactgcacacatgatggaggttaatgagatacttgtgatatgatgatgttgagtgtgcaccttaagatgaaagggactgaataataaagagtatagaaggtcatttaatattgctgtattcccataagtggaatattgttgcgccttttatttttatattggaattttgtatttttaagttgtggcatttatttttgctatcacatggtcattttaaaaaaatatatattattatggtattctcatcattctgctggtatcttaccatgagattatcttcttcctgtctagatagttaatgttcctgagaagggggcaagaaagcatcctaggggtgataacatacaggtatg

SEQ ID NO: 15721 - DNA, 6150 bp, Cannabis sativa
  modified_base (5588)..(5588): a, c, t, g, unknown or other
gttagtttaggttatatagagttaaaatgtgtccaacccataaccaacccataattatatggcctatcacttttcagtctaataagccatgacctactcttaagataactctttactacaaaaaatgagttggattgatcgggttgaatagtttgtcccatattttgtgcacccctacgaattactcatagaattttccatttattaaataaaaataaacaaaaagaattacaaccctaattttcattccttctctttattagtaatcattcattagagtaaaatactagaatcttgtttatttatttaaaattgaactaataaattctgttaaataatataaatttttttaaaaaaataaataaaaattattaaactaataatccgttaaatacacacttaatataaaataaaatatattgcaaattaggttgacatataaaataataaaataataaataaacagataatgttttgtttggttaaagattaatttgataactaattatttttatgcaattatccactcttttagttaaaggcaatcttatgtcagacagtgatgatctgtccactcacaaatcattttatattaatcattgtctctctctcttacttgtctcatcgaccaaaactaaaagcactgctcttccgagctctaggtccttctacaatggcaaagatcaaggctttgctttctgggtattttctgcttctatttctagtgggagcttccgttgaaattgaaggaagaatcgtctctttattgcatagttatgacaaaccaagtttcgttagaccctcctttaatcgaatttatgatacttctaagtatggtattttacagctcaataatggcttggctaaaactcctcagatggggtaagtttgggatgatttaataatgtattttaaggtatttgattgttaatttggagttttttttataagctcatcgtttatgctgcaaatgcatggttttccgcagaattgctttttctccatggtatattatagtgatcttattttgagtttagaccataataattggcttttgcttacctttggcagatggaatagttggaatttctttgcctgtgacatcaatgaaactgtcattagggaaacaggtaacaatttcttggtgtcataggtagctatgccagaaccattaattccaacatccattatgctcattgttttagcatcagtgagtttaagatagtgaaattgacacaatagataatcttgaacaatttggaactatttgattactggtttgaaactatgatgattaatgttgagtggaattaggattcacataaagggagatcccggtatgaagttactgatacatttctatgtgattgacacagctgatgcacttgtcttatcgggcttggctgatttaggatatgtgtatctcaatataggtaatgttcttctttctggacccctaatatgaatttggtgaactttagattatgttcttttggatctaattttttttcttcttctattggatgtagatgattgctggtcttctccagctcgaaatttaaaggttactgctgctactaatcaccaaactatatatctcacaaatttataatcagtataaccaatggttgatcttgtagtctcataaggcaccatgtttatctctttccaacgatatttgaacttgctccttcaatgtggaggatacattttaattcttactcaattatgtttttatttgacctttcatgtttaagtgataaaagatttatagccattacataagtacaaactttggagttcatgtatgttttaaatccttttaatgctgctggtttgctaatgcagggtcaattagaacctgatccgaaaacatttccatcaggaatcaaagctctcgctgattatgtacatgtgaagggccttcagcttggaatttactctgatgctgggtgggatgaaatcgaattacattactgtcgatttcttgatgtctcttttgtttatgtgtttatctgtttttgtttttcccgtttcgtgatgatctattgttttatagtcctatttcacttccatgctcactgttatattttatgcatctgcattttctagggcttttacatgccaagttcgaccagggtcactttttcatgaaaatgatgatgccaagctgtttgcgtcatgggttagtttcttcaataacttgctgtgttttggtttaagaatatgtaactgatttactacattaatcttctgtggtttattgcattatatattcttagcatgaatagctaaggtgatgacttgggataaaatagaagcaactggttgctgacagttaatgtcttcctcttcaactggattatctattctattaaatatcaacagattatgttattttaaatgctatgctggttggctaaattgctctagtaattattctttttaagtggcctttaatcaatctcaaatgcacaagctcatttcagatatctaagctgtgtttatgggttgttctacctgattattggtttatggtattctatcagggtgtggattatttgaagtatgacaactgtttcaatctgggcattgatccaaaaaaacggtttaacctcttctttgtctcacacatctattcaaataattactattgagttggtttttgtgtgaattgacttgtttccatgctattcagatatcctccaatgcgtgatgcgttaaacagcacggggcgtacaattttctactctctttgtgaatggtaatctagttcattgatccatttaggtatgtgagttaaactctgttacattgacaatggtttgtatccaatttttttgctacacaggggggttgatgatcctgctttatgggctgggaaggtaggaaatagctggcgcacaacagatgacataaatgattcatgggccaggtcctaattctgcaatttttaatcttagaggaatggattatgattggtgccatgccatatcaaaatattcaattcaatttaatatgaaactggtattgtatagtattgatagaatttgctttctcccgttgtttagcatgactaccattgctgatttgaacgataagtgggcagcatatgcaggacctggcggatggaatggtaaaacatgaggaacttttgtgaaataaatatgttgtggaaaaacatgtgtatttgtgtggtaattgtaattaatcctacaattttgagcagatccggatatgctagaggttggcaatggaggtatgacataccaagagtaccgtgctcattttagtatatgggcattaatgaaggtttttattttgtttccatcctaaaatttaatttatctgtattatcccatttgcaaagattttttctttttaaattttttataaatggtgaatatcttaaaggattgcttctgttgtgagtgcgattaggcagagagacgagaaccttactttaaacctcagttttatacttgtattttcagaccaatgagacatttgactgaaactattttgatttgtttatgtcacatactgaagaatatgcatttaaattttccaggcccctcttttaattggctgtgacataagaaacatgactgtagagacttttgagattgtgagtaataaggaggtgattgatatcaatcaaggtaaatgtactctttgttttccatgtgtctttatatgtgttgatatcttgacttgttgcacatataacatctaaaggcctgagagttaatatgtttttgcagatcaacttggggttcagggaagaaaaattcaagtttcaggaccagatggttgccgtcaggttctgccgccctctttaacctcgtgtagcatattaactaacaatacagctaaagcacttgaaaatcaattgaattttagagataaaatgagcattttacaacttcttgcctaacagaggactaagaactcccaccagtccaggccctcttacctgggattttttttcccaggtccctaaaaaaaatcatgttttcacatgtctagcaacttgattattaatatgttgctaatctattttcttttttcagatctgggcaggccccttatctggacaccgtttggctgttgctctttggaatcgctgcgcaaaggcatcaactatcacagctcattgggaaacacttgggcttcaatcgagcactagtgtagcaataagagatttgtggcaggtttgaaattatagcttttcgggcacatgtatcatcttataagaattggcctcaaacctttctccttgcacttttataatggttactcctactggttgcagcacaaagatgtagccgaagatgcagtgtcgtcctttggagctcgagttgatagccatgactgtaatctgtacatatttagtccccgaacggaagctctgtcgaaaatctagagcaggctgctgcatttagcgggcttcaaaggagctaggacctttgattatgttatgtccattgcagtagttgtgtatgatttgtacattgtctgccaaaataagactcaaagttgtcctactgagtgccacactgtgaggactgtcttggctattatgatgctgaaacatcagtctccttggccttgtcatggacctaccaaattgaacatatgatcattggttgctttacttattacttatagggatatttgcggtacaaatatttttcagttttatacacttatataaatattatatgtaaatgtatttaacttataaaaattattcaaattatagaaaaatataataagaaccgcttaaattaattcaaaaattaaagaaatattgcactttataaaaatattatttttgattaaaagaaattaaaagaaaaataaataaatgaaaactattcaaagttatggattggattttataaataattaaaagaaatgttaatactattttaaactatttgttttgtaaaagttatagattgaattttatgttttgttaaatgaccaattaggtcttgtatttttgaaaataatataaaatagtaccgtgagtttaattttcaacaatttttttaatagaatcaacttgaaataatttctagcacgaactaatgtacaatatataacaagttttgtcataactgttgattttttattcaaataaagtgagtgcaacaaaagcataatgagagggagaatgtcacaaaaaaatttatataaacaatttatatatatttttaatgaattcaacttcgttctagcatccataactagaacaagatcttgttcatgataacggatctaacagaattataaataaattgatatttacctttagtagcgcaaaacttcatattcaatccttgtatgccatgaatgagatcaccaagcctcatttgtgtgtgattggcttctataaccatttatctttgagactatatcttgcacaaatgaaagagggtgtgttgtctcctttttcaatggtaaaatcttgaaatgcacttttgatctcaacacatgagagtgtaagtctttgagtgaaattgaagaacacaatgagtgttcttcaacattaaggggcggaagagagagagagagagagngagagagagagagagttgagatgtcaatttgacagcatctcagtatggatgtcaagatgctctccttaaatctctcctcataactttctatttctagagcattaagtaagaagcaagtaagaaatttacttgcttagggttgggcttcggcaccaatcacagttcatggactgtgcttgggtgccacctactacagtctatgaattatggtatgatttctattttcttcttgtatttacaccatattttatttttctaaaaaataaattgtataaataattaattttctacaaaatgtcactatattttattttcccaatttattattttaaaaataataatttattttataaactattttcctcaaaaataatactttattattttcttgtactaaataaatcaatactttatttatttttcataaataatagttgtttatcaaaatttttagaaactaaataaaataagagttaagaaattaaaaaatgaggaaattacacttattatgggattttaaaagttcttatgataaatatgacacatttaagtttgaccaatt

SEQ ID NO: 15722 - DNA, 3733 bp, Cannabis sativa
cttgtctctttgaggaaaaaagctcatctgcgttcgaaatggtaaacgatctgaagcaattctacactgcattggatttgaggttggttttaataatttttattggggtacaatccaatgttgatattgtcttttctttgtttattttcattgagcatttcctcattttattaccttcacaggaatataaatgttgtgaaagagctttctaagaagctgcaatcagagaaaccaagagtgaaacttgtcttgtcacagctatattcccaacccaccacagatcttgacaatatggctttgaagaaggcttatgtagactctgatgaccaagatcatgtaaaggaacaaattggtaccatgcctgagaaaattggtattgctgacaagggtaaattaaaggtttctgaagctagtagtaccagtagtacagagtccaaggttttagaaaccagtagagaatccaaggtttctgaagctagtagtagcagtagtaatactggatttaaaattagtgagtcaaaggttcctccagtacagggaaagaaagaacaaagtggttgttacattcagtgataggttttgaggagtatatgaaatctgttatctctaaattgtttgtacaaatttcatctacagaaactgaaatatgtaaaatatttataacattgaaatatctataataagacgaccctgtttctttttagaaattcttttaaataacaagaataaaatgagattgagaacagattagaaaacattaactaggaaaaactgctaaaatgggagtttgtaattgtaccaaaacttctcctcccttgttcttgaatggctaagaaagctagagaaaataagcaaaactgtttgttaatggttcatagggaatccaaggcttttaacagatcatgatgcttcaagggtttacttagacaataatccattccaacttgttttgtcttcttagcttccttagaatttggatcatgagcagttagtcctataattggtatatgaacaccataagatttctccacttttcttatctccctagttgcttcaaatccatccattataggcatctgcaacaaaacccaatatacatttattagtatactaaaataactttcatgagaacaaaattttgatgaaaactactgcatagttattacctcacaatccattaggatataatcataaggcaaagtcatcatagaatctccatgtttcagtggattggccagttcattggaaataagttgaaaagcttcttttccatctgaacacagactagtagttccaccatgcattatgatcaaccgactcaccaatgctcgagcaacgaaatcgtcatcaacaaccaaaattctcttctcactcaatggtagcagttgattcttactaggagtactactactgctactgctaccagtcttggtcaattttcttttttcttctggtatttcaccttggaattgagtcttgtatctaaaaaaagatgacaaccctttacttgtactaccaaattcaacattgctgctagaagaaaccttagttgaaacttttctgacttgttgatgagtagtacttggtgtactagcattgctactactactagcttttggcgacgacaaagaacctccaaactcgggaagaagtttcaccacctgatacaaccgagtcccatgaaaaggcttgtgcatgataatatcatcttgatcaaagaaagatttgtaactggacaccgaatttaccagccaaacaactctgcagcaacaagtgtcccgaaggctgtttttgaacttactaaccatcttagacagttgagaaatcggtccagcagtagtaacatccataaccaacactaccaacccgcctgttttgcgctgaagaagacgaggattagtactagtctttttgaagagagagcgtatgtagtttgttccatccttatttgttgcttcaacaccaagataaggactctggcttgttgatgatgagttattgcttgaatcagaattgatgttgttcccatacttgatgcactttactttctcaagagtactaagaagttgatcccactcttccactacaaaaacttttatcccaagtctcttcataaacttatgtgaaactcttcttctttcatggttatgaatcattagtataacataagatctatctgccttgggagtttgatgagtaagaacactcaaagtaggactacaattcggagttcgaatgtcaatagataacaattcattactatccaattcatccttattactgtcaaacacatcttcacaaacagatagaagaatattgaacctgaaacaagctcccttttcgccaatgtccttgtcaacaatactgatttttccatgcatcaactgcacctgaatgcagaaaaggaatataaactcagaacatatttgctaatattcttgtgacaaaaaggttttgttctataataaccaacttaccaatgacttgacaatgccaagtcctaaaccagtgccttctttaagtacataagtttctttgtcttgaacatagttttcgaaaagatccttttgtttttcctttggaattcctttccctgtatcatccacttcaaacacaaactccataacatgtggatcgcccatgacttgatcaaattcttcctcgtcggctttgttcttgtaagacaagcatgacaacaatcggattaggctttgtcgattcgaggaggaggaattgatggtacttgagcttgttgaacttggttttttagcccaagctctaagaactacatgtccatgttccggggtacattttatagcattgcttaacaaattgcctaaaatttgtttaagctttatcctatcacctttgacatgtgaaaacttgatcacagaagcatcacatggatccaaaatcaaatcaacttttcttttagctccagaagagtggtaaagatcaactacctcttccaaaagttgagccatttgaaattcaacctcttctaactgcatcattccagcttcaattttgcttgtgtcaagaatggtgttcactatacctgaaaagccataagaaaatgttagtaatgtcacacaagaaacatttaatcatttgtaaaatagtctttcgcaaaatattattcaaagaaaaaatgtcattttgcaatgtaacataaagacataaacatctatttttaccaattactccaatgctaaaatgcagaattaagatgcaatttactctttcacaatatgaatagaatacttaatacaatatttttacaacacaatatatgcaaaatgtgaatgaaattgtttataatatgcaaggagataagtttcttaagggcttcatcctatattagttgtggtaaggtaccttacttgtagggtacggtcctaaccattcatcgatgatcagataccttacacatgaagctattcatactctatatgtagagtatatttaggcttgaacttgagctaaggcgagctaaatctgtgtttaggacctactcaaactcagaactcaaaaatcttacacatatatgcaatttgtagtaaaagaatattatccattaagcccaataatatccaaacttgcctacctatgactttacccaagcagataaacaaaatttaccttagacccatccgcctaaataaaattctactatgtttactctcatatagatagtaaagatagataaataaagatatgaatgaatacattt

SEQ ID NO: 15723 - DNA, 6746 bp, Cannabis sativa
ccattatggttatgagtaacattaggcacataattaatgattgtgtattatggaattaaacctatgattgtattagtccattataataattctaacactaaatcctgcccatattttgatattcatgattgcagccttctaaggcttttaagttgggtttgttgtattttggctaggtgaattaattatacaaaattaacttggaataaaagtgcaactaagttaagccataggaaataattcaatggcaattgcatttgcatgtgcagtcatgagacttaaaaggaagtttcaaaacacataggctaactactgctgagacttggttctaaagaatattaattcttattcaccaaagtcaagaatttttatcaatctttcctgtttagataagaactaccaaagttggtcaattaaaaaacactaaccttgatttgagtttagaagcctaggaattgtttgtgccaaatcccattgctttacatcttctacacatcatcataaaatatgcggaaaaacagaataagtaaactaataattttcattcatagaattggaatatgaatacatgactaagaacacagtagtagaagtaccagtttatcgtgatgagtaggttttgcagcacccaattcctgagcttaaggagtatgctatagctcacctggtcataactaaaagaaagcaccaatcagcataatcaaatcaaaggccagtctctttctgtatatcaaacacaaaaggttaaatgttaagtcaatcacctgttgttatgataactaatatcagatatatacccttgaaccattttatctaacaaatcttgcttgagataataaaagggattaaagtttgatttggggtgcataatctaccctattaatacagtgacacattcatttggctgaatgggaacagttcagcaaaggaaaccaaaggatatgaaactggtgcacatgaccagtatttattaagtttaataaatagtgtacataaagagttacataacataatataacaacacaaaacataagattacagaagaaaagtacacaagatagtacacaggagttattcatcattccatatttataatctgcacttttcgccatttagttccttcttgcatatttcgaatcttaaaaacatcttgcatacgtgcctgctgtccactctcaaatgttaggcctaacattgagacgggaagctaccttctgaccgagagacttgtccgcctgtacaaaccgacaccaatacataacatcagcaaatgaacattattcaacagtgttaacagaagtagattggttggaaactgacctgagacaagtaggagatccagatgctgcggatctcatgggtgacacggtggtcagccaacacatccacccatcgcttcacaaacctgtcttgtctgcatagatgtaatgtaagaagaaagttagtcaaaatctacattggtgaattgcatacaaatgaaaccaaacacttcaatactgtttttgacatggtaaaatgaccacatatgcatgtacctgtctggtgcccaagatcggtatctcacaccagcttgtgtaaagttgtcctcctttggaatagtacactgtattcaccaaaaagagaagtaacacatataccaaagtattagtaaggagttacttttactatatattgagtttggtgatggaagaattaccctttcacgctttccatggatgattttagcaggaatggggaacttttcagcatggcgaacggtatcataccttgaagggaagtagtcaatctataacaaagaagtgaaaaagaaaaaacagtatgtgattagtagagccaactaaataatatatgaataagcaaagaagcaaagaagcaaagtatatgagtttgttggaggaataatgtgagtgttacctcctcatctctgtgagtgaaattcatgcaaccatcatagtgattgttgtggtgggcacacttgggagcattaacagggagttgaaggtagttcactccaatacggtatctgtgagtatcactgtaagcaaagagacgagcctgaagcatcttgtcatcggaatagtggataccagggacggtatgggcagggttcatggcgagttgttcattctctgcaaagaaattgtcaatgttcctgttgagaaccaaacgaccaactgggtgaagaggaatgaggtcctctggccagatttgtgttgtgtcgagtatgtcaaagtcaaacttgtcctcatcagcaggatcaagtgtttggatgtagagcttccactcagggtagtttccagaggcaattgactcataaagatcttgggtggcatggctgtggttggttcctccaaccctaatggcctcttcctccaacatggacttaacaccacaggtgggcttccagtggaacttgacaaaagttacctttccagccttgttgactaaagtaaaggtgtgaacaccaaagccttccatgtgcctgtaatcttgtggaacacccacatcatcgaatagccaggcaaaggtgagcatactttcaggatggaatgacaagaagtcaagcaccctccaatactcctggatgtgagacttggggtttggtttaaaagcatggatcacatcagggaattggattccatcacggatgaaaaacacagggaagttatttcccacaatatcgaaattaccctgcaaccatgaaaaagtaataacagtgtaacatgttatatggaatacgatttagagcacaagtaaaactcgaaagctttttattatctacctctctggtgtaaaacttgactgcaaaaccacgagggtctctgatagtttcaggactaccacgttcgtggatgacagtggagaaacgaacaatgacaggtgtctgaaccccaggagctcggaggaagtcagcacaggtgaggtttgaaacatcatgagtcacctcaaagaaacccttagcactggctcccctggcatggacaatacgctctggcatcctttccctggtgaagttagcaatcttctccaccagatgataatcctccaacaggattggacctgtcaaacaacaacatcaacattttcattcacacctttaatttgtcaaacacgttaaagagactcaataatttttcttcggtaaaaatcatcaacatatcttgtatctgaattacgaagattaatcatcaactacagtaaattattcacagatgtttatcaactgcaactatccaaattaaatcacctccattttatttataacgtttaattgcgtgaaggatcgaaaaaacaaatcacaagctcaattgcattgcatgtccacgagtgccacgccaaattaatatttaaatttaaaaaagaggaaattatatataagagtttaaaaaatttttgcagatttaattttgtccattttttttaatgatattttgtttgtttttagctttttttactgattaggtttgctaaatgctttaaaatttcttcctttttgtttgaaatacaaataaaaaaaaaattaaatatatggtattccagaactagttataaacctatttttgatataaattgatacaaattaaactgatgcaattattgtaggtaaaatattttgtacaatttatttaaatatgtgtctaaataaatagttataaacgcaccttaaaagaaggcatatgatttcattagtgggttttatatattttaataaatatatttaataattatgtacaaaactttattttatatagcagatacaatctgattttctttatcaaacaataaaaaacatgatctgattgagatagtccgagtatttaatgtaaagaaaaaaaacgtgatggatcttggctttcaaaataagataatttttaaaacatatttatatatttaattttagtaaaataaaacaaaccaaacgtcactatatgtaattttagtagattgtgtacatataatgagtccaaacttcttaattatggacatagatagagttatccagacatatatataaatatatattgataaaaatccaaatatttatatgtataaaaaattattagcggtaaaatctctttttagattttaatttttatatgtatagttttttatttttttcgtaggaaaatcctttaaaaactataatttgataaccatgtgtatatgcataggtgcgagtaaatttttgaagctaatataataataaaataatttatatttaacgattatatgtaattaaaatttttaatttataaatataagtaaaaataaagaagagttttgtaaaaaaaaaaaaaaaaaatattaaatcaaaacataggtgagtttcgccgaaaaaatacctctgggtccgacagttaaagccgactcattgttgtaaaccggagctccggcatttgtagtcataaacggtgcgttgtaagcactcgatggtcgatactgttttatatccaaacaccaaatcttcattaatagcttataatataatcatcatcttcaaattataattaatattaataataaattcaatctaaactacaaaataaactagtatttctttttctttttaattattacttttattattattataataataacaataattttatttttagtctctagatcaagctagtattagtacagatcagcttacgtatataaattagtgtcatatagtgtaattatagtttatatatattatgtatgccaactttagctttaataatatattttaactatggatcaaattaaaataagatttgtaaactgactaataaactcagatcagatattctctctcactctttcttttattttatttggattaaaaaaataaatacagaagaagatgaaaagctgatcatgatgttggtttaattaaataaacaaactaaagtattaggggtttagattattattattacaacaaaactaaagaaatataattaatattaataccttgtaaggatccatgtttgaagatggagcaaaggttggatcaagatttagagagagaaaaagagtgagtgagtgaggtttggttttgaagcgtgtggaaaccttacttcaaataccagtatttataaagaagcctccatagacttttcaaaaataacataataattatattttcacatttatcctattaatagtaaaagttgacattataatgagtacagtaaaaaaaaaggaaaaagaaaaagaaaaatcactccctactccattatttaggggaaaacacaataatgtctattatcaataatgttatccaaaattctaaaatacaaaatttagtgacattacacaactagaggtcccacccacaatagcaatctcatgaacatttgaacgggtgtgtgtaaattagtgtggaattttcacaagataaaataaagattaattaggatttttgtccttaaactttgacatgtattaaatcatgcttctttaacttttaaggtagttaaaaatatcgtttaaactattttagattgttgaatttaaagaattttatttaatttcattcaattgtactatttcactgattgtttatgtactaaaccataattcatatactttgatatctactaaatcatgcccctcgaattttaacatgtattaaattatgcctcttgaatttttatccatgttagacttttttactaaaattggaaaaagtccttaaacccaacaatctcaatagttcagggatcatttttaacgaccttaaaagttcaagggtataatttagtacatgttaaaatttagggggcaaaaatccttattagcctaaaataaattatggactaaattgttgcatataactttttattattgtcgttttttattgtaatttctaaccttttttagtttgttttaaaaagtaataataaattattaatataattttatttgtaatgtgagattttttttttaaaaaaaagatatttttgtttcgtatcatatctagtgtggtattttttttttttttttgtattaaatcattcaaaaaaaaaaatatagcgatttttataaaaatatagatttttgataaaaatttacaattttattgtcacatggaattttttataaaaatattgtctttttataaaacaacgtaaaacaacaaaacaaaacaattaaaataacaatggaacaagtaaaaaacaatcgtaaaacaattgtgaaaatttaacactatacacaatataaaacttacacagtattttcgaaaaaaaaattccattccacaatacaaaagttaaaatttttagtatgtagtgtaaaacactaaaatagtgtaaccgttggatatagtatcaaagacttctttgtagggcctctttggaaaattggtttaaagagaaacaaccgaattatttataattacaattacacttacaattattagaggactcttaacaacttctctattctatcatttaaaatattttactaaaactctaccttctctatttcacctcacacttttatatatacatcaagttttctatatgttttttatatcatttaaatattattatatcattatatattttattaattaattaaaaaaatataaaaataagtaaaaagaaataataaaaaaaaaattaatagaatgaaagagaaagaaaaatataaaatatgttttacctcttcattattcatgagctaaatatagagaatttttttttagagttcgcaatgaggtataatagttaagggtttaaagcatttgt

SEQ ID NO: 15724 - DNA, 8973 bp, Cannabis sativa
actcacaatttttgtttgcatgtgtaggtaagggcaaggctaatgttgagcagtcgtgagagcgagcggatgaagattgtacaagtcgggtggttagacttcgagcattcgatctttaggacagcttgttatattttgtataatctctatgcgaaaacttttgtatcaagtacttgaaacaattgtaaatattttagacacgggatcccggctatatatatgttatttatttgggtatatataagtattttaacaaaggtttagttactcatgattttcactaaattggttcattagcaacgagctgcagttaatataaaatcacgatgacacgcctaaactagtagggtattacaagaactcccaaatatttgagaggaaatgaacctttagtcagttgaacgatattgagaataacaggcttctttgaagaagcaacccctcctataaagatttgagatttctcaatattaataaacagccccaaggtcttactaaagtcatcaagaactctcttaagagttagaactaattgcttgttccccttgttgaacaaaatcaaatcatctgtaaagtagagatttattagcttcaaacttttgcacatcgggtgaaatcttaatttagaattagtagcagccagttgaagctttttagtcaaatattctatcaccataacaaaaagcaaaggtgaaagcagatcacattgcctcagccccttctgacctttaaaacttccttggaccctccctttcaaaatgatagattcggatgtagatctaagatcatcacccaattaacaaacttttgaggaaaattaaaagctgctagcaaagcttcaagaaactcccaattcaccatatcataagctttgctaatatttatttttatagcacaatgaggagaaacatttttcctttgattcaagagatcttgcaaaatcatcatattatgagcaatggaactaccctaaataaaagccctttgattttgattaatcaaaatagggataacttttgaaagtcttgtacaaagaagtttcgagatacatttgtaaattattgaacaacaagcaattggcttgtaatccacaggtctactaggattatcatgtttaggaacaagagatattaaagttgaatgtaactcaagaggcatgatacctgaagagaagaaccccgagactgccttgcaaaatttagcccctatatctgcccaaacaaccttaaaaaaacatgaaccaaagccatccgaacctagggatttagtgatagaaatgttgaataaaacttttctaatttccttgttcgagaaaggcttcaacaaagtcagctgttgatctaaatcaagctcagaatcctatttaaaacaatcaagattgatgctgctagtagtactatttctagtgcccataaaattgcaaatatgagttagaaatgatcaaccacttcaagaaaattatcaataacagtaccttgatcattagtgtaggaagctatcatgttctcaatctttcccttcttcacacaagcatgaaaataagaagtattgtgtcccctttattcagccaagtaaccttactttgttgcttcaagaaattatgatacatattttcttgacacttgaaattagtatcggcttctttttcttgctcctgataagataaatccctcgaataagactgagccttccatttagaatcaagaaaattggctttagcagcttcataagcctttcccaaatcccctatagtgttatggtgtaacttctttaaggaatgcttaactctcaaaagcttagtatagaaccctcccaaaccaatagcagttgcaagtttctcatcaatagaccgaaccaaatctttaaactcaaggtgattagcccaaaagttgtaataacgaaaaggtctagtatctatcttcaccactgcctttgtagaaacaacacaaaagcaatgatctaaagtagtttcctaaccaaagtgagcattagaattagataatttttcatgttattcctctcacaaatacatgatcaattttagaatagattttacttgccccattcagattatttgtccaggtaaaaatcgaaccagtcttcttcatagttttaacctgggcttgagctaaccaactagtagaatgagccatatcattgaggcttatagcattccctctagatctatcctcctagttaaacaccatatttaagtctccaagtaataaccaagactgaactggaagtctcaagtttaaaagattatgccaaagaactttactttaatagtattgaacccgtagatgaaggtaatacaagaagcagattcatgtcctgacattttgacataacagtgaacaagttgttgagtttcaacaataataataactatcacaaaactcctcctcaaaacaattaataaacggccttcaatagttggactagtaaaatagccccaattagcaagcttattctccatcatttctctaattttattcccattcagcttagtttctaacaaacctccaacaccaattttattcatactacaaaaatccacaacagaatcttgtttcttcttattatttaaacccctaatattccaactagcaatattgcaattgtccattatcaattagtaataaaacttgatacccctatttcaattggtagtatcatcttatctaaacattactcagaatcttgtaaagcactaaaatagtgacatgttaattgccctatttcaatatcagcagctatagccttcaagcgatccccatacgctttgttaactgtctttttaggagtttgccaatctttatgttgaatagatttgatttttttcactgctcttagaagcttgggtcacctcctctaaattaattgcctcttcaactaaatcagagtcctcattctgagattaagattcaatgacagtcttctccccatcagttttttgctctttcttttttatttcaactttgcgacaaccgatcataatatgaccaaatccctagcaattttacacttcacagatagccgctcatagtctatactctactccatcaattgaacatattcattgagacaaagaatcgatctcgaaggcaaatcagttttgtccatctcaactaaaacccaagcaaattgaactataatgcgatctttagtatgttagtccaccataatagattttccaaccatactaactaaagcactcaagcttttgttcccccattattgtagccctggatctcgaagacgaatccacaatggaactaatcgaataagtttcagttcattcaaatcagaagaccgatgtcttacaatcattggtttcctatcaaattacaaaacccctgtcttcaagacctgattcctagtagcctcatcattgaacttaatcatagttagccccatagccattcaaactatctgagctatcccaagatgaccccaaactcactttatgaaatcctcaaacacaggcattggaggatttactccaagaaccatagagaaaactgttgtgttctagatttatgcttgttccttaacctcctcaagatcaacttgggctatcttaatacaatccttaagaagaggttcgatataagataactctgggtcccatagctcagtttctctttcgcaaaggagttccagtgactcttcgcagactcttggaattgcttctgctccatatcagaactagcctcgtcttctacctctttcgtccaatttagtttctcaggaatcacattgtccggatcattacttttctcatttcgaattacatctatcgtattcagagcttcagcaattaaagacaatccaatcaaagaatcaatacctttattctcaatctcgtctctcttttcttgaattttaaaacttgattcgcaatcaaacaactgagtgaatggctttcgaacaatcttcttccccttccccatggaagagagagaaagctacacacgcctttagaaattgtaaaactaaattttaatttgccatattttgtaaattttacatttaaatatttagtaacatatctaatcaattttgtgtacattattatctactctcactttttttttctagatcaaagttttataattaattattattattattataaatttatataaatatcattagctttttcagtttttaagttcttattttcaaaatttatttaattcttcatagcattatgattgactagtatgattctactaatgattttatttttaatgagaaaatatgttgtttcgaaataatttgtttattcttactctatgataaaaatttaaaattgtgattaaattttttactaacagcgctaaagggttatgattgtttttgaataataaattatagaggtggaaaaataacgcctcatagaatagtcaagcaaacaaaaaatagcctcacaataaaaatgagagacatgccaaaatttatgaacgggaccttttagttgagccataaattcctcttttgagaatcgacttcattgtagaagataaaaatatatgagaaatttatttaatacacttaaaataaatttttatatataattttacgatttttttatttatatttgtacgattttgtgttgttttaaagatatttttatattgtcgtagtgttatactatatttttgcaacgtgaaagataacgtgtaaacaatagttttttagaacaacatgtaaacaacggtctgtaaaaaaagattaccattgttgtaattgtaagagcattacttgcacaaattcctatatttagataattggacatgtttgtctatttggtaggatacgtaggctttctttaggtgtttggtgagataggtcattaacccttgttgattgatgtgatagttcattatgcagtcatcataaggaacatgggatagtgtgcaatcacacaataatggatttaaagtctatgacacgtctttcataaccactcgtagacgttttatctatgtcacatttaatgcgtccacagtaactcaagtttgggacctagagacctgacctgtatattttatccagctcctcgaggtgggcttgatttcctaggctagcgaaatgtgacttgagctcttggaagggcttcttgaacatggccaatgagtccttgacgattttctcaagagatttatcataatcactctcggtgtttaggctttcatggtattagaattattagaattattaagtaggttcttacggttatgaccgttattactgtttgtaactttagtcagttatgttagttgtctgttcttttccctttcttgctttagttaataatttggttggttcttttaactatagtttgggcagctgagttgattatcttatctagagttagtttgcctaactctcccctgttttctctttcactatatatagttgtaattattttgtacagatcaattcaataaaatagtattcagattcttttttcattccgcattatggtatcagagcgggaaagatatgctttcccttgatcgatccaattcttccactgtcacttgtcgtgcccctattttcggcgacaccattgttgcttctcctctgttcttcttccctgagctattcacctcggcgtaactagcctcttattctgcgattcatctctactgatccttcacaatgtctaatgaagatcaatccccatctcgaaccgaagttggagattctactccctctacaacacagaatcccgccgtacaaacaaattcgattttgcagattggaggcgtgaaaagtcctcttgaagatccagcaaaccaatattatctccaccatggagataatccaggttatgttcttgtatctcaattactaactggccaagataattacatttattggagtagagctatgcagctctctatttcagtcaagaacaaattgggttttcttgatggtacaattcctaaaccgcctccctttgattgcattctttacaatgcttggattagaaataataatattgttatatcatggattttaaattcggtttcaaaggatatttcttccagtatactttacgatgaatccgttgctgccatttgggctgatttgaaggttcaatttcatcaaagaaatggaccgtacatatacaatcttagaaagggccttatgaatttaaggcaagaaaatcaaagcatcagcatgtactttaccaagcttaaaaccatttgggaagagctgtctaattacagaccaacttgtacctgtaattgttgtacttatggtggtgtcaaaaggttgcaaaaacactatcacatggaatgtgtcatttcttttctcatgggattatctgatcaattctccttaagttagaggcagcattctcctaatggatccccttcctgaagtcaatcgtgtgtttcatcttgttacacaagaataaaatcataagggaaatcttgctggtgcaaccgatcccaactcgagcatggattttgcttttcagaacaataaggcaggtgttaccaaaccagaaaatcaaggagccaagaatcatccacctaaaaaaatagacctttttgcacccattgtaacatcctatgtcataccattgaaaggtgctacaaaatacatggatacccacctggtttcaacgagaataaacaaaaggaggctgctgctaatcaagtgcaaaccagcatagaaaatacaacaaatgttgaagacaacaacaccattcttccacaattaagtgatactcaatatcagcagcttctcaatcttttggccaaccaacaatggaatttaacacctattgatgtgagttcctcaacaggtaactcaagtatgatcctaacttgcaatgatgtttcagtttctaaacaatcttggatacttgattctggtgctaccagacacatttgcaacaatgtaaaactttttcaatgcatatgtcctgtgattactactaatttaatattgcctaataatgaaactcttgctattaatcacaatggcactatcgaaatcgatgaatctttaactcttaaagatgtcctttatgttcctaaatttaagttcaacattatatttgttagttgtctcatttatgacaattcagtttctatcaacttcaattctaatggtttttatgtccaggaaactctcaactagaaaatgattggcaaaggtaggatcaagaatggtctctacattttggaccatacacctgaagatgcctatgtatgcacgattcctgctgacatatggcattcaaggctgggacatccttctagaaatcgcctgtctttacttagcaatactctgaattgtaattttgattccctgcataaaaaccagccatgttacatttgtcccttagctaagaaaaagagattgcctttttcaaataataacaacttttctactaataaatttgatttgatccattgcgatatttgggttccatatcatattccttctcattcgaatcataaatattttcttactcttattgatgatcattcctgatttacatggatatatttgctcaaacataaatttgatgtcgttactattataccacaatttttatcctatgtacaaacccaattcaattgtgttttcaaagaattcagatcagataatgctcctgaactggtttttaaagatcttttcttaaaatatggcataatgcacgatttcacttgtgttgaaacacctgaacaaaacactgttgcagaaagaaaatattaacatcttttaaatgttgcttgtgatctatattttcaatctaaattgcctatacaattttggatagattgcttaatgacgtctgtttttctcataaatcgaactccaacaccaaatcttggaaataaaactccatatgaattactttttaatcatttacctgattacaccaacttgagaaattttggttgcctagtgtttgcttctaccctcacagcccacagaaccaagtttgaactaagggctaggccatgtgttttcataggttatccccaagggattaaagggtataaactgtatgacttaaacactaaacaaatttttatctctagaaatgttatttttcatgaaaatgtatatcctttttcataaattgaatattgagataaatatgacagatcctttctctaatatggtactgctttcatctaatatttctctaacacctttttaagattttcctataagagatgttaggacttctagtactaatgaaatcatgcaggaatgcacaccagaaactgttgacactagcacaccagatctgcaatttttgacataaacaaatacagcaaacactcctacggctaattcatctgatgcaccagctgatgtttcttaagtttctaatcgtgtcactcttagtccatccaccacactgagacgcgccagtagaatctccaaaccccttggataccttcgtgattacgaatgtcactctgtcattcatgacagatcttctacccctcactcacttgataaattcttgtcttaccataaactttttgactctcacaaagcttttatgcttgcagttacggctctctttgaacctacaacatacaaccaagcagtgcacataaagatatggaaccaagctatgcaaaccgaactctttgctctcatcaaaaacaagacatggattgttgttcccttgcctccaaataaacgagctataggttgtcgttgggtttacaagatcaaatataatagcgatggttcactagaaagatgcaaagctcgccttgttgcacaaggatacacacaataagaaggtcttgacttctttgacacattctctctgtttgccaaaatggtcactttcaagttgctattggccatttccacaattaaacaatggcccattctccaacttgacatcaacaacacttttctcaatggagacctacacgaagaagtttacatgtgttggaaattatttta

SEQ ID NO: 15725 - DNA, 7752 bp, Cannabis sativa
tatgaagataatgttgcttgtatcacctaactgaaaggagtgtacattaaaggagaaagaactaaacacattttcccaaaattcttctttacacacaatcttcaagagaatggtgatatcgatgttcaacaaattcgatcaagtgataatcgtgtagacttattcatagagtcattaccaacatcaactttcgagaagatggttcacaagattgaaatgtgtcaattaagagatctctatgaatgccaaaataaggagaagtaattttatattgcactctttttttcttgaccgagttttgtcccattcagttctctcggcgaggttttcagtgaggcaagggaaattataaacaatagatatttatggatgtgcaaattttttcaaatcaactaccatttattgtaattattattacattttcatattttcctaatctataaatcatttatttgcataaataaagttcacctcattaaaataatatgctcaaacaattctatctctttgtagttctagatcgaatcaaagttcttataaaagaagaagaaaaagacactttatttttattttctaaatggatatttttattttctaaatggagaaatatattatgtttcttctgacattcggagtcgaggatctaatcttgtagttgtaaaatcattccatagtacacttacactgaacatacaaaaaagatgaattagtaaaagtgatcaattatacataaatagatgcagaagatagaagttacatattttaggatatcaaatcgacaaatcgtgtcatttctaaacaattactacatgcgtaataatttggatgagaagattcctcaaagtccaaactcaatttcagataaatatacataactagtgtaaatagtgatacaatgcctacatggaggttaatactcaagtttgataagcctgcctgtgtttattataaataatgacattggcgttgaataaataacaaaatgacacagtactacaaatcattcaaatagaaaaacttaaatagcttttatactacaaaatattgatattacatcccaaaatgtttatagcccatcacacagtcactgctgtctacaacaaatgagtcaaacttacatcagaaagcagagataacaattaactgtccttttcctttttcttttttttttttatgtaaaagacgacaatctaaaagaaaccaaagaatattattacaaatcaaattatatgttgaagaaaaatgcaaccaatacatttcctggtgtggtgacatagcatattactctcatctttaagatgactaccaagccagccaccaaaagggggcaaaaaatctacagtttgaagcttcctttaactgtcatcttgttgttcctttgtatgtaattcacattccagatgatgtccggtttatcctttgggcacccaattttggagcagccggtttagctccccgacctctaccaagtgataaaggctttgccttagtagtgggtgcaggagcggcgattgcagcccaaggatcgtcgtcatcaactattgcacttgctttcaagttcaaagattttgatgctgttcttggagcaggagcagcaatggaaccccacaaatcgtcgtcttcacttttagctgttgctgtatttttaggtcgtaaacttgtagctaccgtcaaagaaaatagaagagatgagtaaaatatctcattagttaaagccacagctgtgtaatcaaatgtcaaaatacaaaaatgcaatcatttgtatacaagtttgttcctggctaccaactaaaatggcacaaggcataaaaagcagctgatactaacgtatattttgttactatgaagtttttgtatgctaaagcctaagtacaagtgcaagagggaagaaaaaccttatgacttggacaaagtagatttttagtcgtaacgagtgagagagaaaaaagttgaacatgcattcagattgagacagttcatttagcattatcaaacattatattaattacgtagaaatctaattattaaaatagtacctgcttgttttggctgagaagtgggtacaacaggccgcttttgagctgcttgaatgcttgcaagtgctggagccggttttggttcttcaaggggttcaatatcgtcccaaccatccttgtcactttcatgctcttcactaataccattttcaatttctccccagccatcagttgatgtgggtgactcaggtagaggttgctcagccaaatccgtactggaacttacatgagcaagggcggtacttggattatctacaactacaactaatattgtcaaagaattgtgtgagatattagattttggaacaaaccatgtatttataataaacactaatatgaaggattagtaatattgtgatcatatataaatgagcattgttatttggcatctcaaggtgcccaacaccacaccgatgtggcgccctataattagttagcggtttctcatatcatttattaatttaaaatgtgtgggacccgatattgaaatacactaattacggtatgccacgttgtggtgcttggcaccttaagagcatttctctatataaatatggctataaggataaaaaaaatctacattagcatcaaaatatgtgaaaatcatttatcaagatgcatgtgcgtctgtgtgtgactgtgagccattcataagcatcccaagaagcctaaaagccaccaagatatgcacctgagcttgcattggaagttgaagaagatagaggggcgctagtgtttgcaggagcatgtgaagtttgatcagacggtttacccttgagagtcaacgaactcatagcccatctgcatggtcaataagagctccagatcattactgactccacataataagaactcaataaaacatgttcatgataaacctcttaacattttcagttcaaaaacagatatggaacatagaattaagcattccggcaaagtatacactatgagaaagtaggaaataaactaatgagggtatgtcataaaatatcaaaggcaaactattatcagttagtgaatgacagattcctccatagaaacaaagttattcacaaataaattatactatcatcagtacaaccaccaaaacatagtataagtaataatatctggatccaaaataatttcccattcaatgaatgcttcataaaagccgatagcattgaactatgaacattataaaagtataataaagtagtggcataccccaataaactagcatttcctggaattgacgagagtccaacacttgcagccccactggtatctcctgagtttatctacaaagaacgagagaaaaatcaccaaatcacacacataaaattgtgttttcatttattttcacaaaatcacctcaagatagactttagaaagcactatcatttggaataataataataatatatatatatatatatatttatctaatgagccctgtcgtttaaaacttaattatcataaataataaatgtaagaagtgagaaggaaggagttttttgagacagacagggaaagtttgtgaaaaatttaatgggccagaaaaaaatgaggaaaaacagtattcagtccaatcacatccaacagtgaaatccgttcttatattacatgcagccacataaaacagaaacatcattggaattaaaagcggcaagaatatattaacacaccttctcattgtattgtttcactatttgcataaattgatcaactgcttgaaatgcttttgatcgaacatcactgcttgaataagtagagaaaaaatacattaaaaaatatgtcataaaaacatgaattatattgaaagaagagaatgcatacaaagtaaaacacaaacatctacgcagagccttatggttgataagatggacaaaaatactgaaatgacggaattacacatcaaatgaagaatgtctgacctgtcaggatcaatagtaaggacaacaacattcgggagaatccgagttgcaacctcattgatgtcataataagaactggtagcacataacgccatgatgcctgccacagaaatatttaccaggttggaaagcataataaagtgccccaaaaagtacgctggaaacaagagtatgtaaaaacaaaagctagactaaattccacattagaacgtcatatacctgctcctctggcagggggaaatgtatcacgcaatgcacgaacagtaaatgcattaatcaaaactcttttccttgtctgcataggtaaacagcagaacatttggtaaatataatgaccaagtgacgtacggtaccaacatttagtagagaacattaagctgaagattaagaacaactaacaaaaatttcaagatttagatgtatattaacagtacaacttataatgcgcagatactaaccccatcattcaagtggcttgctatattccccagcaatatagtagtgtttgttctgattgctggctcttcatcaacctgcaagacttgcagaaattaaaaacaagataaacacaaataattatcgcgagaaatatctacaatctactgcatttatattcatataaatcttaaccatgttattgtcaaggagcatatgtctagcctaaaatggtaaaaaagtcgggagcattcactaaatgaaattgaaataagctatagatagatctattgaaatatttgtataagtcacacctgtaacttagaaagatacttcaagaatgaccctgaaatggtacgttgagagagctgcaatccaagtcagataagtaaaatacacatatatttatatatataggttcaaatgattcctacaattacagcatacatagcatacataccttgggagctagaacaagcatggatttaagtgtcaattctcggagaaaagcagaggtatcagagaacccagttgctacatgagggtaaacctagtcacaagcattgaaacgaatttaaaaaaccacattcaaaattaggattataatctttctatcattgcttcatacttgctcatcaaccacgtgtgccgataaggattctccaaattgatctatatgttgcaggagaccaactctaatagctcgatcattggaggcaaagagtttcacaattgtaggcagcacctaaaaaatccaaaaaaaaaaaccacaatttatatattaatttatttatttatttaaaaaactgtgagcatcagagcaaagacagcctccatagaaagcagaaagattgagaccttagcactgaactcttctgttgaaagccacgaacccatttttaacaatgcagtcagagcgggagcagcagctgaaccaaattcaagggcagaagctaataaaggaagcagctgtaggaaccagtggaagtgatatgagcaacataactagaaaagtatgttttgtccaaaaataaaatgacaactccaagatccacacctttttaagaacaattggtcgaggaagctgctctgccaaatttggaagcttgcggaagaatgtatctttctcaacgctatctttcaaatttaagatttccatgaaatgtatggtatccaccaatttattttggaaatattctgtaaatcaaactgtgatacttagtacctaaaaaatgaaacaaaagcaagaagatggaaagcaatccatgacttgagaagcactatctagccaaagaaaaagaggaataagcatatatatatatagaatactcctagctctctccttctctatgtacgtgtgaaattctaattactatcgaggactattgatgcagataacttttcagtctacaaaaccattcaaaatctcaccactgttttctaaaagctttgatgtattcagcctgcgagaaggcaaggaactcaagagtcgctgataatctggaagcagagactgtgagacaagaaaatagacatatgcaaatgaaatgaatcttccaaaaaaagtgaaagccaaagaaacataatgatattttggtaactacaataaatttaagaaatacccgtaaatgacttcacagctgtggactaaaatagtcaagatgcatgcttacaataaaataaagcatataagcaaaagataacataaaaaagtgtcccagaaaatctaaagaaaaccttaggaatggatgcagtattgcgcaattcctctgttttgctcaacttcaagccagagaagagctcatatattagacagcctatcaatgaaaacaaagaatttagatttctaacaagaggccaagaataaaagttaccggagatctaaaaaatgcacaagacacaatggaaaagctctaaaatcttgttaagatctccggataaaagcatagacggcagttgtccaacataacgcccttctgttagatataccacggaattggataataaaatgaagcagcaaaacacgtacccaaaccccaagaatcaatggcccacggtggagattttctaattgcagcccagtcagacttcgacaactccactggtttgtattgtgatccaataagccaagcatattgctggatgcaagtaacaatttgtgagaaataaactcatttatcatttccaaaactttcttcttctcaagagaattttgacaaaaacgaactcagaaccaagaaaaacaacagccagtaccagtcacaacatactaagagatgtgtgtgcggtagaaaatagacaaaagcaactggataatcaaataatatgaatcttattttaccagcattgatccaccagaagcttcagtgttattatcaatctcagacagaacatcaaaagcatgtagcttccagtctaaagttggtgtaacaacaacactagctaagcaaacattagcatgaacctgtaatagaaaaagttagttcagcagtataaaggaaaaaaaacaagtgcatatagagagtgttatatgaagaaggttttcaagacacatgcactcgtacaaacaaaagctatgtcaacagcataagcaggaaaaaaacaacttacaagtttgcaatcattatttaagaagctcacagctttagctatctggtgtagtccccatgcaaaatactcatccctggcaaccaggtcaaattaaaaatgtaccacagaaataaccaacaataaaactagcagatatatcaaaagttttctgcaaattttttgtgtacaaaaaagggatgctatagcctgttaatcatagaacctgaacctgtaattatcacttcatccatccacaaaaagaaatatggaaaaagaaaatacatctaccatataagacagggaaaaaaaatattgtttatgtttatatacctctgtgtgccttctaaacccagttccttgatcttctctgatagaggcataacaggctctgtgacaatgtagatggtaacctttgtggtggagccatcaaaagtttcagtctcagtactgtgaagaaacgataatatatttggatgcctgacctgaaaaaaatatcaaaaataaaaatttagctggtaagtgttggcaaattttcattttcatgtgatttctacattctgtgaaacgaaaaacgaagatcgaatgcatgaagaaattgagcatacatattcaaactatagttctctaggaaatacatgaatcttgaagctcaaagacaggaactctcagcaataatcaggtaatctctaattaaataaaaaataattaatattgtgagttctaaaaactgttcattattggtattccagaattttgaaaagattcttctttaacaa

SEQ ID NO: 15726 - DNA, 2376 bp, Cannabis sativa
agagagagagagagagtgtgtggtgtgaatagtcttctactattcactgatgttggatcgagtgtagtctttctggtgtagtggttactctcgaatccttcttttgctactttgtgtgtgtttgtgtttgacttcttctcgtgtgcgtgtgtgtctgtcttttgagtgttgtgaagtggttcacttcctttgtcgtgtgtgtgttattgattgggttttggttggtaggttggccttaagttatttattccttttgtctcttactgtcggcggttatggagattgtcaaagttgctggtgcccctcttaaaggcaaatgtgtctcttgtgcggaagcttccatctcattatccccgagtgcttcgtcgatggaaaaactcacttctctgtgtttgcttggtaaggtggtggcgcctatggtggtgaatgctggtgacattgctgagactgtgacaaaaaaatggctaaaaaaggtctcagtgtcttctctacctgatacggagccaaagtgcaaccggttcaagctcggttttgagagtgcagaggatagggagtgggctttggataacagcccctggtcgtttaaaggttatacctttgtactacgagcttgggcccctgatattcatggttcggttaccattgataatatgcggctgtgggtgcaggttcacaacctgcctcatgagtatttttcaatagcaaatggtaccctgttaggaaatatgattgggaaggttgttagagtggagttggatgaggagaaacctatgagttggaagctgttcataagggtgcagattgacataaacattggaaagcctctatgttcaggttgtttttttgacttagcctctggggttaaacgttggatccaattcaaatatgaaaagataggcattttttgttacttttgtggaagtgtcggtcaccaacgtaaagggtgctctctatcttctccggtcacggtggcaaatctagatggaaccccgtttcctatgtatgggccgtggatgtcaacgacttcactatatcgtgacgtcttttctggtgcgacttcgaagccgctggtgggttcttcgactggaaggccgtctgggaagctccagcttggtgggccgattgccgtagctgatgtggacggcggtgtggttaggtcgtcgtcaactgtggcgcgcggctcgaagcgtacgaaggctgttgtttctcgggccatgcatgagaaagatcatggaaggcaaaaggtgtggatgcccaagaaagtgccaggcgagggtgcaagaaggtttgctgttaatggtaatgaggttgaaggaaatttgaataattgggaaaagatctctgatttaattcctaaagtggggagtgtgcagctggagagagagaaggaaaaccaggtggttttgttgggtttgggaagtgggaacttagaagtgggtgttgggccgaatttgggcttgggcttggtctcctctggtgggcctgggggtttggtgggttctgttggtggggctgggacgaaggagtgggaaggaaatggtggagatgtgggatttgtgggtagtgggccgggtttggttatgggtttttcaaataataataatttaaaagggggtgggccgaatggtgttaaggctaggctagaaaatttggtggggccgggttgtgtaaactctttgtgtaatgagcctgatgggttaaaaggtgggatgtttgggagtggtgggcctggttgtgatgatttaatagataaaagttgggctattgggcccaaatctttagagaggccgaaagtggttgttgatctaaagggcaaagagaagggggaggcttttggtgggccgtgtggaattgattgtgatatggtggggaagaatacggtccacgtgaatgttgctagtggggtcgagcttcaaggtgaagaggaaagggctttatctcatttttttagagcccaagaagagctactctatgaccttaagcactttggtaatttggacttgtatgaaattaaaaaaataggtggtgacattggagtgaagcctacgtcggaaactaatgaacgtaccaccccgttcaagaagaggaaatttgaaggctccgcttctctctgcacccgccctaacaaaattgttagacgtcatccggatgttgttagggactttccttgggacccaaaggaaaaggactgcgagtctaaggtggattttgatgaccgttctgaagaaccttctgaggggtcgagctcttcgagctgtaacaatggtgttaaaaggagtcatctgattggctcgtttgtaattgaagaatctggatccagtctttctgtgcactcgatcaaccctgtggaggagaacgtcatatctcctccacagg

SEQ ID NO: 15727 - DNA, 6266 bp, Cannabis sativa
gtatttacaggtctctgagaccacctctacacctccccaacaacaacaatctctcaatggtttcattccttttcagaaactcatcttcatacccacaaaagccagctctcattgattccgaaaccaaccaaatactctccttttcccacttcaaatctacggttatcaaggtctcccatggctttctcaatctgggtatcaagaaaaacgacgtcgttctcatctacgcccctaattctatccacttccctgtttgtttcctgggaattatagcctctggagccattgccactacctcaaatcctctctacacagtttccgagctttccaaacaggtcaaggattccaatcccaaactcattatcaccgttcctcaactcttggaaaaagtaaagggtttcaatctccccacgattctaattggtcctgattctgaacaagaatcttctagtgataaagtaatgacctttaacgatttggtcaacttaggtgggtcgtctggctcagaatttccaattgttgatgattttaagcagagtgacactgctgcgctattgtactcatctggcacaacgggaatgagtaaaggtgtggttttgactcacaaaaacttcattgcctcttctttaatggtgacaatggagcaagacctagttggagagatggataatgtgtttctatgctttttgccaatgtttcatgtatttggtttggctatcatcacctatgctcagttgcagagaggaaacactgttatttcaatggcgagatttgaccttgagaagatgttaaaagatgtggaaaagtataaagttacccatttgtgggttgtgcctcctgtgatactggctctgagtaagaacagtatggtgaagaagtttaatctttcttctataaagtatattggctctggtgcagctcctttgggcaaagatttaatggaggagtgctctaaggttgttccttatggtattgttgctcaggtacatatacacatatacattacatacatataatcaactcctctagtcctcttggctatcaggtctttaacattactagtcaaaacttgtttggtatcttattggctatgttggttagtacttgctaattgagaatgaaatgtgtgaataattgttcaagtgtgtccatgtgtataattgtttttcatcgttatagttacaacatcattgaaatttcgaatagtttacagtgttcgaaaaataagtttgatattgtaactacagcgaatactattatgaaaaaaaaaattccgacatgattgtaataggaggctccaattagcacttctctcgatgtgtgaatatttgttcaagtgtgtctatgtatgtaattgttttttctttggttgttttagggatatggtatgacagaaacttgtgggattgtatccatggaggatataagaggaggtaaacgaaatagtggttcagctggaatgctggcatctggagtagaagcccagatagttagtgtagatacactgaagcccttacctcctaatcaattgggggagatatgggtgaaggggcctaatatgatgcaaggtatgaaactatgaatttggttcttcctgttggattatcacactttttttcattaaactatatctggttcttgagttatttttcactcatgttttatgtgagtttgtaactctgacatattttaaaaactacattttttttaggttacttcaataacccacaggcaaccaagttgactatagataagaaaggttgggtacatactggtgatcttggatattttgatgaagatggacatctttatgttgttgaccgtataaaagagctcatcaaatataaaggatttcaggtaaaaattcaccttttcttttttcaacactacaagccatctttagtctatagcatcctttcaactatacggattagtttctagagtgcttgttcctccattaagtgattcgtcgaaaagactaccaacattttcctcgaacacaatagaacaaatctttcactctacctcttattaacaccatggaatattactacgaattataatctttgctcaaaattgagcaaatatatcatgtcgattgcttaactatactttgcactagaggatttttcggtgtttttgttgatatcgtactgttattagtgtaattaagtattttaatttaatatttattatgaaaaattactagtcattcgtaaaatgctaccttatggcagtgttaggcaccactgagcataataacaatgctctttttaggtatgagcaatcctattaggcacttgcagccatacctaacactattacgagatgtagcacattgtgaatggtcattaatattttataataattattaaattaaaatatgtaagattggatacctaattacactaatagaggttttagacccttttagcatttctcatttaggtacatgtacacagagataagacaaagttatcctattcaaatgagtagactttaactgttgatttattattttaaacctcttgacattttcaaaattgcaccttgactaaatcttttgtgtcatatcatattatttaataaaaagcttatacattcacaactgtaacttgactaaggttgctcctgctgagcttgaaggattgcttgtttctcaccctgaaatactcgatgctgttgtgatcccgtaagccttgtaaactcgaaacagctttgttaccatcttatctcgactttctgaatttatgtcattcttaaccgatttctcgattctaaacagatttcctgatgctgaagcgggtgaagtcccagttgcttatgttgtgcgctctcccaacagttcattaaccgaaaatgatgtgaagaaatttatcgcgggccaggtaacaagaatgaagtaatttgtgaaaacttcaaagttcttgatagtttcttttccagtagttttatgctcttactcaatgccttcattgttttgtttctgtcataggttgcatctttcaaaagattgagaaaagtaacatttataaacagtgtcccgaaatctgcttcggggaaaatcctcagaagagaactcattcagaaagtacgctccaacatgtgatagatactatcattgatataagaaactatctctaaagagatccaactgttaaaaaataaagttagtttagaattttatggtatatttttcattacgaagtatctcagagacgcatactagtttcctagttatatagaagaaagtagcaaacaaagacatggttttagaatttttttttttaaaaaaaatttagtgatttgattccttactacaaaaaaaatcccaaatgttttagaaactattgttgatattgtattataaactatatatgaatggttcctaaataaaaactatatgtgaaaaaatcttgtattatatgtgacattctctcatattctatttaattagtcttctccacctaatttaatcattacttaggatttgcaatactcaaacatacagacatattatataaaaaagtcacgatgttccaaaagaacactagacaataaaatattatgatacacaaaattatctgaaaaaactaaaatagaagacaaagaaactttgactagaagtccaatattatgagtccatcttaatcctatcaataatgaaaaattccagttggtatagacaaaaactcatatatgatcatcttccatctaatgttttgtctcaacatatattttaatgaaaaaataaattacacttttttttttcttttgcatactcttggaattatctcatactagttttctatttactcaacaaaaaagaaccttagaattattattatttagaataaacttggaaattatttttgaagtcatgcaagaaatttgttccatttgatttttacttaaatagattaaaagatatcttctcaaaaaaaaattatgtttgacattaaaagaccactatcatgcttcggggtggccagagttggtaggaaagtgtaatccaagttgcaactcatacgactttgattggtaagtacagtctagggcggcaaaatagatcagacataataacacgactcgatattcgtataaaataaatgaattggactgtttgagtttcccttaaaggaatttgaattattttcaggctaacacgactaatccgtttgagtttcccttaaaggaatttgaatcattttcaggctgacacgactaacccttagtcatttggggttgacatgacacgaacatgaacacaacccataagcacgaattgccccctcatcaaaaatattttggggatgaactagatgtcatctccacttccaacaaaatttagattctggtattgtaaataaaaacttacattattacattaaaaaacattataaggaaaaaaaaaaaaaaaaaaagctcaactgagaaggagagaacttgcaaggtcttcaaaaagaaagaggtagaaaaataaaattatgaggcatataacataacataactaagattgactaatttaatatatcatagccaacaaaaaacaattcacaatcaccattccaatttcatgttcaacatctttagcatatgtacacctaaaaagatacagtactataatcttattatctattctgttttgagttttcatactatttcacaagctttctgacttatcaccaaccgtatcgccatttgtaatagagcttaaggacgtttcagactcatcaccaaccatatagcgattcgtagtagaacttaagcctgataagtgaagctgttttcgcctttttacaaggtttgatgcggtacgcatgtcctcttgaacctcctcgcaatcaggctgcagcataaggaactttcgagttaaagctcagaaccttttcaaattggaagatgcatctcttgtgatgaactctatacatttaaaagatataaaagtgaactttgagaatgaatgaaatactaaaagcagtaccttgattgctaatgctttatcaaagctttgcatagccccatcaggttctccaaagttcaaatgcgctctgccaagggttatccatgcctgaaatatcaaatttcggatgtaaacaatgaatatcattgagatatgtctataacaggaatagttcagcacctgaacaagagaaggcatcgaaattgcatatagttacaaatatgcagtcatcttggatatcctattcgaaagactatctataatggataacaggctgaatcattgacctctattctcaataacaaacgaacaatactaaggtaaagccctggccaatgaagctctcccagagcaattaacatcgacacatttgatttgttatgctctgataataaatttacaggatgaaatgaagagtttccctgaaaagctactcaatcttactgactgaactatgctctaaatggttctttcgatagcgttgcttaggcgataatccttatagattcaatgagcacaacttcactagcgagataactaaatttgtaatttaaaggtgtaatgtacctcagcccatgaaggctccaattcagttgctcctgccaatttgcaacacacgtcttattaccataactttacagttgaagcacataagaaatatgtaacagaaaaactgcttttgaaatcgaaactaaacctccaccccggaaaagaaaaagtaagcttgaaagaatatcaaaaagattaactcagaagtatctgttcaatgatgcccaatagagaattataatggtactaaaaaatcatcacatcattaccaagcacaacaaatgaaatgttactaaaaaaaacaacataagatatgaaatgagctaggcaatatcacacacgagaagctgctttgagagcactccatgcatctcccaattcaagtaaaatttgagctttctgttcatgtaaaactgcattttgaggattcaacagaagagctgtctcccatttccccaatgcttcacggtactctccatcctttaaaaccataattgcattgttattattatgcagaaacaataaaaaataagcacatttcaacttcattttcatcaaacgattttgcttaggttttccagaaaatgttctttttttctttgagttcataaaaatccaatctttatctttcaaaataataaaatcaatcaatttaggagcatttcacaaaaacccatcacggaattcgctacatacgatgatttttcaacacaaaactgaatcttttctaagaaaaaagaattgggttacctcg

SEQ ID NO: 15728 - DNA, 6504 bp, Cannabis sativa
aaaaatacccctacaataaaagcaaaactgatactcaaatcaaaccaaagaattctccaattatataaaaatatatatatatataaatacttgaaagatgaaatgaagtaataactagtaaataaaagcaccaagtcaagaaccaacccgaatattttccttgacagcttcgttatttggatccaattgcaaggctgaaacaaaaaaaatgtcactattagggacaaagttgtgcagtacatttccctacaagtctgttgtccttttattcttttcttttgggttaagtttaaatgattttgcctttttaaatattttatttaaggagcataggtaaaaattataaccaaaagaagcataaaatatggtcatcagactttgtaagaacaaaatagaggcaaaacaatggggaccaaaatatgtacgagacaaaaagaagagggctaacagtttggaatattaccaaaaacaaggcactaagttacgatgttcctaaagttaaaaaatgtcacttactataatggcgagtcccttagtattcctactacacatgagattaagccctttagcataactacgccaacgtgtaagcactgtcaaaggttttatgccagctactatagcatattgtaacaaaactaggtgcttaggcctttgacaatagcctgctaaccaccaatattttgatattttcccagagaaatgtgtacaataatgataaaaataaataagtaaactaagaatcatcaattaaactagaaaaaaaatgtatatcttggggtatcagctattccataggtaattatgaaatgatcctataccaacctctcttaaatcctttatcgatagcatcactataatttccttgtgcaaaataagctaaccccagacgactgtatgccttgctataatttgggtcgatatcaatagatttaaggcaatcgctgactgcctcagtatatttgtggatttgagtgtaagcggctgccctgatacaggtaaatcatactaatcaatttcaagaacgataaatgtgaaagatataaaattgctaaaagatataagttttattatatttgactacagatgtttgtcatcatctgagtataacacaactattttaactttaccattagttttccttaattgaaagcattcaaatatgcaacatgtggaactctctcttcccccccaacccttctctcctctaacaattattttagaagaaaaccacctttttatatacagactgaccttttcagtttcatctttaagcatcgttatgacatgcagattaaagtttcaagagagctatgaaaccagagcaagtacatctattcaaaaaatagttagttgcccacctattacagtagtaaatagcactgtcttcacagagtgcaatggcacaattatagagctgaattgcatcagagtaaagttttgactgcattgccctgttacctaaccagagagcaaaaaatgacaatagaaatagcttaaaatatatcttttaaaaaatttaatgataagaaagacaaaattagcttacaattgattaatcagtaaactgtatcccagtaagcaagcacattaaaagatacaatacacaattggatgaaataagatgcaaagccagcattgatgtacaaagtctccacagacagtacaaggataagttaacgatgtctccacaagttcccaataatttccccctatttgacaagtattatatataagataattacttggtcttcctttagttcgacgggagggagaaaaaacccagttgatatttcttataaattcactaagatataatataaggatgaacaatgcgtcaaaagtcaaagaatgaaaaccagggtaaggccatcaagttgcctaccttgtgatttcaatgtctcagctaggttctttgtattatattcctggcacccagccctttccatctcctgaaataacacatgaattctctttaagttatcatatttacttaagaatctttaaaaacctacaaaatgtagataccaataaaaatggtgaccttaacactgattaatatccagcaacaaagcaatgtgagttctcaaaaaaattaaatagtgttttcatttcattgactaaagcaactaaatatatgaagctaggtgatatgaatagcaacaaaaacaggtttgaaaaagacaatcctacatttgtttccttaactaacgtacttttttcatttgttgaatgcttaacaaagctacataacatacactatagactcaactgattgagatggaactcaattgtcttccattaacccaacttgctgaaagatgcagccatttttattcatggttcatacaatgagggggagtatcaaggagaagaagaaagactttgtagaacatagctatctttgctatcctttgggacatatggttaaagagacattttagaattttcaagatctgacagagggtgaaagagctatccagtgaagtatggatggctatttgaattttcaataccaaggactttaaacttctttattcctacttagctattattttatgtattcgattatgaattggcttcctaggttgtaatttggatgagataccttaccatccttttattaatatactacctgtgttccttataaaaaaactacccgaggtactaaaagtgaaagggtgataacaataagtttatacaatcatgagatgcgacatatgaattatttatggtaaaacatataacaatgagagagagagagagagagacaattagagcattgtggaataaccgagttgctttctctactccaactgagtcatcagttccatcgggaatggtcctaaaaaaatgaatcttctcaagtgcggcaaagaattgtccaaaaagttcatctttgaatgcccctgccagtagtgagataacaaaaagcacactaatgtcaaaagacatagcacaacctttgaaatacaataacagtacccatatctctcctattttaactagaaacactggaaattaacaaagagatcggcattcctatacaactaacgaatctctcagatccttcagtactattaaaatataatttccattgacaggagaaccataacagtcacatttttttaatacgatatgaaacaatttgcaaaacacaaagtatttagattatcctaatgatagcacaattgtagctcaaatctaaggattactgtgacaccaaaagcacaaacaaatgcaatatacaatttactacccataaagggttttgaatctgatctactttcatgctatagtaatgatcagatgaacatgtgatttaaaagaaaaaaagaaagaagaacaggtggtaatgaccaacaaggaatgcaaacaaaaaaagaagaaggtaaataaacaacctacctgatgtatgggcttcacttcttgcatctccagcctgatggaaaccatgaaaagttgaaaaaccgagattcaataatcagggaaccatagtataatacttaaggagctcgacacaaaatcatgcatctccaaatcattcaagaaacgataagggaatgaatagaattaaagaatgtatagttgccatagtttgtaaagcctattacaccaaccattagtagggaaattttatcaaagaaaagtgaagaaatactatataataaggggagacaataagtgattaagaaagaattattgaggttgacataagcatttacgaactatctatatgaaacaaatgattagttcctttccatgaatagagttgactcgtggaaaccaggactctttaaaggtttaaaatttagtttatttccttcctaagagattttatgatttctaaatatggtaaggttttggtacattttcttcacagcaactatataataaatatgcaagggcgcctttaaatgtttaacatgagataaatggtaagattttccatttgtaatcattattttttatgatttgtaaattagttgtgtcgtgtgagcatgctatattgtcagtaaattcttcacctcccctttgtttggtgaagcagaattgaattgatttacaaactagatgtaacaaagaaatgctataaatcaaaggttcatctttgagcaatggggctttctagtgtctgatgcccaatcaagtacaaaccagcattttaagcctacagcacttatcttatgtttgttttgacagctagaatctgattatcaacttgtttctgatttgattagcaacgggtgtatttagctgcaatcttttgtaaattttctagtattatatcattaatatcaaccaggagtcaaggacaaacatttgacctccagctacaattaaaaatgtacaaatttggttaataagctagtcatctaagaggttcttgactctgcaatacggccacaatctcaattattagccatacccccaagaatttgtgatctaaataaaagagcatacatcaaaaacatcattaacataaaatatttatgatgttcatagacgacctaaagtcatgcccattcctttccctagtttcaatataataccataatttaaattctaaaataggatacaggctcctcatttttatgctttcaagtttctacaatacaatgctctaacagttatttgctttgtgaaattcagtataataaaaaactgcagctgttgttaattatcaactgaaatgccacaaccaagaaactattgccaaccatctggtgtaagcattactagtcacccatccaaattcagtagttagaatactggtcaatttaatgaattgttcgcaagaccagaagtcatttttaaaaaattggattaaatggatggacccaaggaaatttgagaaacaatcacatgaaaagttagcaaataacaatgagaaaaatattgatgccgagatattaccgaagattttgaggtctttgaaagattgtccttgacacagttctgagtgagggatgaatttggatcatctactcttgagattgatccatggccaagatctgcattattattttgaagtgtgtttgttccaaatgaactgaaaatgtcaaccaacaaatccggttttgtttgatcatcaccagggaaggaatcaagcttaaaagcctcttgcaaacattctctggcaacctcaagtccttcgagatcaacaccaggagcaggttcaactgttaaatgggcaacacgtgctcttaaaaacagaataaaaaaagacaggaacaagttcaatctgcagaaattgttgagaacaaagattatctcaaggtgcagccaaccataatgaagtaaagcaaattctctttaaaaaacggaaaacttgtttcaagacacataatttgtttcaagaagtaaagtaaatgctctagaaaaactactgacaattaggataatttaatttgtgtgagcataagtatcggactaaaacatcacttgcatttgtttcatgaaaattgccgattaagagatgtgcattttcattccaggacacttgtaacataaaagaaaatgttttccacataatcatatttgccaacaagaaatttgttttcaaaaaaatgaaaaactacgacacaaaaattctggaaaatagaatggatcatttacctaacaaaaattaaataaatatcatctttatgtcatgtatttcctatgtatttccttctattgtcgctgcaaggggacacaaagctacaattgtagcttcaagagggcacaaagctatagagagcaaccaggaattccctaccttctcgttacaattcttaatttacagactgaagctccaaactgataatttaatcatgaaattttgtaataacaataatcaacaataacatgtcaataataacacccccaatttcaaaaatttctattggcaatttggctttcatgtttagagcctccgaaggaaaaagaaagagagcgcttataaacattacgtaaccaaaatttagagcctttcacctctggttacggatattcagcattttagggtttctgaattcgaaaacttcaatcataatttgcatacaatgataattaaaccaactgtaaacctctgaacactcctaaaagcaactaatgaactacgccatgtcgctttcaaagccccaaatctatttcataaccataactacaaaacagtaactaataaaaccagagtaattaaaaccctgaaaatgccattgctgcaataattctcatccatgatcagtagttaatcatcaatcagtcttgtaacaagccacgtcaatataatttgaattaaagagacagaaaggaatatagaagtcaccagagctgagaaaatccaagaaagctcgaacaatgcgacgagaggtgggagaatcggatttcaggttagccatggaggaagaggaagaggaagacgatcaagtgcgcatgataagagggtgtaccaccgcggcgtaacgtagatttagtatttagatatgaactgtgactaaacataaaaaggagacagactat

SEQ ID NO: 15729 - DNA, 5983 bp, Cannabis sativa
ttgaagctagaaccttcacatcgtcgcaggagttgcaggatatacttttaagttttgacaataagttggataggttgaccactctctctggtgcaatgaaaaacacaagcctcactaatccctctgcaaatgttgctacaactaggccaccacattttctaaggaatagaggtgctcatataggacagtatgggcctagaaatcatggaaacattgttcaacagagaggaggtagagtccctggtcgattcagaggtagaagaggtggtaagaaccagaacaactccaaacctgcgtgtcaggtgtgcgagagatatggtcacagtgttgcatactgctacaacaggtatgacgagtcatacatgggttcggacccatttggatccaactctaccaataagggccctcaatttggtaacaataatggtggaagagcctcaacctttgttgccactcctaaaatggtagaagatactgcttggtatgtggacttgggtgctagcaaccatatcacaaccgatgcaaataacatgacccagaaagctgattatagtggtgaggaaaccttaactgttggtaatggtaataagcttgaaattactcatgttggtactagctggttaaatcgtacaaataaacactctctgggtcttcataatgtcctacatattcctagaatcactaagaatttattgagcatttcaaagttgacaactaataataatgtttttgtagaatttttttctcaatcttgttttgtgaaggatgtggacacaaagaaggttcttctccaagggaaacttagagatagattataacaactttcagatcaaccaagtctttccacctgttcaagttcaatctttaattcagtcggtcccagttttcaccattttactggtgttgtgtcaaaatcaaaggataagcatgttgctatattcaagtctgttttcctaagagatagatggcataactgtttaggtcatccatccaatcgtgtgttgagtcttgtcttgagtcatgttaatgtaaaatctactatgaatggaaaagaaactttttgtaaagcatgccaacatggaaagtctcatgccttgccttttactataaattctactaatcatgctaaaaatcctttagacttaatccatactgatgtttggggaccagctcccattacatcaaacttgaactacaagttctacatccattttgtggatgatcacaatagacacacttagatttacccactcagaaccaagaataaagctctgtcggattttctgcaattcaaaactttagttgagaaccaatttgatagaaagatcaaggctattaaaatcgattggggtggggagttccaatcctttgctatgtgtatcatagaaaatggagtagaatttgcatacccttgtcctcacacatctgcccaaaatggaagagccgagagaaaatataggcatattgtcaagatgggcttgaccctctttgctcaagctcatatgcctctcaaatatttgtgagagtctttccaaatagttgtttagcttattaacagactcccaacgcctattttgaaagacaaatcaccttatgaaatcatctatggtaagaaacctgattataagtttcttaaaacttttagagtaacatgctttcctttccttagaccctatcaaacacataaattccaatttcattctaccaagtgtgttactttaggatatagtgatgcacataaatgatataggtatctcagctctatagggaggttatacatctctcgaaatgtcatcttcaatgaagatgattttcctttcctaactggttttttgaacacttattagcctgtgcaatctgtaaatgtgcaggttccttcttggtctaccttgtttcaatctatcaggtctcatacacaaaatcaacacaatccatctactcaagttcttggagaagacaccccaaaacattccttcatgcaagttctgaaccaggaaactaaaaacatggttgttgaaaacaaccctccatcttgttctcatcagtcaaatatggttgatgatcctagtctggaacaaagtcctagtcccctaagtaatgtaggttctaaaatctcttctcatagaaatctcaatgaatcccctcaaccagcagcacccttagcaccatctcatcctatggtgataaaaaccaagacaagaattttttaaccaaaagtttatttgggggaatctcaatggcattgggacaatgaagagcctagttcagttgaagaagctatctgtcacaaaggttggaatgctgctatgggagaggagatgatagctttgaagaaaaatagaacatggattctggttcccaaaactgctggcatgaacgttattggcaacaaatggattttcaagaagaaatagaatgctgacagcacatttcaaagatacaaaactcgtctagttgctaaaggcttcaatcaaagaactggtattgattttggggacacctatagccttattttaaaggcttccacagttcgaattatcctcacaattgttgtagctaagtcatgggagatttgacaactcgacatcaacaatgctttccttaatgggaacttagaagaggatgtttatatgtataaaccttaaggctttgaagatccaaatcaaccagatgttgtatgcaagttaaccaagtcattatatggcttaaaacaagcacctcgtgcctgctttgatagacttaaagcaactttgatcagctagaattttgtgaactcaaaggcatactcttctctcttcttctataaaatagttggttcaattattctagagttgatatatgtggatgatataataattacaggaaaccacattggcaaactgaatgaattcatccacaaactcaacaccatgtttgctctaaaagacttgggacctctacagtttttcttaggaattgaagtccattgtgttaaaacagggttcttcctaaattagggaaaatatgtcaaagaattacttactagaagtggtatgatgcatctaaaaccatgctctaatcctatggcaactgggaaaaatatgtccaaaacagattgtgaatttcttgcaaatctcacagattacaggagcatcatagggggggttacaatacctcactcacacaaggccagacttgtctttttctatcaataaactgagccagtttctataggctcctacaacggcacattggagcacaacaaaaagagtattaaggtatctaaagggtactgcttaccatggtcttcatattaagcattcgaatagactagacatcataggtttttagacgcagactaggcttgttgccctgatgatagaagaagtgttgctggttattgtgtttactttggagatactttagtatcttggtctttcaagaaacaaactgtggtgccaagatccagtacgaaatctgagtatcgtgctcttgcacaagttgttgctaaaatctcttggattaaaagtctcttaaaggaattcaattttcctctcgaacacactctggtcacttagtgtgataatatgggggctagtgcacttgccatgaatcctgtctatcatcctcgcacaaagcatattgaactgaatgttcattttgtgagggataaggtcatcaacaaaacacttaaaatcatatatgttcctttaagtgatcaaattgatgattgtctaaccaaaagtttaactaatcatagatttcattggtggacaaacttggtgtagttgagacaccaccaagtttgagaggggttgtgaagaaatgattttctctctgcatttggttagatataatgaggtggcataccaacctttggtggtccccaaattgtttaacaaactttgtccttttttgtaccgttaggatattctttttgctatgtaaaagatttgattaatttataatgattgtacattgtattctgttgtaatcattggtctataaatacaattggctagcctcatgttcaaatgagttgagctttttattttttctatttgttatttttctaagtgcacatcacaccaataaactagctcagattggttgaacggatggtagcggcgtgtgtgtgcggtgttcaggtgagcatttatgtgactcttccctcttttacaaaagtgcataccctttgtagcccaacccaattgaccacgtctatcatttctatacacttgcaaacatgtgtcccaaagtaatgtgggactaatcttctaaggacctcaaattgtatattttctttttgttttttaacaattcacacaaaatgttccaagagattgtgcccctatttatatattgcttgtaattaataccttataacatttatagtacttatgtcttgcatagaagagataaggggaggtgagcaacctgacaaagctacaaggtacagacaaagttctggccaattgtacccaagggtacttgccagataaattacattgtacaaggctaggaatcagcaaagtaccgtctcaagtatatctaattagacaaatggtgagtcctaagatgtgtatatatggactcactaccaagtcttatacagagtttccaagggaaccacatatgagattacaattgtagtacaaggtcgtcaggaaccccttcatgaggtcaaaagaggataagaacttggctacctacttgaaaccttggccttggccggccaaggttctcaagctaagagagggtcggccaggtctcatgacctaaccaagggccagcaaggttttctatgcccaagcatgggcgagccagcttttggggtaccccctatggctggccagctcccatgagaaagaccctaggttggccaggtcttgaacaagacccctatggccgaccatggtgcatatcggatctaagtgtgtgttttttcaagaactcaaacaagttcttcatgttctttgtgactcaaagagtcaagaatcacaacgaagatcaaaatctaatcttttttgtcaagaaatcaaacattatatatccaaggactatccttcaaatcaaaataccaaaaagattacaatctttcgtgggaataaaaaaaaatattcaaagtgaataaaagcttcatgctaccatggaataatgaactaaaataagtgaatagcaggattagaaagcttacccactacaagaaacctttggcgaagaggatgggaagcttggatcgttaaaatggcgcaaaaatcccaggagttgaagcaatgtgggtatcgacctctagagagaaggaggagctttccaaagttgctttcctagagagagaatgaaaagtgactagtgaagagtagtttccctcccataagcttatatagcttctgtgggacttcttctttacttaccatgcagtacacaactaaaaagcatgcagagagcaatacagtcaacttactgcacaaagtgtgattagacagtcaagagcaaacatttcaaaggctaaatacgctggaagatttactcagctaacgctacaccagtcccaactaagctggaaagtccctatttgcacagacatcagcatagggactttgggggaaattatcatcccaatttttgcccacttgacgtggcatgtctacgtggccaacattagtatcgtgtggcaatacaattcaccaacaagaaggccaagccatctactgagcacttgaaccaacaagaagtccaaatactcaagcgggacggtgaaatgacaaccaaccacctcaagggggttggttagccacccctagccagccctatggcctgcataggccagccaggttttggatatcccatggccagctagcatgcatcctgcaggtgcatggctgatcagcttttggcctggcaggattttggtgcgcacctttcatacgtcgacaacaagctagatcacaaattgggccttaacaacccatgagtatagagggaaaatatctatttttgaggg

SEQ ID NO: 15730 - DNA, 8236 bp, Cannabis sativa
tatttgtgaataattttgttagtatagtatatacattttttaataatattattttgtttttaattgttgtaaatatatattttttgttgtatatattatatatataatttacttatgatatttagtttttattttctcatgtttaatgactataaatttttgatatagtatacatattttaatggtggtacacataattttgttagcattgtatatactttttaagtattaatatactaattttattttagttttttttataagtactaattttattttaattataaattttttgtggtatgtaattttattactataatatattaattttatatactacgatatatcaaatattatgatatacacaatatatatatttaacgatataaaatatttatacgttataattataataaattaatatgaaatgctaataagttcatataatataattttagaaaatttcattatccatctatttgtgccattttccacgccctttttaaattgatttccatttatttaagatccaacacaacattgttttgaatattttgccaaattcaaaccatacacatcaaaacacgaagagaaaaatctaaagtatatgttgatctcaattatacttcttacatgtttattgatctataaattggttgttatctcattctgtgggatgattgtttgtatgcatattaccaaattgcatagaaacaacatgatgagatataacttgggaaaacatacgagaacagaacaagatcttaatttttgtatgtttaaaacagtatagtttgagttgccaaatggttgttcttacgtagttttatcttgtaggcactgaaacgacactttaaataattttgattctggaatcatcagcccataaatctagactaatagaccgataaggatttcacacatgtaaaaaagcatgcttcattgaaaggtcaatgtgcaaatgttaataagtacaagatatggttgtagtagaaccactttagtaatagactaatgcccatatggttcacaattcacatacatcagaataactcctttattacatagacgtataatttgtcaattcaataatgccagacccttgcttgacttgcattagactaactatagagaactcttttgaaatttatgctcaacatgattttacacaacatagtttgaaagtataggttttcttcaagcatctcagaaatcagtgacagaatcagcatacctttgtgtgaagaatcctagtgctcttctaatcacgttttaatctccttggacatcagctcagcagcaaatttctggatcttgtagatgtttttaggtattaaggaatattcaaatatatatttataagtaaaaatagaagtcattatcaacattagaactgaagtaaagtgaggctgaaggatatcttctcttcatagagaggatggttcagcatgagtaaattattgttgtttacaactgctcccactagtatttctttggcttcatcgtgtttctttttcagcatattgcaaatctgtagaggattggggttataaaagggacagttgactaggtgcaagaaaagctacaaatattagtgataatatttgtaatacaagcagtaatgctcggcaggactgataatactgaagctcacatttctggctgaacttactaacatttttaccaataccataaatctgagatctgactctcaagattattagacttttatattacaaacagttaaacctaaagaaaaaagatcattaatagcaagagcgaagacaaatattataacagagagagagtcatccacaatgtcttataagttgaataatgaaagcaaagcaactttcattcaaaaatcaaaaccatttatagcttgtaggaaaaagaacctaacatgttgtgaacttgtaatgtccatttatttttcaacagccagagtgtttatttgattccatcacaggcatacaatttcaagtattaatttagttatagttttagcagtatgtcatggtatgatatctaataaaggtcaaaaaccacattttcatgaaaaattgactgggtaatttactcacttcttcaagctcctttgacaatgcttctgccttttcaacagttccatcaatttcagtaacagatgaaatttcaagttccatcacgttaacctttggagaactttcatacgcaggggctggactattgtagggactgcccctaggcttactctttacctggttctcatgaaagttagcctagaaaagttgcaaaagacacttgtcaatagttttggtttatcatggatcaggcttcatagttcaaactcttttctgcatccaatattgtagcatgctaactagtgcataatctcattaagtttgttgagttgataccttctcttcatcaactcttcttacagattctttgacatcaattcttttcaaaggttctttcaaatttctgcacatgtttaagcataaaagcatttgttatctcaatggccaacatacttacaaaaattgtattgtcagcagttaaacaaaaaaaacctgcttccaccaaatgagtcagaaggaaatttcagaggctttaggatcttccctgaatcagatattgaattcttttctgcaggagaaaactgtaatagtatgctacgtcaagctttttttttttttttctgtgcatataaaataaaatcatcattactgatcaatcattccgtcaaagtttttgatacaataccttttcttcaacaactcgcttcaacggttccttaatatctctgcagaatttggccaaaatgtcttgagtgagtcatctaaagacattgcagttaataatagacatgtctcaagacaatgaaagacctgctttcaatcagtgatgtggacggtcgttttaaagccttcagagatgctaaatctgaatgtgataactgcaacatggtttccgtatataatggattaagtacattaacaataaagttttaagaaattaaatgttgccaaagctatagtacagtcataataaattttattatgtgtaaaggcttaaaaagacaaacctccaatgatttccgcttcaaagataaattcagtggcaatttcttctcagtgctgatagcaggagatgcagtatccgatgctgtgttggcagtgttaccttgcacttgcacatttttctctggattctgaagagaaataatatctttctgaggtagagaatttgataaaacttggtttgctccagtcgtccaatatctagatggtcattcagaatttttttacaaaatttcctcataggaaggcactgaagaagatgaaaaatttcaaagcatcatacttggaaactttcatggtagagagatcaggcaacttcctgacagccttcactggacaaagtgtagtttcttcagctgatttgatctttgggttcgggtctcgaagagcctccatgtttgaggaaaatgctttagaattaagaggtatctgattactagatctaatttgcttctcggatgaactagaaggacaatctcggaggctgcaaggattcgtcactcataaagttcaaatcaaaaattaaattacaccatacatagccaagatcatgaatagaacaattaaatcgaagcaatattcacacaatgaaaatgaatgtgtcgaaagttgatttcctgagacatgtggtagaacatgtaaacaaaattttccttgcagtgcaaacagagctataaatttgtttataaaatttcttttcacaaatatcatgcaaagaaatgttgaagtatgatacagacacgtccatagaaaagacagtaatgcagctaaaatattacactcaaacttatggtcctgcacaatcttttgaatctaaaaacgtgcctatggactgaagaagtgaaactatgaactacagctaatgaaaagtaaaaagaaaatcaaaagtcaaataccataccctaaagtattttgacctttacccatcttatcacttgccggcaagacgggttcaacttttgtagcttcatcgtcaggcagctgtgattttccaactagtttgcttccatttggtaaaccattagaaataaagctatctctgttgaaacaatttcaacaagggataactatttgagcagaaaagtggttatactgtatcaagtgtaaattcacatagtcttgagggattctgagttcaaagtacattagaataagagtctatgctaaaaaatgaaaattgacggttaatttgcctcacctgatatcagtaagattcatatcactctttgcaccctcctgcaatgcatctttgcctttagtaaattctctagcacctaacagaggatttccacaaagctcttttccaattcgtgcactattagaatttaaaccctccctgaaaagattgtacaaaaataagtgaatataaacaccaaatattggacttattacacagccccacttagttgattataatttctgaacctatatatgataaggacaaagtcttaaaggaaacaaattttaacaaacttaaatgaatggcaaactatatatgcagttccatttatctgagaaggtggacagcttcattttcagttgtaacagtcactttatcacccacaggtttactttagtaaacaaagtaaaaggacatgctatgagtctggatattacaggcaatgcacagaacacagcttttgagcacactcagaatgtagtgaacagttgtatatcactaaaaatgaccacatttcaaaagaagttaaacatcatatttataaacataagaagatagtcatggagcaaataaatctgaaaatattccacaagtctcatccttattgaaaaccatccaactaaaagaagattggagaacatatgactatcataatttaattttagagctgaataatcaatgactgattgcaactaccaaaagcaagaggattgacctggaaggaagagctataggaagttctgttgacaaattttgcttttccttgttgtctttgacatcaggttgatccttacttgagacaaagctggtcaagttttcctcacatttttcatcagcttcagatgacacagtacagtccacagtttcttttgatttcttactatctgatgtatttgtctcaccattattactttctaaagtagtgttttcaagtgacagtgaatccttcaagggtaaattttcatcagaagataacacaccaaccgtcactttttcatttacatccttttgatttaaggttgttggtaatcctgagctctgttcataactttcattctgcccttcacaaagagcatacctatttgaattgacgtcttctaaacattgactagaaaaatcaataatggccttctcagagtacagttttgacgaaatttctttctcagtagctattactttttctggagaaggttcagcacaatgtgataaaatagcagcctcagagatcacatgttttgcagagccatcttttatggaagtaagatgtgatgattcagctaacgaactttcaacctttgaagtgtgaacatcctcaaatggctgtacttttgtggcggtgtcaaaacatttaacgccttcgctaagttgacttttggatccccgactttcatctccatctaatgaacttctcttttttccatcatgactctggtgagaagccttttcttctttcattaacgatgagtcaaaattgaaagaatctagcctacaatcaacaacaaacatatttcaaataagtgatgtatttcagtaacagttatattgtttgtacaagtgcaatagtgcttatggaatctacacaagaagaaggtctttacttactcattaaagtcaaatgagaaatcaaactgttttttcttccctttctgattcccattagaagattcttgttcagatttctcctttgtctttacagctttggtggatggggctgagaaatcaaagtcttccatgtccactttaaaagatgataatttgttaaaatcaccatccagattgaaatccatgtccctgaatagaagaacaaaagaaaaattaccttcaaatggtaactagaaagtagaaactgctcaaagtaagttcgaattgaaggaactaattgattttgtatttggtctttcattctcaaaagaatttctagttttccacacagaaaacaaaacatcaacatgcacaccaagaataagcataaaagtgactaacatattcaaatgcaactgcgattagaaaaaacttccaaatgtgagaatgagttatagaaaagaaagaaataaaagcaacaataaattattatgatatccatacagtttatcgaaatcaaatgccttcttcttgccattggaaaccgtactaaagttaaaatccattgtgtcgtcttcagtaactgacatggtcttccaggagttgagaaattcatttccaatatcatcatctgtattaagagaaatataggattcatcatagcatacaatcaagagatcttccagcaaaaaatcctactgtaaaattcccctaaatctgatcatttaagctgcaaatacattgactaaacacataatgatcttatatcattccaatagtaaaaatttgaacgatgcaaagaaagaaacaatcgaattatatttcaaaaaacactacaataaatagtcaaaactggtcgaaagaaagggaagtaaagagaatacctagcagtgactttttcttttcagcatttacagaggaagtttccttctgcggttcggccatctataaaagtagctattgcattaaaacagaacgaattattggaaagaccgattagacaaacaaaaaaacactggaagacgagagatttcacgatagaatacttcaatcaaacgaactctaatctgtgaatttagcaaaattcaaagcttaacacgccaaataatgtatgtctgtggtgaagtttgcgcaaaatgtattaacaaaaattgattaagattaatgacaaatgcaaatgcaaacgcatgattgatatctaccaattcgccgcgagaaatgaagaaaataaacggtaaaagaataatataaacctacagtccagcatttacaaagatatggagtaaaatagagcttacctattctgcaactggagagaattggaaaataaaggaaaaggagtgtttggcatgtaagaaaaatgtgagtagaattgaatttgaagcgcttcgtttattttttcgcaatggaattgaagcgcttcgtttaaatacaaaagtatatatatagcaacaatttttttttttttggtaaggaaacatagaattttttaaaaaagttacccgtcttcaagcgggacttgtagtgttcggttttcgtgtatttttgaattttttttttttttttaatttttaatgttattataagttataatattttacaagaaaaaatgaaattaggaatatcaccccttcaacaatatcaagacaaactagtcaaccgtgacacttatttcagttagttgttactaactgtttttctgttacagtcagcttgtttgtttctctttctttttattgtaaccaattcttgttgtgatcatctacagctactgtattgtctatataagcttgtattgattcattcatcaatgagattctcttttcaatcttcaatctctctttctctgtctttctctgcctttctttcttttcttctttcttctctgttttatggtatggctaatagattcaacatggtatcagagcaatttccgccattaatggagaatgtagtttctagaggagctggtctgaatggttcaagaaccaactctggtgacagcgacaatggaggtggctctgctgaaccttccaatcgtcaaccatctctcaatcaaggaagaacacgagatcacgatgagttctctcctgtctattttactcacaatctttcaatccgtttaaatgatcacaacttcctgttgtggaaacaacatgttttagctgcgattcgtggcaacaggttacaacgataatcaattccaatccccctgcaaaatttctgtctgatgcagatcgtgaatctgagaagtataaccctgcttatctggattgggaagtccaagatcagcttctcatgtcctcgctcctgtctttaatgtctgagaatctcctcacgcgtatggttggatgtgagacatcgaatcagatctggtcgacattggagaagttcttgttggaaattattt

SEQ ID NO: 15731 - DNA, 9077 bp, Cannabis sativa
aaatagtttttcaaaagagacccaattttattttttttttttttttttttgtgaaacaatttgtaagaaagacaaagttgagtgtgttaaagctttattgggctttgagggtagttttattgtagaagcccgtggtcatactgggggacttgctatgttgtggaagaatcaagatgatggtaaacttctcagttttagtaataatcgcattgatttggagttgaagttagaaggctacccattgtttcgtgcgtctggcttctatggtgaacctcaaaggagtttgtgtggaaattcatggagacttattcgacagttggctggggaatcaaatcttccttggtgcttaatgggagacttgaacaatgtccttcaccttagtgataaaagaggaggacggtcttatccaggttggttgattcagggatttcaagacatggtttcagagtgcaatcttattgatatggagttggtgggttacctattcacttgggagaagggaaagggtacggcgacatgggtagaagttagattgggcagagctcttatcaatcaaggttggaacaggcattttcatgatacaaaattagagaacttagaaatttctgcttctgatcattgtcccatttgtttgaatcttaatctgtttaaaagggtggttagtataaggatatttttgttcaaaaatgcttgggtgtgtgagcctatgtgtcagattgtgcaagataattgggatgatcatgggtcgaattctttgagttcaaagattaagtgttgtagtattgctctagccgaatgaggagaggatactactggtaattttaagaagagaataagcagtcgtaataaaatcatgaagcttttgaagaatagaagggatgttgatttggttaagagatataaggagctcaagatcgtttgtttgaagtttgggctcaaaaggaggtattctggaaacaacgatccaagcaaatgtggatgcaatcaggtgactaaaacaaaccatatttccatgcttatgcaagtactcatcgaaaaaaataatcaggttttgtctctgaaaaatagtagtggagtttgggtggattgggataatggtttgcctgatgttgtagaagaatattttagagagttgtttgttgccactgatattgaatggggaagagtcgtggactgtgtgcataatcgggtgtcgacggacatgaatgaggctcttactgtttcggtggaagttgaggaagtttgaaaaggtcttttccaaatgcatcatgataaatcgcttgggcctgatggttttaatcctgaattttatcaaaattttgggacattgtgagcaaggaaatcattcggttagtacaacacttctttacttttggttttgcctgatcatttaaaggaaacaaatattgtgcttatcccgaagaaatccaaacccgaaagtatgagtgagctaagaccaattgctttgtgtaatgtggtctataagatagtctctaaagtgtcagccaatcgattgaaagttgtccttccaagtattatttctgaaacctaaagtgttttttttacttggaagacttatagctgacaacatcttaatctcttttaaggttatgcattatttgaaaaggaagcaagtggggaaggatgagtttatggcgcttaagttggatatgagcaaaacttacgattgggttctgtggggctttctacaagctatgttgaggagattgggttttactgagcaagtggtcagattgataatgcagtgtgttagctctgtctcttatagaattattgtcgggggtcatgaaaatgggccttttattcctacaagaggtttaagacagggtgatcctctttcaccctatctttttttttctatgcacagaagaattttcagctttgataagagagtatgagcgggagggaaagattctgggttgtaaggttgcaagaggggctcctgtgttatcacacatgttttttgctgatgattgttatgtgttttgtaaagcctatgaggatagtactattaatgtaatagaaatgttacgtatttttcagaaggcttcaggacagcaagtcaatttgcaaaagtcatctatcttcttcagtgctaacactgtcaatggggtaaagcaacgagtttgttctaccttgggtgttaatgaggcaggagaagaaagacatatttgggtttgccaaatatggtgagaggcaataaaactgccttgcttggtttcttgaaggataaaatgcggaaaagaattcaaggttgggaaggaaggttgctgtcaagagcagggaaggaattgttaattaaaactgtggctcaatctcttccaagctatgcaatgaatgtgttcctacttccggtgaaaacttgcaatgagatggagcaattgatgtgtaagttttggtggcgatcttctaagaataacaaaggaatccattggaaaaagtgggatgatttggcggttcataagtcaaaaggtggtatggaattctgaaatcttagagattttaatttgagcttgctttgtaaacaaaggtagagactatttagccgtttggactctctggtcagcagaatatttaaggctaggtattatcgtaatggtagctttttgaatgctgagttggggagcaatccaagcttcgtatggcgtagtatttttgaaacacaggagatagttcgtaaaggggaaagatgtagagttggtgatgactctagaatcagtattgtgttggatccgtggctgccaaatgaagagaatccaagggtaacttcgattaatcctactcttattgatcaaaatgttctggcacttatggtaactagaagtttgggttgggatattgacttggtacatgatttttttaatgaacgagatgctaatctgattcttagtatctccttatcttcaagtcgtttacatgatgtatggtattggagttgggaaagctcgagtcatttctcagtaaaatcaatatataagttcttgcaattgaggaaagagttgaatgcacaggatgataattccatcttttgaaacactctttggaagcttagtgtccctccgaaagtgaaagatttgttatggcgtgctgccactaactgtttgcctacaaaaaatagacttcgatctagacatgtgcccgtcgatgtcaccttccctgtgtgcaaagttactaacgaaactatctatcattgtttggtggactattcttttgtaaatggcgtgttggcaacagcttgctactggtgtaaatttgacagtagtaggctcttttgccaactggtttgcttcgattttaactcagttggatggggagaaaagaagcttggttgcaaagacatgttgggcaatatggaagtataggaatgaattagtttggtcagacaaatcttctactgtctcaagtgttgcttatttagctattatcatattatatgtatatgacttaatatgtaatatatattatgtatatggtgattaaattacatattatatgacttaatatgtcgaaagtaacataaagtaggagttataatctattaactaattttataactcttttattataatttcagtgtgtaattaagtgagatattacaaaaattaatataaaatcaaagctatatattatcatatagttgttagagggaattactatacacatttgagttattaaaatgaggtagaaaacattgagaattgattggggttaaaaatgagttgcaaaacttgataaacaagtgttttaaaatagaattttcataaaatgttgcaaaagattttggcactcaatgggttttaatcctagctttgttcccacatccataacacataaaacactcatatatgtgttgataacagcatggagtgatgggagtgttagatttaaaattctgattacaaaacactggagacttatgggattcatttttgtaaaatctagtttttatcaagagtgtggattgttagaaactctctttaagcttgataaatctagataattatttttattttttttattttctctaagtgcttgtggtaaaagaaataaatttttggataaatatgtaaaacattgtttcttattatacacttgtgatatgtatggtgttgaatttactcttgcatctcttatgtaaatatttatatgctatttatattattgtattttatttattgcttattgcatgagtagtaattttctttttatctcttaattctcttcttttaagtgtatatttgcctattgaattgtaatattaattatttaattattgttttaaccatatattattcttctaatatagtttggtttattatttttattgaagcactaatttctctaacatacttactcttaatcttatgtatatatactcttttatttatgtattttaatgagattgatagcttgtaggtaggagagacttttgttttccttcatatgagtgcaacaaattataagaattaattagtatacatatagatccctatctcatgaattaaaaattaataaaaattataagaagtaattattggtaaatttaagatttaattgatatggagcccaaggcggcaagaccagcagcggcctatgctttcgtccctcttatctatatatgctactgctagaaagaatgaggtagatcaaaaattaaaaacactcttaaacatatcataattaattaatctgacagaagaaataaacatataataattaaaacgtacgttttcataaaccctcttaaataatcattcaagtcttctttatgaattattactacgaagaagattataaatctcaagtatgtacctaatataagctttgatataactgcattcatctacagatacacttacatgttataatatgttttataagttgttttcataataaagtttataatagtatataattatgtaaagtttcctttaatgtgaatattattaaagagtgaaaattacatatttcaaaatgtgccaaagtatgtattttttttttcaaaataaattattttaagaaaaaaaatccaacaaaaattaaaatatataagaaaaaaagtataaggtaactagttacctttaacttaatggtaactgattacctgtataaggaggtaactaactacctttaagtaccctttccaatatatatatttgaacttttctcataatttttttaagaaaacaaaaaccatatttttggaaaaatttccctaaaaaacataaaaatgaaaattcctaatttaaagatgcattaattttaatttgttccaaggcccaaatcatatgattgccttagattatctacagtgaggtaagcaattcataggccttaagatctattgtactatttggggttgatacttatggtaggtattaggtaatagtgatattttacaggtcctaacccaaaaatttaaaattatgttattttggatctttgaccctacctaattatagtttatgtattattatgtgtcttgaatttttcagtctattaaaattagaatctgaattaatcacaatattataaaaagtattgttattaggtaccagtggtgtctagtaccttctagacatgtcgccttctaattggctagcgatactcactaaatttttttacattatattatatgggacatgatacttagttagactaatagcgatattgacatgtaggaaggtattaggcaccaagccttttagcatttttctattgtaaactagtcattctattaaattttatcgcacatggcaaacaaaatgatgatatggctcctgagtgagttgtcacgctaattttatattaacgtcacatgtgtaattaatttgaaaaaataatttaaaaactttttaatttaattttacgtaattttcttaatcgttaattaatttttattttaactatttcttaaaaatgcctaaattttttaatgctaaattatatatgtggtgttgatgtggcaattagttaagtagtcatatcattattttttgtcacgtgtgataaaaattaactaaaggactaatttacaacattgtaaataattcaggaactatttataagaggcaaagtttaggagacataataatatatatgatatcctaaataatctcgcacgttcaaccagacactactaacattaaggtggtgtttggtaagacttttttaatcagttttctatttttaaaattaacaaaattgaaaatatttttcaaaaatatattgtataaaactgttttcaatttttaattttttaattgataattaaaattttgaaaacaaaaaaaaaaaattactttcaatattttttttaaacaactttttttcttaatcaatattttggactctgaccaaacccgaacccaaatcctcccacggccctagcactgaatccgtcctctgacccgaatctgaatctaatcccggacctagactcgacttaaataaaatcaaaaaataaaaataaaagtaaattttgtagaacacacttttattttctatttttaaaattgaaaaataaaagtagttacaaaatgtatttttattattttttttttaaaaaaacaaatttttagaagcaaaattttatttttattttatgattaaaaattaaaaaattaaagtattactataagacacttaaacaacttacataattttatttattaagtaatgaaattgttaattacttattatttgattaaaaggagtatgtggctgcagttcattggattcaatttagagacaagtcaaccaaccccaccaccactccatcacccaaaccactttgactatttgagcttagttttaaagagaaaatttgaaaagacaatgaatcaaaacatgttatctaattcaaaaatccatcattattaccttcaattattaattattttgtaaaatgctacttattttgggctgcttcacgttttgggcccagttaactgtcttgtacattaacttttttttggaatgatccttgtttcaaacaagcctcacacactaatccacgttttttttttaaaaaagaaataaactcttcattaacaacacactaatccacgtttaaattcaatagtatataatataataaataaataaataaaaagctttgcattattggtttgatcaagaatcctttattttaatcacagttgcaatgaatacttatcaccaatgcagtggataagaacatgaatttctttgtcccgaattagactttctgggtttttcacattatatgaaaatttgaataatgaatagaaataagattgaaatagttaaaaaatatatatcacatgaataataaattgaattataattatatatatttctttttaaaatatatatatataattatgtatattttaaaacccttaaaagattggtataattataaataataaatatttatttatcacctataaaccaattaaaataataataaatattcaacttatacttaatttatatgattatttataataattattgaaatattatataaaaataattaaaatttataaaaaaaaaaaaaatacatataatttaatagtgagttcattaatcataataaaaatatcataatgtgaagcaataattttagcccatataagaaaatgggctggtttagtaaaaaaaaaaattacactcattatggaattttaaaagttgtttatttaaatatgacactttaagttaatttatatggtatttttttatttttaagtattttttatggtattgataagtcatatatatgtaaattagttttttaaatcctatatttaatgtttttatttgtttaggcagttttatttatcactggagctagaaaattcgccggagtttcttgtcggcaacggaaaaatcactgaagtagctgccggtgccgaaaaagttgtcagaattggcattgttgcccaaaaaatcaccgaaaaatcactaagaaattggattcttgataaagaaaccagtttcttagtgattttttccgcaacaatatcaattctgacgacttttttgacacttttttggtattttttcgacgacaatgccaattctgatgacttttctggtgccgacagcaactccaatgactttcttggcgctgacagctactccagcgatttttcggtgccaacagcaaactgtgatgccttttccggcaccagtgataacttcggcgatcactgtagtttcatttgtttttttttttttaaaaaaaatattaagagaattttaatattttttatggtaattcaatcttatatatgtaagtttttattttaaataccatattttttcctattaaattttcttaccacttttatctaaaatagttttatttttcccatgtttatgtaaattccccaaaaaataaactggcttgagtaaagcatgattgaaaatactaaattattttataaaattattggcaaacacaacaccatctatatttttacaaacgtttcaaaatatcggtcgggccaaaacaacatgcatatatttacacttcttagactcagtttgccaccaatttgaaaactacaagtgggtgcgaaatattacaaccccttccaagaggttagtcaaaatagaagacctaaaatgctatggtgaatcaaacccagagatagagatcatggccaacaatgctagtaacagaggcaccaagaatcttatctatgatagagacaatgaaaaatctactggctctaatcataagttgaaccctagagtcttactatttaggacctcccactagttttcattaatttttgaataatttatagtgtcaaaaacaaacttaaaaaaaaattatttcataatcatatgaaataaactaaaaagtacaatttattttatatatttgatattgtaaactaattataatttctcaaaaaaaaaaaaaattgtgagagattttaaaagctacattgctcattgtcatattgaaaaaagtgggattgtaatcgatcaatgtgccaaaaatcaaaaaaaaaaaaaaaagtactttttaaaattgttttatacgcacaaaattattt

SEQ ID NO: 15732 - DNA, 6948 bp, Cannabis sativa
tattgatactttgtgaatttgcttgcaaaatgatcaagaaaagattagtataatcaaacatttgtttatcatcaaaataagtgagtgattgacatttggtcaacattattaactgcttggatttttctttcctttcagttgagattactatgtctgacgagttcgacctagagattggtggacctcatcgaggaagagattgagacaggacaactggatgaggattcggaagaggaagtggtcctggaagccattccaaagaggaaatgccaaaagaaagtcgccccaataatttttaattcttccgtctgagagatggacaagatcccaaataaattcaggagttacgacatgctccaacaatacgacgaacaccggtgttagcaacattctgagactatgttggcacagactttctctcctaggtaagtctccaattgaatgttctgatggctttggagcgtggagttggacgcacgccatttatggagcccatctgtcactgggtgttactttgccagcttttgtgcccacttagggatcgcacctttctagcttatcccacaatcctataagcttttatccggatggtatttctgtgcaagctccgggagctggaagttctgagttcgaaagaggtttttctatttttatgcagttaagtctcaacccatgaggaacaacacctccaaaattgggtttttcaaattggagaagcgccctaggatgactgatcccacaagtagcacgaagatgcccgagaattctaggactgcttcacgacaggctttctattgaaaagggttcctattttgtccctcgactttttcgttctaggtaattttttattcttgagttccttttcattttcttccattttttgtgcccattttctaacaatagaacttccattattccagctaatgttgaatagccctagcgagctaagaggcgtagtattgaaaaattctctctgacgcctgcatgtagaagacttggtcaccactataaatatctataaatatgggctaatctctgtaaataggacaactttttaatcataggatatctggactccacgcccaaaaatatttttcttacattaatacaccaaaagttggaccttccctttttctacactaacacgacacttatggcgtgatctgacacgaccaagtataggtataacgactctccctcaaccagtttggataggatcggggccttggttaaatgttcttttaactttcaacaggcttctttgcattcttccgtccatttgaacattttgcttccgcgtaggacgttgaagaatggaatgcatttgtcagtggacttggatacgaatctattgagcgctacaatccttccaattaaactttggacgtctttatgcttcttagggtgaaggcatatccaggaaggccttgattttttttcaagttggcctcgattccccagaagctaatgatgaagcccaggaattttcctgaggaaaccccgcacgtgcacgtgcatatccaggaaggctttctccaaatcattactatgttccccagaatatttgtacttgaccaacatatcgtccacatatacttccttgttcttccccaagacatatttgaacattttattaaccagcctttggtaagttgctctgatattcttttgtataaatgaaattacaacgtagtaatagacccctttatcagtttggaaacttttatgctcttggtccgctacatgcactattgatctgattatagccggagtatgcatcaataaagcttaagaattcattttcggacgtggcgtcaaccatttgatcaattcgcagaagtgggaagtagtctttcaaacatgatttgttaagatctgtaaaatctattcacattctccaagtgtcattggtcttttagagtagcatcgggttggccaaccacatgagttataatgcttcttgaagaaactcaatggaagttagtttctcaacttttacctttactgcatccaaccttaccggatctagcgacctttttttcgtaaactggcatcgccttctcatcgatgtttagggtgtgacaatggtgttcatattgattccagtcatatccgaatggatccacaccaatttgtctcgatttttctttaccatagacacaattttttctctcaccactaggtataaatttcttcccacgttgatgactttggtggggtttatctcgttgatgctaacttcttcaacatcttccactagttcaatcactatttttatccgaactcggggatataactcatcttcaacctcctcttggatagttcctgcttctggctggttggttgtttcaagagaaacttcaatttcttctctgaccatgaataccgatcagatagagacattataataactctttgcgcttctctgatcacctcagactagtcacacacttccattttcacatggaaatttcatgcataactgccagatggaggtgagtgctctgaaatcaactaagatagggcatcctagtattaagttatatgcaaaagggcagtacactaccacaaacatgcaatgtttgaaggcattgacattgtgctcccccttcaaggtgactaggagttagattctccccatcgacatcagggaatcttcattaaacctttgtagttgtatcgggcaaggtgatagatcaacttcagttagtcccataacttggaaagcaaacttgaacaaaatgttgatggagctgccattgtctactagcacccttaagactcttttgtttgcaattttcactttaataaataaagggtcatcgtggggaaagtgcacatgcttaacgtcttcttctatcaaagtgacgagaaggttcatcattcttagacggtgggccatcgattgcactagagcgcatatctccccttcatgtttcagctcattcaaatatctttttttgggaattacgagtgttcctagcaaggtgtggccccctgaagatggttggaatgtggccatctatgggcgacagagctagacctggtgaataagggttccctggtcccagagctaggactgccactgtagcttgtgttagtagagtaggtaaagccagaatctatgttttgggagcttgagggggtatttgtggctcctactgttgggaacgaggccctcttcatgaactataccctgtttgggataaatgatgagaattcgtacccactagctaaggtgtcgcgctctggctaatatttttatctcgtctttcaaataatcacattcattggtgttatgactgatatcaccatgatattcacacttcttactcgggtcccttgtttattttcctcgttggaacattcgtggagtcttctaataatagaccacattacaagttgctttgtaaacattctcctgagtatcgatcaagctagtgtactctatatacttgggttcatactccttccttcatatctttggagctttgctctggttctggcttttcctcctcttttatttctcgaatgactcacatttgattctgaaacctttgtctttttcgttgattgtccgggaatgatattacatctagtctatgctgctccaaaccctgagaaattagtatatgcaggcgtatgtctagagacaacgggtctatagactgctggacttgcgaacaaggttaagagtgatagtcaggacagaaacttgcaaagtgtaagtggatgttgcaactgacagggttggcgcagtggagcaactctaaaagcttggacataggcatcttccaaattgatgattccctaggccctggacatgaacttggacaaagttttggccctcttcctttgtatttcactccctaaaaaggagcctacagttagtctagactggagggccaagagtttcatatcatcgctgaccttagttttagtcgttgctttcatcatttgttggatgaagctttcacttggctggtgtttgagattggttagggatctgacctccatgttatgatccctagcagcgataaattgtttacaaaaggtagattgtaactccttctagccatgaatcaatcggagagacagtctcttccaccaatccttagcggactcggttaatgtcagcgaaaaacaaagtcacttggcatcatcactaaatcttgccaattgcatcagatggatgtacttggagaggtgagtcgtggggtctgtccttccatcatataacttcatatgtgacatcttaaattaatctggtagtggagcttcgatgatctgcttgacacatggttttggctctttgtcttccgagtcagagatggcgccactttgctttcgtaccaagtttttcaaaggcgttatttgttcttccagtttcttggtatcgttatccagaagttcatgttcgcgaaccttatcgttgatgtggttctggagatcattcccgtgaggtcccactttttctcctctgtctttttcacacttggaatcaaggcgtctccgaaggtcaactgtggactaactgtcctctggataaatttcttctatcctatcattctggttaacagattcactagggtggtttttccttcccttcacagtaggccttcgtacttgaataccaagcctaatgttacggtggtgaacttggctttgcagagcggaagggcatccaagcccggaggcgttggtggccttcttagttcgcaagggctggttggttgtgctcacattatttctaaaatgtaatgggacagttttaggttgatactcgtctacttttgccttctccttgtcctttgcaggagccgaggttccaacatcagtagggtttgctcttttttccttgttaacaggctcctcttgagcatcttccttggaatattcatctatgtcgaatttggcctacaatcgtaccatcattttctccatccaacgagaaatagcttcttattctgctacctttttttttagagttttacctaactcatcggatactcgaaccaccttgaggtcttgctcataataatattcgtctttgtaatatccatctctaatttcaccatcgtcttcttcctcttctttcttgtcttctgggtttttatcaacaaattgtttctaatgttgggttgtttcagtcgttcggtcgccaacttagaacatttcttcgtccctcatatggctcagctaggcgagccctatagggagcagatgagtgtcgtccatgaagacatcctagtctggaagaggggtttctcggtgatagtcttttgggtagccaccatttttatagatgtgaggtagcttcaactctttctacaactctcaatgaaagcaccaaaatatttaccaagatttttggaaactaaattaaataagagcttaagaaattaaatgactgttcaaataaaagagatggagacttttatgtggtttgtgtattaatgaaccctagtccatgagtcaatgtattagcctaagaagcttgatatgtattacaaatgggtcttacaatttgaagaaccataatacttgctataatattttccctctagatttttcttagaagaagaaagcttagagagaacctaaaagttttttttttatctctttgcatgaaggggtaaaggagtttttataggcttagattcggatcgggcacacatgtgacccgtttagggttcttgtgcaaaataggtcactattggggtaaatacatgaaatacatgactttgaggcccactgcaagattttggcttgtggggtgaaagtgttcgtacaaatggggtccacacggtttggacaggtgtcacgcccgggcgctacttcaatagacaagaatgtcaaataggcactattggacaaagaggagatactcctttggtggtacgtgcaatatcatgttctgacataggggacaagatgtgatttggtgggaacaggcatcagtgcgtagccacatcaccctgcaagaggcttccggaggcacctcttggacttcctctctggatgtgtcccatcgattgtccagagggctttatgtgtttcgtctcctaaaaggctggacaagattgcagaagtggagaggccttgtttttgaaggcgaggcttttggagtttagatgggttcgacttcgagcccatctctgatctagactgagcttttgtatgcaagaaaactttggcctagacttatgcagactaattatactttaaaaatgccatgtgttgtctatcaaaaaacataaataacaatttctattattgaatacctctagagtcaataggttatcatgtttactagcgtatgtaactctaggcctagatatttgaaatgtagtagttagtcgttgtgacaccctactaatttaggcacaccacatgatttactcaatagtcctaatcatgatatattaaaagtaagagtgttgttaatagaagaatgataaaattaaaaccaaattcgataaatcttttttttatttataatactgtctcgggatctcaaacaatataaaaaaaaaatgcacatacataaagtatgtcaaaagccggcctaagttgcaaaactaggttagaagtcttccaacaacctaacccaataggtcacattggctggaacatgcacatcctccacgcaagcattccaacttattattgactaatagtagccatagccaaggcctaacaaaaaaagtaataaagacatcactattaaataataatatataacatgctaataagtaatgaaaataatttaatcatctagggccttgcccaattcttaaggccattgtctaatacttgttaaattattttatataatataatatatttcgattaaataattaagtgtgacaaagtattaattttgtcaaattgtaacatacattatggagttacaaaatgtgtgtagaatgatcacaaaataggagt

SEQ ID NO: 15733 - DNA, 4583 bp, Cannabis sativa
ctctctctctctctctcgttaatctatttctatctgcttgtgcatcaccggggagggacggattaggtgtactgtgctccgaccctttacagacccaaatgcctaaacccccaagcgtcatcgatcccttacaaatcaaaacgtcgtcgaccccctgggaacccaaacaggtcgacccccttcgaacctaaacaggtcgacccctggaacccaaacgtcgttgctcccctacaaacttgaaccccccgtgccctgtcaaataaaagagaccaaagaattctttttaatgggttgtgggttgcagatttgggttatttgttctttgggtggtggtcttgtcgggatcaaaagagagatgatggagagaaggaaaagagagatgtgatctttatgggattggggtctggccggggtggtgtggtgttgggttttggagtgggggttggtgggctggtgtgtgtttttgggggtagttttctggccagtgtgaagaagaagcataaagaaaaaaaaaggaaaagaaaaaaaaggaaagaaaaaaaattattttttaatttttaattattaaaataaggtagacttataaaattttgccacgtgtatacttgtgtatactgggacacttaacagaccaaaatgaacggaaggactacagagcaaaataattgtcgagtgggagagttaaatcgtaacaaacataaataagtccgtacatgtttaaatctttataatttaataataataataatttaagtatttattaataaatatttaaattttaataattttttttatatgattgtatggtaaaatatttattgaaaaaatatctcattaattaaaaaataaaattcaaaaaaataaaacacgagccgtagaaaaatgaacttacgaaccgcaaaaaacaaacttatgaactgtggtggacctatcctacattttgagaaaaaaaagtttgaacgaataaagttgtaaaaatttaagaatttttctaagaatttacttagctaaaatgttaagagggtcagcagaatttggtggtgagtttaaatttttagtaagtcatttatagaaaagtggtgtgctattataattaagaatgtattatatatcattctcttccttttcttcttcagtgggattgtaacattggtggtgcctatagtctaactaaggttgcactttgaattaacattaactcattagttaatattttaactatgtcacaatatttggataatgctatccaaatgccaagttattaaatctaaaaaaataaaactgccctttactaactctacacatctattatatatcagattcatttttaggcagtcggtaattaattaacatatatattaactttgttaagaaagaaaacaaaaaaagctataaacttgcatatatacttggaagatatgagaatagtagcagatctcacatatcaatttaagcattgtttacaaacacgtcaaatgagtctaaaataaaatgaaaaagaagataagaatcgaacagaatagaatataatttgacagagaattttatatttgttatggaatgtattgattttattacactatttattcattcacctctatatgctgcagaagtagaacctagctagctacaaaattaatttatgtgcaactcgactataatctaaaacgcatattagttctataagaaccgaattaaaatgatatgtaagaagagtgtatttaacatcaaataagggtgtctacaacaaggcttaccaagaagccaagtaaagcaccagcaatgacctcaatttcagtatgaccaattgattcttttagtggataatagctaaaaattctttctaatcctgccccagtgtcatctgctaaaccagaaggattctgcatctgagtcttgctctctgactttggtactaaaagggcgtttctggtttttgatgttgaagaatttaattcatttttggatgagtagttcaagggcaatgatgttcctggttgacaatcaaagccatctatgccctcggcatgagttgagctttctcgtgatttgggctttaggatttcgttcagtgtctttgcatgaactcctacttctcttctaacaccctgtgagaatatggataatgcttcttagtttcatgaaacaacagtactaaattcaaacaagaatagaaaatctatcaaatgacaacttcatcaacctaagctcgaaccgtatgattaataattaaattgcactaagttaatccagttcaatgtttgataagtctactaaaaaccatgagtaatataaactagttcttagtagagaagatagtgacagacgtgaaaattcatcgatcatgtcacaacaagtaaaacaattaatgcccatattgccaatatcacctaatgagatgaataggaagcaatggtctgaaactttttagtataagttaaacactgaagaaattataatcctcaacaacttaacaacaaattgctctgaaatagagtaattggataaacaagcagtaaattttgatatgacatgatttggccatacaaagattagatagtttagtctaaatgtctctttaacttttgcaatctagtacaatcctttaaaaattgttgttgtttcttcttctttttttctacaaaatgatcagtcttttaatttgaattttcatgtacggcatgatttccaagaaattttgggatgtatagtatatagtgaagtaacaaatgctcttcaaaatctaagcattttgttactgtataagattcattgcaatattttaaaactcaagggcttagctgcagaaaacagattctcaagaacaaggttgcaaaaatacgaaaaaacatagggggcatacccaagtctatactccatagatattcttttaccagtcaaattgattttatttacagatttgaaactaattctgcattagcaacattataaacactgcacatacaaatatttctctcacagacaacccatcaaagtaaaaaatcacgaatcacgaatgagggttgtttgcacaaacagactagttcttcaatatgaagtcctctgaaaacttaccataactaatttgagcacaagtcattttgtatgtaaataattagttttattccaaatgacactcaaatggtcaaatatgtgattggacaacatctaagatttaattccttcctagacacctcaaatagaaattgctatagtttcctaagtctctactttaataatttatcaacctacatgataagaaagaacccaaattgagaaagaaataatgatattcaaccatgaaccatcaaatttctgcaacagactaaatcagaagacaaaacaccatctaaatctaaatcaaggtggctacacttctgctactatttaacatgcatcacaataccaaatattgatgagaagaattttcaaacagattcatacctgggcatcatacataataaggccagcataaacaactgttgcaccaaacagtgaatccgagaatcccctgcagataaacaaacattgtgtttgctttaaatttcaacatctaactaatgtagtcaggtttcaaatgaatcagcacaaccaaattgaaaattgttagagctaaaactaaagagaaaatagtaagatattaacactacatacctttcaagaccaaggcatgttgcagcagccacaactgcctatccatcaagaattgcatcaaacattacaacccccacttgaaaaatcaaactacacgagtgaaacgaagaaagaagaagaagaaaaaaggcttacagaggaatgagttgaaggaaagcccccagcctgaatagcagacttgatatcaaattctttcccatacagaatcacagatgtaaaaggcttagagagttgcccaattgccgcagaaacaccagctgctatcaaaacctttagaaagaaagaattaatggattcagtacaaatacataacataaatcacaccaaacaagttgtaacgaaagaaaaaaaagaaaataaggaatacccagtataattcttgaccttgttatggaaaagctgagggatttcatccaagaaatgagctttgagagctgttgtgggtcttggcttggggaagaagaagaatggtttggataaaaggacattgggagggtttcttggattgaagaaaggcaaattaggagtcatagattgaaaagaagaaggtgtagaagcagtggaagttgtccaacaatgcagcatcatgattttgccaaccaatgcaaacgttactggtgtagaaaccaagatccattattcataatcatatgagtgaaacaacattgtttttaggcctctcgtttgggagaaaaaataagatgttaaaggcggaaagatgccaaattaggggcacatttgattaaaacgacaataaaacgtaacccaattacaagagcacaccacattgcacatgccgtccaagcaataattatattatttaatacaagctaattaggatttttttccctaaattttcacatgtactaaatcgtgacccctgaacttttttgtccgttaaaaattctctctgaactattgagattgtt

SEQ ID NO: 15734 - DNA, 7396 bp, Cannabis sativa
  modified_base (753)..(755): a, c, t, g, unknown or other
  modified_base (6408)..(6410): a, c, t, g, unknown or other
gggggggggggagaagtgatataggggagtgtcaatggggtttatcgagacgagcgagggtgaagggttatgtgcattgtgctctggttaaggaggttggtgccgttgctgctgttttctttgatgatgcagggaacttagtttgttttggggcaaaaaaagtgcaggtgctcttggcttttcagggggaactagaagctctagcttttggggtggctcttgcaaacgatcttcaacttggtggcgtggatttctctacggattttctgcagctggtgcaagccttgaatgtgggttcttctccagtatggtttcttatgctttcttttaacgaatttcaccatgctcttgttgcgaatgatagtaatgttgtttggatttctcgtgttttcaataaggctgctcactcccttgagaggtggggtctgtcccatccttgcaatggtttgctgagattttgggaggtgagtccccatgtgctcaccaatcttttcgtttctggaagtttggttttcgtagcaaaaaataataatgttactttctttagtgctactatagtagctacaccatttattagagtatggttttttttttttttatataaatagatgatattaattgaaattaatataataaaaattactattatattataaatatttttattatttttttttttaatactgtatggtataattattaggagaattacctcatttaatattttattaattttttttttcaaatttacgnnntgagtttctaaagtggttgcagtgctagttgcaataagggtttctatacgattttttgttgcaattcaggttgcagcgctagttgcaatatggatttttatgtagaatttagtaaaaatacaaaaaaaaaaatattttgaagtgtaaaatgaaaaagtgcctaattattaccgatttatcaaaataatattggtaaagtggaaataatttattttttactttataaaatatattcacaaacattttgtatttatatttatttagtatttatgttaagaaaatatatgaataaccatagattatcattttttctaatttcaggatttattattactatttaattttcactacgtcttgaatcacaccaactacccatttaagttgaatctaatattcagtgctaaaaggatcatgaacttctaatcttgaaaggtctttgtccaaaagaataaagattataatgttaaattacatattttaaataattgatatgttactttagagaaaataaatctatttctcttgttcttctcccatggcgaagaagcgacgggtgattcgaaagccaattcgattgattaagagcaccacgatgattgatattgttggaaaaaattgtgagaaactggaattagaggatggacaggaagatacaatggttcaagtaggggatagtggccgtttaaggcttgaaatgctataacaagcgataatggtggctgctgttgatgaagatcgatttgatagtgaactccctttgatctaggaagagaatccaattaagattcagtctgaggtgtttcacgacccctacgaggaattagaagtcaattttgcatcttagtctgttccaacccatatgagatttggaaagtctgctccaacccagatgttctttccctatgaagacattgaagctgagatttctcttggctaccccaatcgaaatctactacgagatgggtggaggaagtggacaattaggagagaaagtagattttcaagcttcaactggttatacatggagtaaattcaaaattaaccaggtttgtactccctaaactcaattagatttcactgaacctatgaatgttggggatagactcatggccaaattggacattgatgagaatgaatctgaagctgtctatggagttcatccatagttggtatagaccttggagccaatcctccatttcgtgtttttaaagggttcgtgaagaggatctggggaaacttaggcattgataattttttttgtatggactctatcttttcgttggttagttttagagatgtggttacaagggatattgtgctaggggttgttcactttgataagaagtcagtagttctttggccatggtcagttgacacgaatactgtgaatatggcccaatcattaccagtgtggattcgtttgaacggtttgaggcttcaatattggggtcaaaaaataatctgagtgccatggttagtaccataggcaagccaattatgattgataaggtgacgaatgacaggtctatggtaaagtttgctcgagtgcttgtagacatggaaatctcaaataatccacccaaaataatgtcatacatcaatcaaagaaacaatctaatggatcaaagtgttgaatatgagtggcttctcacaaagtgcactgcctgtgatcttttggcacacatggtggctaattgctccaaagataaaggactgttgtgggtcaaaaaacaaaagagtaatctgaatggtgaccatgaaaagggcagaagtgaagctagtgcagcagcttaggggaaaaaccaacaaattgtccgacttgagaaagataaagcaacaattcaggaagatgttataggagaagcaaagacaataaagtaagtccaaaaatagatacagaggcagcaagcagttcagttgtaaacatcaagaatgaagcaacaactagggagggtggagattggattactccaagaaggaagtgatctaagggaggtttgacgaatgtgaatttgattgccacaacaagcaatggttatgttgtgctccaaggggctgaggttaggaatttggatactaatttctccaccttgactcatggaacaaagtaacattttgggttggaacgttcgaggcatgaataaaaatagaaaacaaaaagctattttagatttgtgtaggcagaagaaaattggtttaggtgctctctttgagactaaacatagatatgattgaatttaggaagtcataaagaataattttcctagctgggaatatcattctagccctactgttgctagcagaattttgctaatttggcagaaatattttgttaaagttcaagtgcttagggaagatatccagttagtgcacagtagagtgaatatagctggccacaccacattctatttaataacaactattgtattaataaaaatcatgaaatcgataagtttggaattaaacctttccatttcttcaattactggatgcaacataagagcttcaaatttggaatgttggaaatggaacaacaacaagaataatctgaattgtcttattagcaaacttcttaggctgaaacatgtcctaaaaaagttttctagagctgaaatgggggatattactaacagctattacactgctaaggagaagttcaatttagctcaagacaaactgtccaataacccttcaaatactcagttgcagcaagatgagcaagaaaagtatggtgagttagtcatagcccagcgaaactactcaagctttattcaacagctgagtaaaataacatggcttcaatttggggatgacaactctcaatattttcttgcttgcttaaaaaaaggaagactgaaaataaaataacatcatttatcaaagatggtgagattattgatgattatgattgtcttgtccatcatttttgcagctttttaggcaacaaaagtgctgctaagaaggagatagatctggatttccttaattggggtcacaaattgagcattcagtagcaagtaaacatgataagacctttcacaaagaaagatgtcaaggctgctttgtttcatatatattctttgaaaagcgcaggaccagatgggtttgggtcgtgattctttaaagatttatggaatgagataggagatgagataacggaggcaattttcaatttttttcatgatgggaagctgcctagtgacctcaatgaaatggttatctctcttatacctaagaaaggtaatcaggaaaaagctgctgattataggcccatttcttattgtaataccttatacaaatgaatttccaaaatgctttgttctcgtcttttagatgtgctcccttcgctaatccacaacaactaaggagtgtttatcaaagacacattactggctcataatatcttgatttttcaagacattcttaagggtatacaagaaaaaaaatatctttgcaaggtgcttcctcaaaatatacctttgtaaagcttatgacacgttggattggcgctttgttttggatttacttaagggtttttgtcttccagcgcaattcattagctgggttctggattgtttaaagggtacttcttactcgctcatgatcaatggcatgcttcatggaacgtttaaaggagagaaaggtcttcgccaaggtgaccctatatctcctttgctcttttttttttctttattatggaatatctaacttggctgctcctccaagcttcagagactaaaggctttggctttcgtcctctatgtaaagatgtgaagctaaccattaatctttgcttcgctgatgactttattatcttttgcaaaggcaatatcgattttgtccaaattattaatcaaactattattaggttttgtgtagcaataggtctggctataaacaagaacaagtctcaagcctattttaatggtatcaaggaggattacaagactcttctcttagacttgatcaagatggaagaaggattgtttcccctaaatatttaggggttcacttgagaccaacaaaatggaaagtagctaactgtggtgagattctaaataggatccagaggaggcttcataagtgggcgagtagaaacctctcttttgctcggagagctcagcttattcattcagttttactgggtattagaaacttttggatgagtatattttttctccctcaaaaatttgttgcaaccattgataaatactggagggacattccatggggtatgaaggggaatcgtagcgaacttcatcttgtttcttgagaaaagtttgtcttcccaagagttatggcggtattgtgttttatgaagggagaaaaaggaacacttcattgatggctaagtttatttaggctgcctccagtaaaaaagacattttgtgggttaagtggatcaattcggtctatttgaagggtaaagatttctagcaggcttcgtttaaattggacgccagttggtacttccgaaaactcttgaaacttagagaaaaaattgtcaaagaggatgtttatgctattgttccgaagggtaagtttaaagctaaaattttctctacttactaattgctgctaataaagtagattatgctaataatatttggcatagaatgtgtgttcccaaacaccatttcattgcttggcaagcgttgaactaccaacttttgacccgggcaacttgtccaaaatcattgtgctcccctcgagcaactgttccgtgtgtgatgctaaacccgaaacacctaacacctcttctttgtgtgtcaattcacataaaagttgcttctgagaataaaatgtggttcagccagttcatgtggcctgccattttggaggattggagttgccggtgaaataagaatcaacatgatttaatgtccacaattaataatgctataatttctgtcttgatttactatgagtggtgtaattgtaatcaatggttatttgaattagcttgttattccctcaagatggttagtttatccattcaactaggcattaaagctagaacaagaaagttaaatccttgtaattttaaaaatagggacaaaagcacttggaatgtaatatgtaacttgtaattcttgtttcgttaggggtgcactgcctatttttcagctgccttttgtttgtattttgccttgcattaaatgaattcatcctcctttcaaaaaataaataaataaaataaataaaaaataaatcgattttaagactaaatgtttctaatcaatagatataatatatatatgattaattagtggattagtgaatacatagtgtaggaaatttagctctgatacataggaattaactgctgtaattccagcatcaagatcacacttaaacaaacaaaagttaaatcaaaacaaacaaatcaagaacaaaaaaccagcaaacacattaaaccagaaaaatataacaacagatgaatctaaatggctatcagacacaataacacagagatttatagtggttctgatcttatgttaaatgtgaacttggtcatactccagtttgaaatcattatcaccaatctttattaataatgggaataagagatatcaatctcaggagctacaaggaaataatcacagcaagtcacccatggtgtaatccctcaacacacattaactcactaacnnnagccaacataatcaacaatgtttctcaatacaatttcacaatcccagctttctatctcccagatatctctctccatttctcactctactgtactgtgtctctctacttctttatcttgtgtttgacttgttcttctccctttgaaatgagatgagtagttcactttatataggccaagggacctaatatgcaagttttcctttttgatagttaatttagttaaagactaactaactaaatgattcttggttgttgggggtttaaggaataataccacaaattctgccttatttcatcaaggcctaagaagctaagcatatcggtctaatggaggtaataatgctttcatgtgtagctacttagcaactaaggttgagtaagtccaagcaatgcttgaacttactaacatgtaacaccttagtgccaatatcagcagggttttcatctaacttcactttctccaacttgattacttcttattctatcttctttcttattgaaaacaaccaaatatcaatgtgttttgtcttctcgtggtacactggattcttgcacaaatgaattgacgattggttgtcagaatatacccttgcctttccaactagaagcttcaactacttcaaaattcattgtagccatattgcttctttgaatgcctctgtggtcaccatgaattctagctctgtagttggcagtgctactatggattggagctgtgatttccatataatacaatttccattagtttgaaacacataagatgtagtagacctcctagtatccttgctcgatgcataatcatcatccacatatcctttcaatgttactttctgtgaaactctctggtaagacaatccaatatctgatgtccctctcaaatatcttagtaaccatttgagtgccctccaatggtttatcccaggatttgacatgaacctactcaatatgcttaaagcatgagcaatgtcaggtcttgtgctaaccat

SEQ ID NO: 15735 - DNA, 3716 bp, Cannabis sativa
  modified_base (3674)..(3681): a, c, t, g, unknown or other
tatagaaccatgaatagatcatagattccatagtcattactaaggaacttacatgcgtggaagtagctctttgatggcaccaattttgcaaaaccaattatagcaagtttctttggcctcagagcaaatatcacttgtttcaaagttttctaacataaatcacaaagaagttttagaaagagggaacaaaaaaagaagcacaaaacagttacacagtaatggagccaacgttcttgtcaaaacctaaaaattataaatgaaacaatggtgagaaaaggaaaaacaagacaaggaggaaagaagtgtagaagatatgagcatgaagacaatcacttcatcttttccgtaatgtcataagataggacacaaattaattacagggtattatagttttattttatttttattttgaagcatttgctacataagctgaaacacaacacaatgaagaagtgtaatctataggttgatcattgtttttaaatgtatagcagagtgcctacaaatgatagtgttctaagtcagtgaaaacctatttgttagtcaagaagtaacactatccaagcatgaggataagatttgcaaattgaaatgaagctaagatctcacaagcactgattagtttgagcacatgcataaggatgaacgtgagaaacaaaatacatgacctatctctaattgtctgtatactaaactatcaaaggctacactaacttggctagagaaagacaaacagctgacaagaacaagtccaaatagaacaaacagctgacgagaacaagtccaaatagaaagacctggtagagagtataatttggttccatcttctgaaaattcagcttttcgcttgatgcgctcccacactaaatccccaagcatgtccataatttctgtagcaagaacaaatacagtaccataaaattgtgatactgatgtatccgacaagagcctagcaacctgcaaagccaagaaatggttccaaatataattaacacgtacacataggaggttatcattgctaaacttgatgttcctagaaagaaattgaagtttcgtgagtaatctcatgcatctatgctcaaactaaatcttagtgaagaaaacaaataaacttaagtgcaccatatagatgaccagaactgatatcttcattgtatatttcaggagcctacttaaaggcattgttataaaacttcccacataaagcaacaaattcattagtttctatatagatagatatatatttatatatacaaaagatagaaactataattacgtattagatagaaataaaaaattacaaatgccaatatgataccatctcatattacagccaaagatgttaatctctgattaacaacttacttagtgttaatataaaaagttcacaaagaaacacaattttgcaaagtaacctttatagacaactttaaagatgtgacacgatcgccagcatgccaagcacggacaatctcatccttgagttcatgtagagaggagacatattcttgccgtgtaagagttctagccccctcttccatgaacttttgtgggtcttccaactcctccaaatgtttacttgtcgaagatttctcgaatgctgcaaaggggcactattaagtgactgcagcaggtataccttctctaaaataaggtttgtaaaaagaaaatttatggcacttattcttccaattgacaaaatgtaacttccaaagcagaagaaaggatagtgttaagagatagattggcatacttgtttcaccacctttaattattgcatcagacatctgcaattgaaggggaaaaagatgaaatactagacaattagtcgaagagattagacactattaaaaagctctagcaattttaagtacttcaaatttacaaataaatgtatgtatgtattaaaaaatgttctcaaagcttaagctacattgtaaattaattaagcttattattagcttgaagacacaaacagaacaaagaactattagactataagataaacacactgctcaaataaagaaaaggaaaaacgcttacagaagaaactgaaaccattttagagactggaaatctttgcatcaaaaatctcttgaaagagatccattctttatcagggttttgcatagaagcttcattagtaagtttaacagtagaattagtatcagattcttgtaaaacatccacagagactgctccattgtcatccaaagctctcaaaggatcgtagaagttgttgcttccattgtccacagcaacaatctacaaagattttcccaaacattgtcaataatttcaaattccttatttatgttatacatacatgatttcgatttctagatagcacaaaagcaataaaaaaagacatacaggtactcaagcaatactctctagcttggatgtgataattgatcatgtttaaatatatatatatatatatatattgtgagaaaatatgaaaattcagatatgaggacattttcacgacactatcttagcagaaaacagataattaatgttgaaaattgaagaatttttcagcaaggacctggagttgagactgagacgatggagctaatagaggatgaatgtcggtacgtgtacgatgtagcgcgtgggtgatacggtcggcggagtaatttcgaggtctgaactccatggaagcctcactctgctctgccacagctccgtatcttcttcttccttgtgcgctccgcaagaagaaaaagaaaaggttattttttttctctttgcatcaatgggatgttgagttttgcctccttaatttttgtttgttgcaaaaatatctcttattatagaaattattacaaatattctcctatagttgtattttgttcaattctcgtagatatagcattaatgaaaattaatctaacctacttcaaaagtctacaagatataaatgtataaatttgtgcattgagctactgcatatttaatagggaaatttcactattaatatctaataaaatatttcatatcaaaatttagaccctttcttctttttttttttttttttgtacaaactgattctattaattttaaaagtttcctaaaataaactttccctctctctgattttccctctctctctctttgtctttctctcttcacgaaccacgcgaccacgaaccaccgtcgacccaaccttctccaccaatctccagccgaccatgaaaccatcaaaacccacgaagagttttcatcttcgccgaccaccacgactgaatccatctctctctctgtcgctctcaaattcgacccaaacccacgaatcggcgaactgtcgacccaaacccaaaccacctcagtcaacccaccgtcgccactacgagcacgaaccgacaaagagacacatttctgtccaagaccacaaaaccaccacgaaccatcgccgccgccaccaagctcagtcaaaggtaaggtttttttttgaaaaaaaaaataattttttcatagatttggatgccaatttttgcatgttgttgagattagtggaatttttgtagattttgtgctctttctggtgataggttgtagatgttggatatgtttcaatggtgtctgtgttttttacagtgttatcgatgaaatatcgataagatatcgaaggtagatcaaattgtttgtgttgggaatattttaccagnnnnnnnntttactaacaaatatgttgaattaacatcctaaat

SEQ ID NO: 15736 - DNA, 1776 bp, Cannabis sativa
acttcttaaatattcaaatgttaaggatctgcgattagtagttcatcataatcagtaatttgtggctctttgttcttattattttccagttgctctaccatttcttctgccaccgatattttgcggtagtcaatgaagttgaacattatttcgccatcttccaacacattgtttctttcatagatggttgttgagtagttgactcttctattcttagtccattattaatcattggtactgttattgggtcttatgtttttaatgagactctcattgcaaatattgaagtgttgttagttactggtgtgttactgatcatgttcacacacaatggataactagggaaatcaggttctttcagtttcagttatatatagaaaaataggttggcatcgtcctttattcttaatgattggtaaccttgaatcacttggtattttagttacagttgagtattttcgtggttgcattccaggacttgattcaacttatgtacaagttctacatatttacaattctttgagtacaggattagcaaaagttttgatagtacatattttgtaagacaactattaaacaattaaaaaatactgaatttttacctaatttatgaagcatgtaattatatatatatatatatatttcaatttcataaaatttgataatacatatttaataagataactaatttagtagttgtcttactaaagatgtataatctaaatttcatgaaacacaattgtcaacaatgaccaatataagcgcaactctatcatggtaggttttttatatgttattgttggtttagttgacattgattactgtgtctttacatttgaatctttagataaaataatttgaaagttaaaactagtgttgaccagattaataatatttgattgtacaatttattaacaatatataattacatgcttcataggtgacaattttttattttccaattatttagtcgtttccttatgattttattaccaaaatttatgctaaactacattaacaaagtctaagttattttgtcattgtctaatagttatcttactaaatatgtagtattaaattttatgaaattgaaatatatatataatattattaacaaaatgaagaatcactattattaaaatgatcaacaacaatgtttagttttaagttaatttatgtaaatattcaactgtaaaaatacggtaaaccattgtcaactcaacaaataaaaatggtaaacgaatttaccatgatagagttgaatttatatgagctctttgttggatgttctatatgaaatacctatcaataataccaaaaatagtgcaaccaaatcagtgtatgagtattgctacaacagctttgcaatcatccataaaataaaaaaaaaagtaaacggtacgacgactatatgtcaacagtaatatctaaatacatagcagaatcaaggattagatataaataggttgccaatttattattgctatattagcaattcaaattgaataattccaacatataattttttttaaaaaaaataataacattaatacaacaatagaaattgagagattgtagtgacaagtatttttgatgatacatgatttggattgatcgagaaactcaagatcaaacctcttgtagatctacatttcgacaatctaaaaaattataatgtgattattaattttttagattttgcattagcataattttatctttgagtttcatgtttgaaactagttgtgcttttagaattcttgattgagcaattgc

SEQ ID NO: 15737 - DNA, 6610 bp, Cannabis sativa
  modified_base (6553)..(6553): a, c, t, g, unknown or other
aaattaatggagggtataaattttaatatgggatgttttattagggtcaaatagtgaaatttccctataaaaccccatacttatacaacaataaagtctactgagggcgaaaaataacttgcaacaaaatgagtttattagtgggataaaaaaatgattaagattttgtgtgaattaggaagaaataaatgatcaaacgaaaagatcatagaagaagaaaaataaacaaagtaacttttattattaggtaggttgtggacaactctctttcacctttatttatttatttattgaagtgccctttattaggcaagaaaaaatgtctatagataaacagaatcaagttttataactctagttagcaaaaaaaaaagagttttataactctaacctttcttaaatcagaagaataaaaatacaccaaccaaaataaaactaaaaatagtttataaaaagctccataattagtaatgcagtgaatgataaagtacttgtgaataattcttttagaaaaataaagaaaaaatatatttattatgtagaattcagggttcacactcacagaatgaaagcaagatgagtgatggaccctacaaaaattggttcttcaatcagaagatatcccttgagtcaaaattagaccatctcacatgatgatctatttgtgaagaatactgtagtgaatgccaagatatccttagttgtaaaacttgtaagtaaataaataaatttaaaattccaaaatacactaatgaattttcaattttgaccttgtaattttcttagtgggaccataccaattctgtccacacttacccctcaaatctgtctttttgtagactgcatttgctgccccatatttacgaccctctctcacaggccctataaagattagtctatatatgagcctcaaattactaaatagagagagagagagagtttacagtcttcatggcaaaagacctaagaattttatttaatttaatttataaatactaatgctgaagtagatagaggtggggtcttactaaagatgatgttttattcttttcttttcttttcttttttttttttttttctatttgtttaataagaaagcatcagtttagcttaaaaagcaaaagagaaagcaaaagttgaaaattcacagattccagagctcttctctctctctctcttatttctctctctaagtgctgctggttgatggcatatacccacaatgccaacaagaagacaaagcagagcccacctaacaaacccacaaaaagaaaaacgctctcacattattaaaaactatccatttttattttattttattttttttttgaaaaaagcatgattgagataaatagtaaacaattaaatctccccctcattacataaaatgttaatagaaatggtagaaaacaaaataaaaaaccaaacctatgttaggaaaacacttactttattacattatgggttacaaaattacaagttctactaatattaaagaaaatacaactactaaataagggaaaataactattacaaaatgagacatagtttttaattgtccagtaagactcctttccattaagaggattgataactatcatcgagtcgctctctacaataacaaactcagagctgatgtccctagcaatcgaaagagccagacgacaaggagttacttcgctgcataacacatccgaaaagtttaactgagaggtttgattccaaatcaccacacccagatggtttctttaaccaaaacagatttaaaaaatccaatttttatattcagcttaaatccaaaaactaaaatccaaacttgttcgatattctaggctcactctctccctcaaactcaaatgctaaattcactagttttttttttttttttttgatagtttcataaaaaataaaaaaaataataaaaatactgttggtatggcatttttaatatttttataatttttcaaattttatttatataaaagatttttttttaaaaaaaattatatttgtattttcatattgttaatattttattatttgtatattattttttatatttttttgttgttatgttttttatatttttataaaataacgcaaaaatatatataaaaaaaaaaattaaattaaaaatttgaaaattttataaaaattaatattgtatgtaattattttttttatctctctcgctctctctcttaacttaatcacatatttattccattattattcatatctaaaaagtcacaaacttgttcccaaacttttaacctctctctctctccatttttagagaagagggagaaccaaagactaccatgcctgttcttacagacacttcaacaatggcagagcacgtcaaattgagaagacccagaagacaatttggccaacttatttcagaaacagatccacacccacatgaaatcccatccattattcaatccactcgctgcaaatccactatttcttctctccttctctctactttctcgaccaataacaacaacaccaataacccaaatgaaaccatacccttgaaccttcacaacaagaagaaaaataacttcacttcttcgaacttcagaggactaggatgcacagcagggtcctcacagcaagtctctgtacctgcagtgattcgtagctcggcggattggcaagggaagaaggtgaagaagaaaaagcagaagaggaatggtaataatggtaatagtaacaacaataataatggcagcaaagagagtggaaaggacagaagtgcccttcaccagggtctcgtggatgggtccaattctgtattcaattcggctagttgtgtggattttcaagatgtttggtgtggtcctggaattgggttctcggccgatgcctcggttgactgtgttgtggccaggagaaatgtttctggaagaggtaagattgatggagataagatgaccagcggccatagagatagagaggtaaagcttatatatgatttctctcatttatgtttatattttgtgtctcatgcctttgtaaggcttcagacttcatgtgcttttgttttgaaattttgttagctcgttgttgagtttgtttatcagtgcctgatctgaatatactgtttacgaattactctcaaaccttgatcggggtatttcttttcattattattattattattctttcggctccgggtccgtgtgaactttgatagcctttaaaccatttttatacacataatatatatacaattatacatatattttaaatgctctatgtttcgagtcgtttatggctcattatatattggtttggtcttttggggttcttttggcgtttgttttatgctgtttaatatggggtttgttcgttttctgtgggggtatattttagttacccaaaatatatttcaatcggttaatgcgtgcacatttaaacttttgattagttattatcgtaaaacaaattctcggttgaattaatggctttggttatctaataatcctcttcctattttaaggagggagtaagtttgtggaaggtgagatgggagtagttatgataagcttagtgtgatcttcagcctaaaggattttttatattatattattttcatgaaaaacagtaaaataaaaaaccttcttggtaatcaaaggatttgtctgttttaagtgtcataaatattcataatcaattaaagattagtctaaataggattagtctgtttaagtgtcataattcataatcaattaaagattagtctaaataggattagtctctttgtctacctttcaggctcattgtacaagtgtaaactctttcttgctatttaataaacaaaagtgtgagctctatttgcatccctttttctatgtcagttgatattcattttgttaattcattttattacttctttcttgttcataaaaaaatcgatcttgttgcagcgttcttgtacagcaaggcgaactgtcactcctgaaccttcattttttgattctgaacctgacttcttgttggaacgccccgggtcagaggttttcggagcaagatattttcgccatgttcgacatccttcccctgaaggtcttgctgaggtactttacttgtctagttgttctgtttttgtttataaccctttcttatccactttgctatttcacataactctcatgtttaatcaactgaaaattttgacttattctcatccatatttgtctggataaatttagttatactctgttattttaacttttaaggatgctagtagtagtggagaaaatattaatgaaatcctgcaaaattttgacggagggatgcctgttgtaagattcattgctcctctgtaatcattggtggcatcatctcatcattaacatggacttgtataattatttgtatgttatcttatgacccacgagagttacgtttgtgtggttagatccatagctcgtttccttataggtttaaattcctgacggggacttgtctagcaatatgctagagtttcatgatttgaagaaattgctggttatctttgacagaaatataattctctccaaaaatgatcttttccattttcagtttatttgcggatgacctgattgagaaataggttgtgataccacttcttaaagaaaacacactctttttttaattctgagggtaagaaagtagacttaggacataaattagtgaattaatagcacaacacaagtttgggtcatttgaaaggagatgatgatatatcttcagaaaaaagtggagattatttcattttttttattattaactggcagtgtttattgatgaaggacataagcttaaaatttctcagttttagtcaagtaaacatattctgtggcattgaagaagaatttagtttcccaacttgctgattatctgttcaaaataaacactcagttggacaaatgtatgatttcatgatgcagtttaacttccatctcattctcatgcaagatagcttaattcaataggttgtaacgaatacaaagctctatcatttaaaactatgcatgctaggattcaaataatatgcaaggacgtcttccttggtgaagttgtttatatagttgttgatcttcattccatgattttggtcttcctttcatgatcgctatcggttataactcgtttcactataacagtatgaccacatggaatgtcagcattttatttttcctggttagatgaaaggttgttaataataaaattcaatttgctgtcagttgaaacttttatttgacattatttttctaacaaatttaatatgattatatgctcaaaaatacatcatgattcatgtatatactggctgggtgcagataatgatgctccacagtggtctgctaatgggtaacagagtagacatacacgatcggtttagggaaatgagacttgatgttgatcacatgtcttatgaggtattgttaattatgagtttttttttttctcgaatgagttgttcaataatattttcgtctaatgctaatttgaatttcatatgttcttttggtttggtgttaaaacaggaactccttgatctgggtgaaagaattggttatgtgaatactggactaaaagaagaggaaataggtcgttgtctaaggaaaatcaagctctcgatttcaaatgattggtcacgtttgcctgtgcaagcagataagaagtgcagcatatgtcaggtaagctttcttactaaactctccagagctcttaattggttcaatatgtttttcgtttatgtttgtgtatctatgtaacatgcttgtgtgtgtacaggaggaatttgaaacagatgatgacatgggtaagctggactgtggacacggttttcatacagaatgcataagacattggctttcccataaaaatacttgccctgtttgcaaagcggaggcagtggctcgatcctagggttgggtgggagctttttcatcaccttgttgcttttctttttgtcccacaacatagtgtataggtttcatttcacccaagcaatacaagaacaagtattcattcttttgtttgatgctttcccttcctattttccttattttggtatgatgagccttatctataatttggcaatatcttcttgtttcactattttatttgtgccttctgcagccctcaacgaattcccaggccagggttttgaatgtgaaatgcttgtttttaaaatataaattcttttttcaattgaaatctactaccacggtgaagttattgaatgcataaatgtttgaaaagcttttgctgtgtcagatcttgtcttgagactcttaactaatgtatgcataaacatgtttgattatgacattcaagttggagttcgtcgttcattctttggaccaaggaactaaaatgtgtaacctattagaccacatgagtaaacaaaacgccaatttattattatttgagtcggtataaccttaaatataaatatctattaacccccaaatctcaaatgttagtggaaacattttcaaaactcgtattttattagcaatttagagtatgtttggtattgttttctgtnttttgttttcaaaaaattgttttagaaatgagaacaaaaaataatttttaaagtttt

SEQ ID NO: 15738 - DNA, 5624 bp, Cannabis sativa
  modified_base (1642)..(1646): a, c, t, g, unknown or other
aggtcagttcctaggccaggtggcttcatccatggctctaaccctccatacggaatgactttttttcaccatccaacaaatcgatactcagatggacggttggtgattgactttgtggcacaatcactatcattgccttacttgcctccttataaatatgttaagggaaattcacctaacggggtcaactttgctgtagctggttctactgctgtagaccatgaattttttgttaagaacaatcttactcttgatatcaccccccagtctattcagactcagcttctttggtttgataagtacttggaagaaaatgttgggtgtaaagctcaggatgtaaaatgtagaattgctgacatcgatgattcattgttttgggttggtgagattggtgcaaatgattatgcttacacttttggatccaatttttctagtgatactattcgaaagttagtgatgaatagctatactcaatttttaactgtaagatttacttgatttacttttcaccattattaaagcttcacaatctatatgttttcaaaatcttaatgctctttttatttgatgtataacatactgatttctacagacattgttaaagaaaggtgcaaagtatgttgtggttcaaggctttccaatgacaggatgcttacctttgactatggaattatcctccaaaaatgatagagacaacataggttgtgtaaagagtgtaaacaaccaaagttatactcacaacatagccatcttaaacttggtgacatctttgagaagacaattcccccaagctgtcatagcgtacgccgattattggactgcctaccaaacagtcatgcaaagtccagccaagttcgacattaaggagtctttcaaagcttgttgtggttctggtgatgaaccatataacgttaatgtattttctttctgtgggacaccttctaccaaagcctgtcaaaacccatctcagtatttgaattgggatggacttcacctcactgaagctatgtataaagtggtctctgatatgttcctaaaaggatcatttatgaacccttcttttagttacttgatagatagaaaactacaccaaaaataaaaaaaaaaatatttatgatcattatattgtattaagtatgtgtcattcatgatacaaattaacatagatataatccatttcttacttcattaattggaaattaatgtgaaaattttagtctttgaaaagaaaagaaatttattcatattccacaaacttattttttatgtgtgtactcttttgtttaactcatgtacaagatctgattactcagagcgggtagaacccctaattcgatggagtagtgctgatccaaagtaatcagatttctttttagatattggattagacccgactcacactctaataatatttgttctagatcgatgctgacctgcaaacacatagacaaataaatataacatttaaatgcaaaaatggaggacttgaaatttgtactaagtatggaatatttgtctcgtattatgaagaaagtgagacatttagaggactttaagtttcacggaagatgttagcattaaacactaaaaaaaacagctacttttagtgacaacttgttagtcacaacataaattttttgtnnnnnaatgtgacttttagttacaacaaaaagtttgcgactaaaatgtagtatttagacacaagttgtcactaatattgttttaatcacaacaaatattgtgactaaaaacacatttagtcacaacaatttgtgatttttgtgactgatacttttagccatggattttttagtcacaacataagaatagtgatttgtaattagtcgcaattattttacttttagtaacaaattaattttgttatgactaaaaataagattttgtgtagtggaaacttcaagtcaatttactatttgtttcaagccttgaagttgtttttccaatcttcaagtttattcccaaatgaggcaaaattggctatctattgtaatgacatgccagagcaggaggtccaaagagttgtgttggcttctggttttcaaaaaagttctatgtcgtttaagtatcttggagttcgaatttgttcaactagaatctcggtaaaggaatgtgaggttctagtggataaaatggtgggtcgaataagaaggtggagcacaaagaatctctattttgcgggaagaattacattgataaattcaatgctcatgtcaatacgtacatattggagccaattttttctgattcctaaaaggatcttgaaatcaatcattgcgatatgtagatccttcttgtgcggcagggtcaatcttttgatactaatgcagaaaatattacatggaaatcaatgtgcaaaacaaaaaaggcatgtgatcttggattttgaaacattgtagcttggaacaaagcagccatgagaaaatatgtttgggccataccttttaaaaaagatgatctatggataaaatgggttcataatatttatatactggaggaaaattggtgggattattctgcttcaatgcagagtagttgttattggaggaagatcgtggtggttaaggatgtattttgtgatttaatggcaaagcagaagctccaagtaaaacattatcacattcgagaaggctatcaattattatgtccagaaaattatcgagttcgatggagcaatgaggtatgggtgggcttattttggagttgggatgggttatttttcagattatgggtgggttttagaagtcaggaggctgttttggtctgatggaggaagagagggtatgagaaataagaagaagaagaaatgggaagatgcagagcaagttagggtttttaaaagggggaacattgtcacaacattttcgtgcctcttaaactacaaaatcgtgcccagtatcttcaactggcatagagttttaggaccgacgtggtcgtgcccatctgtaatggagggaaatttctcgtctgtattaatgtccactttttgaaacttttggggcacgacatttttgtgcccactgattgtagtgtcacgcccaactgccacaaaaattcaaaaaaaaaataataatggcacgacagtaagggtgttgggtccaaaaatattctatgattagcaccactttaggtcgtgcctacttgggcgtgcctatatgctattattgttgtagtgataaccataacaaaccccaattctcttcaagaaaatttatgcatttggtgactcttttactgacacaggaaacactaggtcgggcactgggccaagtggctttaaccatggctctatatggaattaccttctttcaacatccaaggaaccgtactcagatggatacgattggtgattgacttcgtggcacaatcactgccgttaccttacttgcccccttataaaaatgttaaaaggaaattcacctaatgaggtcaactttgctgtggctggttccactgctatagaccatgagttctttgttaagaacaaccttactctcaatgtcactcctgagtctatatgaaacttaacttctttggttcgataagtatttggaggaaaatgttgggtgtaaaactcaagataggaattgcataggtgctaattttgatgatactttgtttcgggtcggtgagattagtgtcaatgactttttcaaaaaaaaagattagtgtcaatgactgtgttaaaagaaaatatgggaatggcgtagattagatagaaggatagagcgccccagacgtagctgaaaggtgaaccgggttacaagtcacgagtaattagtgaaattaaatagatctattgaattatattactttgcaaacttgtgtacataaaatttagaatgtcattttgcatagaattatcaaaaccatataatgatggatacaatcaatatctcttaaatttctagagctagtgaattgatattcatttcccatttgaatgtgaagtaatagtgattcattatggtaattctaatcgggcattctcacaagattcaagatccttaagctagtcgtaataactttattgtgaaccatttcaatactgtctactgcttatatgtattcaaaatcttactactcttaccgaatgtattactaattaatttctgcattcactcttaaataaaggtgcaaaatatgttgtggttcaaggctttccaatgttagggtgtttgcctttagctatgacattagcttcccaagatgatagggataacataggttgtgtgaagagtgtgaataaccaaagttacactcacagcctagccatcctaaacttggtaaaatctgtcagaagacagttcccccaagctctcaaagcctgttgtggcgtcggtgaaccctataactttgacgtattttctgtttgtgggataagattgtccaaaaccgtctcaatatgtcaattgggataaagttcacctcactgaaaccatgtataaggcggtatttgatatgttccttaaaggatcacttatggaccctcattttagttacttgttaggtagaaaactacaccaaggataaaattatagcaattatattgtattagcactatggagtactactctcattacaaatcagttttcaaatagaaccttatttttttaaccaaacctccactctatactatgcaacattttcttctattgtctaaactattcttgtaaatactctttaacttattttcctttttttacattagctttcaaaagattccttaatttttttatttttttttttaatttgaatttgaattgagttttcattcatattatcatttgtcaaagtgactaataatgttatttcctttacacgtacagcttgtccgaaatcacagttgaatttaaacatgacttcatttccttgaaataaagtattctttgggttaataaatattgcagactatatcttctcatctatggaggctaaatttcttctcatacacctacttaaagaaaaaaccattttcataacacttttattcatatatgggggtacaaacattaaatatatgcatagcatctgcacacctgcataattcactatgctaaaagatcaatgttgttatatatatattatgaaatatactaatattgctgtaccatttatgtatgcaaattgcaaagtcagaaagttggttgtaacccttataaagtgtgaagaagccctattaagtgatttgatatgaaaagtcaaaagaagaagaaaaatcataaaaaccccaagtcttcaatattataacttaataaattgagagagacataaacaaacatcatcattattagtaaggggttaaacccaaatgggacaagtcttccaactgttccaaaaaaatgcattgttggttttttccttccataactagaaaaaagaaaaaaaaagaaaaaaaaaaagaaaagaaagatagaacatatagtattctccacttctatacttataagaatgaaaaataataaaggtgtcaagaggtggcatacctttttagtgcaatttaatattaggcttacacattttaatttaataaataatataaaatactactaacaactcacaacgtgtcgcatctgtatggtattaggaattttaaggtgctagca

SEQ ID NO: 15739 - DNA, 6953 bp, Cannabis sativa
  modified_base (2482)..(2482): a, c, t, g, unknown or other
tgctaaccacgtgtattttcagaaaaaataaaaacaaatataatttacaatttagattaaattgatatataataatagataattacctaaattaaaacgtcaaagaaagaacaatttttttttgaggggaatcaaagaacaaattaaaaaagttttgaagactatttgtgacaaaaaccatgatttaaataacacggcttacatatcaaaatagtttatggcacgtaatccaataaatttaaatatttatatttttcttgaagaaaaaggagtgaaagagatgtctaagcttatttatttacgaaagataataaaatcttttgtttttaatttttaaaagtaaaaggaaagatccaagatgtcgtttaaaagaaaaagaaacagaacgattgaattaaaatataataaagtcaattttggtagtcgagtggaagagggagacacacgtgtcatgtatggtcccaccaaagggtaatgggaaggacacaagtgtccaaaacataaaaatatcagccagataggagagctctcacacagacagagatgcccctctccgcctgtcaccattttcccatcaccctccactgactccttacgcacgtccttctcttcttttcttctctatctatccactctcttctctctctcactaaactacaaaaatcttattttgtttatttcaatccaaattaaaagtaaatgttagaaggtattttttttagtaatgaaaataaggtaaaaaaacgagaaacatgatagatatgtattaatacgaattgggggatatagtctctttctattttattcttgctttttattttttgtttctgaagtatctctttttcattttaatgtgaatatttatgtaatgtatcttaaatattaataaagtcgcctgtattacatattacaagaattttattgatgcacgacaaattatataagaactataaatacattaattacttctttttttggcaatcccaacagtttctatctcacacaaatctcacatttttctttatattttatctcacataattatattactccatataatatttttatattttgttttctatcatttagatattatatttttatgtatactttattaattaaaataaataaaaaacaaaaaagaataatgaaataattaaaaagaatataatatgtttaattcaccactattcattgaactattagaagtgtaatttcactaaattttttaaaatttgagctaaggagctcttttagttattggaaatgctcagaaagatgtatcactattagagctaatttaagacaagctagcaatattataaaatgccccaaataaaaaactttaaaccttatacgcaaaatttagtcagactgatatatagtcttttaatcaatttagctccacacatttttattgtatatgtgcccttaaagagattaaaagtctcattagcataattactaattagtaagagatgaaagagggcaaccggatgccacagcgaccccactaaattttctttctttttttttttttttgacatgaccactaaattttctttagtacatgtaaaattacttgattctcatcttgtccctattataaaagatgaatcatcactttcattatattaaaccattgtttttctattttactcaactccactccaatcctaaaagtgtcgtggctcggcgactgtgcattgtaagaatatgtactcagtccaataagtatttatatacgtatatatacatgtattaataatatataaataagtatttattgtggacaaaaaaagaaccaatgagatggtagatcacgtggcatgtagggagtagaaaatgtggaggtcgggggagtgggcccaacgcacgatggggattccacgagcgtttgcttggtgttggtggattggacgctgtcttgatggcgatgctttgtttgacgacgccagctatgtcattttagtctcctctttcatttacagccctacacgtgttcaccatccgcaacactactcctctcgtggggtctttacgtagtcggcaccaaatctaacacttcatataaagtaactcttccttccatttcattggttcacttgcccttctattactggtcttctattatttacctctaaacttaaatattttcctttatttctgtgtcaactctagtgaaattaaaaaaaaaaaaaaaacataaactgacgtgaaaagcattattgatgaactctttgtgcgaatataaacatagataagttgacattttcaagaaaattaataaacaccaacaaaccttattatatagttctatcaagttatttagttatatttggtaagaaaagtgctaatatgtgattatgtattagcactggcgccactgccttgttttacacaatttttttatttttaatatataaatatttttcttagcaaaataatacatgaaaatattaacttattattattattattnttattattattattattaaagaaacataaagctggtgctactagatccgtatagtataatgattttacttacttttactaaattactatcatgtactcatttatataccaatgtgagaagtatgaactatcagattattacaaaaaatatattaaggttttactatcagtagtgataatattaataactaataaattgaccactatgtaccaattcttaactaaggttttactttttgtaagtagaactgtgacaaatcagtattgtgtgatattgaatatattgaagaagtattataaagtttaaaaagtagaggttaatatatactattagtgtggttacatttcgtccatatatttcattaattggaactctcaaattagtatttttttaaataattatctaattagtggccacactttgcccatctcattgaataaaaacgagcttgtggcacgcgtgaaagagagatacaaagaagttaagaaatgcttttgtataaaatttgatgagcagtcacacttgatgatgccatttcaatcaaatacataggaaagaaatggaagcaaaccattttgaccaagtaaagactatattttaatttacttggaatagctccaaaatttggttgataaaaaatacacaatttttttagcatttttcatttgcatttttgtgctttcttgtatgaaattgccaaaattagtggtttttttcttctttctcaccaattgaggaataggaattttggaaaatgataaagttattatatggatatggacaaatctctcaattcatttattaggtagatgaaaattgcactttttttaaaagcaaattacaaatgcagaccttttactaaggatcactatcattattcttctgtaagcaatattacccctttcagtaaataaattgtgtaaataataatgaaaaaaggatattatgagttgataatacaatatatgaagtttgagtttacttctcctgttatccaacatggtcttttggctaaagattgaaatcctcaagcaaagataagcagaagaatatcacaatcatttcaaggtcataattctgctatgtctataaggtgggtcttactatatgtctcttgatgtgattctttgtacacacacacacatatttgttggcccctcttaaaaaaaaattcttgtcaacattctttgaatctcaaaacgctaagaatggttcatatttatggagggctcccttgaaaaagcttccacttttagtcttaaagagaagaaaaagaatgagtaataaaatggtaatggccctgtgtatgcatgtttagaggggggcaactacataaatttttctctttttgaacagtaattccaaagaaaaaataaagtgatttttgccgagtcacattgaaattgacccccacaaacatgaaagaaagaaagcataatttgccaaaatgcttcaacaatctccactatgaaggaactgagaaagtttctttacacttctccacaaatcttaaagtcaactttaattttttgtgtgtgcaaatcttgagctaatattcattaatgccttggtagctagttcttactgcatgtggttactattcaagaaagaaacaacatatggtagcttcacaaaacttgattcaccaacttaaaggagtaaacatttttcctcatttattattgaattggaaggaaatagtggcattcttatacaattgcatcaacaataaacaacagagcattagtaaataaacaagcaaacagaaaatattacagaatggggggaaaaccatcatctttgtatatgcaggccataactcaaacatattaagatcagttcgttatttatgacattttattggtagaaatatatatagctattaacatggttttttaaacaagacataaaccccagaaattgaaaagacaagacaaaaatatttaccaaaagactaaaaaaaaaaaagaaaagaaaagcttagaaagaccatgaccaaaaggcagggtcctcaacagggtatccaaaattgcatgaagtttcaggcgggtcggagtaatcaacatcttccaactttgggaagatgtatgaagaagaagaagaaggcaggaaggtcctgttgatgaagtgattatcttcttcatcctgggaaaggtcagactggtcagcctcaaatacatatgaggaatcccttgcaggctccataagtggatttgaatgaaccccatcagcgaaacaacgtgggctatctgaatcgaatatatcactcctgaccgagctaatatcttctagttgttgacacaccactgttgttgaagcttttgatatctcaccctccgatgctgattctcctattattggcttctccactagctcttcttgatcacacaatttgttggaatcatcacacacttctgagttactactctctttctctttctctcttttcagcaactcatctgacagaagttgaacctgatacatcaaaaaagaaaaatgttatgacaagattttattttattttaaacttgaaaactatattcaattgccaaaagggtagtgaaatttgacctcagtttttagcttatcagtctccttgcggaggctttcataatcagccttgaggctattatagcttgcttgtagaacatcgtaatctttctccatttgctttgttttccacctggctcggcggttttgaaaccatatggccacctgcctaggctgcaacccaaggtccttagcaagttggacttttctttctggttcgagcttgttttcaacctcgaaacttttctccagaaactggacttgatccactgagagcctccttttctttccgggttgatgaaaatactcatcgaagtcatcatcaattccgatttcatcacagccaaatgaccggtaaaacgacttgttcgatccatttgtaccattaacatcttcaaaactcatcatggatcttgatcctgaacaaaaaccatatacgtgttgttcgtttaagcttaattgtacaagttgggaatttcattaggaagagcaagaacacaaacatattggaaaacagagtaatatgataaaagaaaacatcagaaacatattaaagaaaaaaactgcatgtaaccatggaagagtaagagaaaactatcttacctaaaaaagaaggagaagaagaggaattgcaagacccagagaggaaaagagaatcaagaggctcagtagcagaagaacccctttgattctgaagcaaaacactaagactggaagatccagtactgcctccataaactctcccacccgccatatttgttcaaactcacaaattaacttcacttcttttgtttgctctttaaggatttaaaatatattgtaatttttgtttttgcttaaacaaccatgtatgtaaggctttcttctgggtgttggtttgaggtaatttctatagcttgtggcgaaagaagctggttatgatgatttcagtgatgtgagaagtatgagaacaacggcagctcgtacccatcgctcagaagaagaagaaaccaaaagggtatatctttagagagtttcagaagatgatgatatgaagaaaacgaagtgggactgtgtttctgagaattgataaatagaaagatgagtagagagagaaagagactgtgtctgcgtgtgatttttctctcgggaaagacgacttggatggagattattatagtaataagcttgggtgaggtgttgattctcaagttactgtcatgcccttgttgtacagtactatttttatttttttctcttttaaatttattttttaaaaaaaatgaaacaaaccgtaaaaactgactaaatcacaattcaacccagtaatcatttcgttattaaattatatgatttaacttccaagtgtggttttgcttataatctcttgatcctctcctaaacacgtgtcacacaagtcataaatagcaagttataactttaagtatctgatgaaacctggattaggactcgaaggttatccaacactaaaatgtttaccaccatatatcaatgaatgtgagactctaataccctcttttgtgtgtgggtgggtccactctcatattattaccagccaattgtggcttgttagtgaaggattactttcactctaataagtgaatcaagtatatatcatagaacatttatgcttacattatggaaaaattaatcccttaaacatatatacctaatatctctagaataggtcaataaatatattatctccaaaatacttttcccatttacattactctttttctgtctcaccaaataaacaaataagttatctcctctcttctcttcatccgacattcaaaaacccacaaaaaaaaaaaaaaaaatactacattcatttctcttcgctcattctcttcacttttttttcattacactacattctttcactccttttttggacgaagcattatacacaacttca

SEQ ID NO: 15740 - DNA, 16944 bp, Cannabis sativa
  modified_base (1643)..(1644): a, c, t, g, unknown or other
tggacagctacttgggtctttaaaactaaacattttgaggacctatcttttttagatttgtgtagagaatggaattcatttgtatagggccagtatgtggatgtatttacttcttattcttctgaggcagagtgggggaataaccttgccttagaatttttgttattatttgtaattatggtttttcttccaccataagggagacttttaatatatatcggggaggatcctgtcaatgacataaggatctcttctcctttttcaaaaagacaagatggatatcccaggtgtgaacagaatagtatcttatgtccaatggaactagggcaaccataagaaagacataaagatagattgtagaggctcctgtctcctagattggtgtagaaggacttcttctgaatatttggaatatgacaacttctaggaaaatcggagcatccaagaacttgacttgtggggtttatacagttcacatcaatagggtatttaaaagaatttatgacaatatatttttaaataccctcagacgttttattttgtggagcctagggtttacatgtggagacccatggaatattcaaaggattccacatggcagcaatctacatcgacaaaaatgaaaattagtttttatttgacccattttgaatgggccttgaaagcgacaaggaattattcaaggcatttattaatggtgatttttttaaaaaatatccctaaaggagagagcagatttcacgaaagcaataatactttcttggctagatttaatcgggtgaaaagaaaaaagtgttcattccttatcaaggaagtcgcaagctctattcaggaagaaaaggagcaagagaagctgcttgtatgtagaaggaagaagaaagcttcggaaggggtcaatatgagactagacagtatgatggattgtcccttggaggagatagaatgcatcactgaactttaggaaaatggctttcgcgatgatatctcagatgagtgcactaatgtgaggagtttgtggaataaaaatggagatgtgagaatggcaggggggacataatttattcaaaggatagatcattgtgttgaactataatttattcaaaggacaaatcattgtgttgaactagaaaggaaggttcaattaaggaaattaggtctcactaggaagggaagtcttctcagcatcaagtaaaagattggagttcaatctttgagcaatatggggatgttggtggtactacaaaaaccaaggagtaaagaattgagaaattttaccttcaatgtgaactatgaaaacaaatgaaagaagtaattctaagcgaagataatgacttagaatgtgacgagtagtggggtagtagaaaaaggagagctatgaaggcaactatttgcaagattaaccctcattttactgtgtccaagaggttagaaggtggagcgtggatgcatggattggggtgtgctattataataatcctgggtttttgtgactgctgtcacaattttttctacagtttttttcgtatttatttttgcttcttgtttgtttaccatggttttcctccgccttaactgaggcttgcaatatatattggggggaggctagtctaagacaagtggtctctttctcttttttcaaaaannaaaaaaaaaaaaaaaaaagaaggtgaagcgtggataagaggtttgtaggaagcatttggaggtttaggtacaaggcttggactctactacctactactgtagggcgatcaagtggaactctaatagtgtggggtacgaggaacataaaagtgttggattctttagtggcggagtttccaatatttgttttgattgaagctggaggtaagaatccttggtggtttttaggggtttacagaccgagtaaatgtggtgagaggtcttcgttttgggataagatagcaggattaagtgtcatttgcagagataaatggtgtttgggggagattttaatgtgattcaaagggtgcaggggaaaatgagtagtagctttgttacgtaaagtatttaaaattttgatgaacggacaagggagctgatacttatttatttcgatgtgaataacaggcggtacatgtggtcaaattttagataacaaaccatatgatgcagattggatagatttctttttcactaacaaatgtataagctatattcatttgttaggtaggatgttcatgtaaggattgtattagatcgttcttgatacaaattcacccttgtgggaacctagttttttttgcttcgataatgtatgattagaacatagttcctttaagaaggaatttgaaaatcggtggaagaatgcccaagtaggatggccaggttacaatgaatggaagaaagaagtaggttacaatgaatggaaggaagaagtagcataataaaagagtggcaacatatttcctttgatgaggaaatagggatttggttataatcgaaaacggggtctttgtctaaagaatgcccttcaatgtgattgtgctttttcaactctctcaaaatggaatatattcaaaacatgtatgctatggtttctcactttgttagaattcaaatatctaaatttgatgcttttgtttgtttttctagacgtattgcgattctaagtaacaccctgaattttgtatccatatggatcaaatatattatgacgaattcttcaaaaggaaaaaattcattcttctactatggaatatgatgagtgagatttcaattaagtgtttgcataatctttcttttgtccaaatgaacaattcatcaaaataatgagattattgatatccacacatatgagattgccaaatgtttcagttcgagagttcctctcaatccttttcctccttgttgctggatatcacgtttgtacacatctttttgtttctcgagcctatagtgaattatagaccatttgaaagggtcaaatctataagaagctttgaactggtttgttttggctatttgttttttgggtcagttttggagagtaacatagggcttaggccttattgttttgtttgaaattgtaactatggttttcctctgccacaagtgaggcttttcaattcatattgtggagggtcctgtctaagacaagaggatcctttttcttttttcaaaaaaaaaaaaaaaaatttcatcataaatgattgagttttgaaattttttggatagatatcttacatttgaactgaattcttattggttaaagaatctatttctaattgctcgagaacaattaggagattcccttgaagaaatacaaggttctcctttcggcagtaacatgtcaaatcaatatgttctaagaagaagtatttgaatatcaatatcatcgatattatcgatttcataagtatcatactaaatccctttaatcgaatctctttttcgatggatttaaaaaagagaaaaacctttcccttatttggagtacaagtgttctccttgagtaaaggcggattaagccaaagaaggggatgcaaactaaaagctctttcatcgcatgctaagggctaggaaagctaagaatttcatatctagaatcgagagagatgatgggtcaatgctagatagagtggaaggtatagtgagcgagatcacatccttctattctaaggtatgtaaatttgctggaagagcagtggttgatattgaaggcattgaatgggagaaaataccatattacttagtagcacacctcgagtgaccttttgaggaggaaattaaacagacagtgtttgtatgtgatgaggaccaagtgctaggttcagatgacttatcaatagtaaaattccatttgatttctaccacatgctgatttttgttttaacaaagacacaaagtcactgtcaaaaaatatttttagaggtgcaacatgaggacttcctattctgtcttccgtcctagtagtactctcacccaactcacgtaactgtggatttatgtcgggatttagtgtattagtgctggtatgatggcaccttcctactgcatgttgatttgttttggctgtagacaactttctaggcttggtttttatctaatgcactcatctaatcatcaaccacctttttctattcgggtttcaataaggcttgaatgctccttggaatagtaacctatttaaggcgtgatgtaaaggtttttaatttgggtttcaaccagttgaaacacgggtactttgaggttggataaagagtgcagctcctttttaggctataaagaggcagtttgtacataaacttcagctgactgtctaacacatatgacctctctctctctctctctctctctctcttgtttttttaaataatagtaatcagtttgatatgaatgggggttgaagttttaattaggcaatgccttagtttgcacatcaaggtgggagtttgtagtctttgaaaacaagaaaattattgaaaacattgcgagttttgaatatgtaaattcatatactgacaagtgctatggtttagaaactttgatacacaggttgtttttccctctatatcatgatattcgcaatttgttaattgcttaaagataaaatacttatgctcaagttgatatgatgttgctgatgcataggattttgatgtacgggagtttgcgatttctttggctgggaggttatcagaaaagaatcctgcatatgctcttccagcacttcgacgtcatcttattcagttgttgacacacttggagaagaggtaatgcagaagagtcacaaatattgctgttctttttttcttttttcttacatacagttgtaaaattcattatttgtgcatttcaaggaaaaaatcattattgtgcagtaggattactttagtcccatatctaggctgaaaagcttcaaaatgctgacttttttgtttgctgcctcagcagtgcagatagcaaatgtagagaagaaagtgcaaagttactgggttgcttgatacgcaattgtgaacggctaatacgtccttatatagctcctatacacaaggttttactactcattggttgtcatacttacctagtctgtagtttaaatttcatttcttcatatccatgtatcttttgggctaaatatctgtgcaggcactcgtggcaagacttgttgagggtaatggtgtcaataccaacaatgccattattagtggagttcttgtgactgttggcgatcttgcaagagtggtgagtgtagtgttaatttatttgaatttgcaaaattcccactatgttttctaatggtttatttgattttttttgagtttcttaggtgtagtgttagttttatgcattgtagtacaaaatatgttgttcatattttcttttaatgaattaagcacacattttagtcggatttatggaaaaatttcactttgttctctaatggttcattttagttctgtgggacctcctgtgcatattttgacattttacacgttttagtacaaaatatgaagcttgcaatttcatttaattaataaacatgactttttcattctggtttatgcaaaatttccattatgatccctaatgttttatttgaatttgttgctgtttctgattagggcggtttcgagatgagacaatacatgtctgaacttatgcctttaattgttgaagctttactggatggagcagctgtcacaaaacgtgaagtggctgttactactcttggtcaagttgtacagagcactgggtacgtgatagtcttatgttctgtattgattgctttgcctattattgactttctagaatgagtataagacctgtccatggtaaactcttttaatgtgtacaggtatgttataactccttataatgagtatccacagttactaggcttacttttgaagttgctgaatggtgagttagcctggtccactagacgagaagtcttaaaggtaaccacttatgagctagatttctaattatttgttcagatattttttattttaaaaaggagagaagcaggggataaaaaaatagttagttaatgatctatacttactatgagaacattacttttgggattcttaaggttcttggaatcatgggagctctagatcctcatcttcataaaaaaaatcaacttagcctgccagggttgcatggagaagtggcccgtgctgccagtgattcaggccaacatcttcaggcaatagatgacctgcctgtggacctgtggccatcctttgctacatctgaagattactattctacggtagtacatcagtctggtagatgattttttttcatcttttgcatgctatggcttcctctgaatatgtcactgtaagacatgtgtttgatttttgaatttgctgtatctgtttgttaaattgtatattttgattccaggttgcgattaattctctaatgcgaatacttagggatccttctctttctagctaccacctaaaggtggttggatctctaatgttcatatttaaggtacattataatatggcttgtgtttgtgtgctgtacttattactacttactactatcattattattattttcgttttcttaatgtattcgtttcttctttgcgagattagtcaatggggctcggttgcgtgccatacttacaaaaggtctgtcatagattgtatgacggtttgaatctttttcttttttgaattacatttgctggtttgaatcttattttctttgctgcataatttcatttccatttttagtgcagattggaatgctattttaggttgaattttttcgtttggttgattgaaaagtgacataaaatttgattgattaacctgaaaaatacaagattaatggtccaaaaaaaaaatacaggactaatggggtttgcacaccaaaaccaaagtgtggcatagcaccccgaaggaaaaacaaagcagagacagtaaactacaacaaaattttcagtctcttgctaaatcagaactcaaaatgcccgtaatttctttgatatcatgtatcctgtttatgattatgtccttggaaaagtcattgaatatcctgactaaatattctttcaccacctctcattctaattgagttactgttgtcataatgaatccatccaggggtttatattcatcaacactgcattttctatttcatcttcagaaggtctctcaagccattttgctagaattttaggaatgccttgacaaattcaatccttactgattaggtgatgtaaaacatatcctactacttcatctactaaaatcaccgatgccttttttattctagatttctgattcattgctttcctagcatttattatgctatggaagagcctagtatttgcttccaccttttttggtccatttaaacgtagacttcaatgtgtaagttccctttcctcttcaagagagagttgatgccattcacatttcgagctttcacttttttcgttaagtttgcatattccatcttccagtagactcaattgaatgtcattgcaatgacaaagcacatttccatattgtttagattgtatttctttttattcatgttgctttgtttcttttagtatatattaatagaagtgcaagcttaattatctttttaattaataagttcattacgacattggagtaagtttttggtgatttcttttccctcttaaactagattcattgcctgacccttacaatatttgaggaccaataaattatagcaattgctatataggtgccctggatgtacttggacctcaaaccttgttggatcaagccattgtttttcagtctaatgcaaatattatcctttggagaacttcgtatcaattgatgcaatcaattttcttatgagcctttttccttcatgtaggttttgcctgatctctttcatactgtacgtacatgcgatgatgccttaaaggatttgattacatggaagcttggaactctggtgtctattgttcggcaggtacattttgatgtttattttccacaggtagtgatagttgagtttttttggagatcacgaatgagacttggttcttttgcagcacatacgaaaatatctgccggagttgctctctctgatttcagaattatggtcgtcattcagttttcctgctgctaaccgtccttcccttggctatccagtaagttttcagttctttcagtcccatccgcagatcatgttttatttaagccttttcatctgttggaacttctgctcatgtatgcatatatttttttattttcataggttctgcatttagtggagcagctttgcttggctcttaatgatgagttccgaacatatcttcctattatccttccatgttgtatccaagttttaagtgatgcagaacgttataatgattacacctatgttcttgacatcctccacactcttgaagtctttggtggttagtactctcattttgtatattttatgcacaacttttttttttttttttttgataaccttattttatgctcaactttaattgtgaagcaagtaatgctgtttttatgaattacgtgtaatgacttcgagtaaggaccctgtaaaaaaatttaatttgagaggaatgacttcaaaatggagtcagataatatatatttatttttttttaaaaacagatattaaacattattaatatttgaaaaattagacaggtatgatattatatcaaacttgtaatttacaacatgaaattccaatttttagctaaatcaacaagaaataaatatcaaaatattgttggaaatattgatactataattttatgaaaatatcgaagattttttcgatactgatggaaattaattttctcttttatgaatatcacacatatttctatatatctagaaatatgaaatttaatacaaaatcaataaaatcggataattataaccacaattgtaatgaatattttaatcataaagcttttatatttatttattattttgagtcttatttatgtttttatgactggatgataaaacataggatttcctctgccataagtgagactcccaaataaagtttgggaggaggttaatctaagacaagtgaccttaatagaaaaaaaaaaggaaagaaaagaataattataacaacacatacaatataataaggaggaggtttcaattgttacatcaaatattgattttgactatgtatcgtcaacaaagttagttcatctattggttattgatctcgaatatgtgttattgataaaatattcttcatatatgaagttgttggttattttcaagttgtctctaaaacatgtaacttgaagatatgcagatgaaattggattttagatatgatgtataaaccatgaatacccatattttagtattttacactattctcggactaagtgattaattattcaaaaattaatttttgaaggggtgaaagtttaatttttataaaataatagagttttattgtaaatattataattaaacggtttaactgttaaaaaaattataataaagacttaaatataaaaattaaattattaatattaattgctaaaagggtcatattagatatttaaattaaaaagtgattattttaagaaaatagttaattataattaatttaattctagaaaaagaatttttagttgttggtaacttgctattacaggtcaacaagaatataaccatcataaccatcatgattacaataaaaatgtaatcattgagtagtcacccaatataataataagtaataatcttagttgtttattataatatattcttgattacattataatttaaatatttattcaatttcttcgaaaggaaataaaaaatgaatttttagtcattattacttttataataatcactctttaatataattatttcaataaagtttcaagtgttagtaatttgttcataacaaataaaaattaaataaatatcttaatattcttgatgtttgatgaggaatcaaacaaatgtgtgaaatatgtaacatccttttcttcttctattctgtttcagtctctcttcacatatttcttcatatagaaatattttctaacagcaaaatatttcacacatttgcttgatccctcatcacatctagaatattaatgtatttaatttttatttgttatgagtaattaataaaacttaactttattgaattaattatattaaagtattataaattataaaagtaatgatggctaagaattcacttattattttctctaaaagaaagagaataaatatttatatgataatgtaatcaaaatgatattataatgtataaataagagttttatttgtttttacattgtatgtatcattgtaatcattcaaattcattggttttctaatagttttataattcattttcatatttctagacaaatatatgtaacatccataaatgtttttgaatttccatcgatatcgaaaatatctccaatatttccataaaattacagtgtcagtgcacataatatttttttccttggtcatgactacgtaatatgtttatttgtttgaaatctgcaatttgatttgaagaaaattggcaatgggcatctcttatgaaaactgaccatttgtttggtaggatgagtttgaggatttcctaccaaacaaagggtgccttttttctggtagtatatacaatattttctggaagttttctttgttagttactgaaaaaacctcttaattgtgcaggaacactggatgaacatatgcatttacttctccctgcacttattcgattatttaaaatggaggcttcagtaaaaataagacgagctgctataaacactttgacaagattgattccccgcgtgcaggtcagcaggctagcagctaattaattactatttgatagtttgatgagttgaatagctttatagctttattactttgaattcctgtcctttggatgtgtcagtggtaatgtttgtttgttatttctctccccctttcactaggttactggtcatatatcttcacttgtgcatcatctgaagctagtcttggatgggtatgtctctccttactttaatttgaactttacttctgttttacttcttgttacatgcggtttcttatgaaaatgaatagttttgctattgggtcaatattatgtgtcattagctcttacttatgcttcattctatgtggtttggttggaaaattttgtgttgttattgggctgaaattaaggtttcgttagctcctcatccctttgatagaaataaaaaggctgaagggctagtgggttgaagtctgactttttgtatttggactctatcagtactggttctttcagtatctctatcttttcattttgcttgaactggttcactgtgacaattttttatcaacaggaagaatgatgagcttcggaaagatgccgttgatgcactttgttgtctagctcaatctcttggcgaggacttcaccatttttatcccatcaatacacaagcttatgttgaagcatcgattgcaggtattattcttactcctgcccattttgatacttcagttgacatttttctggttctcaaatatgtttgatagatttggattattttattaagtgtaagcgttggccttattgcagcataaggatttcgaagaaattgaaggacggctgaaaagacgcgaaccgttgatcttgggaagcacagctgcccaaagattaagtcgcaagcttccagttgaggttattagtgaccctttgcatgatgtggagaatgatccccatgatgatgggtctgatttgcagagacaacttcgagcacatcaggtacttttcttttttttcttaaaaaaaattattattatgctgttcagttgtgcggtgtgtttccatgggatgaagggctagtaattcatttcattttccaaaggattttgtgaaatgcatagcgaatagccaagcctagtcactaattggagagtgcagtttataagtcaaaatgagaatagcatgagaagtattgtaaatattgatagtgtggtaaatatgctaacgaatattcatttttccctttctacttttttttttctttgtaagattttccctttctacttttaatacattttttttaataaggattcctcttgtccttcctttcaatttaccaaacaacttttaagtaggcatcctttctatcatcccttttcatttatccatacctcatatacgaaggcctattgtttttatttgctgatcttgttagactgtatttcttatacgtagtttctttctattttttttttcgtgcagaacttcttttatgtatatcataatttctacaagagtaacttcatcttattatgtttaacttatatctacacattttatgaattcatgcaacttccaacccaagaaaccttaaactcttctatcatctttgacccactttgatattctagttttgctttctacaactttttgttttttatataatcaaatattctgttggaagacagaggtacctattaaaggttgagatgtctcctttaggtgtaagaaaacttttttttttcttcccacattcatagtataaaatgtcatttccttttttgttattggatcttctttcctcctgataggtatttgaatgttttactatttcacgatctgcatttttatcttagtgactttaaactttacaggttaatgatggccgattacgctctgctggggaggcttctcaacgcagtactaaagaagattgggcagaatggatgagacactttagtattcaacttctcaaggaatccccttctcctgccttgcgaacctgtgcaaggcttgcacaattgcaggtatttctctaatatcctttcgtacctttattaatttaaagtgtagaccttaatttttcagttttgcagccatttgttgggcgggagttgtttgcagctggttttgtcagttgttgggcacaactacaggagcatagtcagaaacagttaattcggagcatggagatggcattttcatctcctaatattcctccagagattttggctacccttcttaacctggtatgctgttttaggatgtatattattgtttctatatatgcaaagtataaaaaatataagatgattatcaagctatagttagatactgattgttttctctctagaattttactatgagattagtttttagatgagggatagtagtaaaacttgacactttagtagagaatttaggctatgtttggctgagggaaaggaatttattttcattcctttatattgattgattacaatttaagatatttgaatgacattttaagattggcttttattattccaggagaaatggaataaaagactttttaatgcacaataccttctttttttgtcaatatatatatatatatatattattcctattctcattccatttgcattcattttttcattaatcccaaccaattaacactttagtttataaaaaaagatgaagtgtttttgttcaccattggtagtaatgtcaagaaggtagagatgttgaagcagagaacgctagagtcttagacaagggcctctttctctttttcaaaaaaaaaaaaaattatcatatcatatctcttgtcctttgtctgtgtgtgaaatttaaaactttgtgtatctatatggaacttcagagtttcaagttctatgtgattttaatcaaaaaaaaaaaagttctatgtgatttacattgctctctacgtttgattattataaagttatgaatattgctaaggggaccaccatcatcttacgtggcatgctgtcattggtgcaatttagtatgacatttcggtagtttggcaccaagggtgccctacagcaatgctctaaagctgtatatattcatgtgattattggataatttatacttttggactaataaatttgatatccatgatttttctttttctttttttgatatttccataaatcatagtatcaataagatagtgtgattgcggaattcacagtgttgttaaagccaaggaaggtggaggaaattgtatcttgtattgtataaaccttttacttcttctcagtgttacttggcacatggtcacatggcagatatacttcctatgtgataccaatttggatatgtgttatgtagtggtactatgatatgtaggaattttaaatgaaattttgtagcgattaggttcaaccttttattgtactcgtccaggaggttgttttctggttctttttatttttcctggatttttttccagtcataagaataatagtgttattgttgttgttatcattatttcttaatttagcaagctgacttttcaggcagaatttatggaacatgatgagaaagcgctccctatagatatccgactccttggtgctcttgcagaaaaggtatgtttctttttcttttttctttgaaattgtaattaaactatgttttccttttattttcagtgctcttgcaggtatgtttctttttcccttttctttgaaattttaattaaactatgttttccttttattttcggtgttcttgcataaaaggtatgtttctttttcatttttctttgaaattgtaattaaacaatgttttccttttatttttggtaaacattagaaagtttgtttcgaataatgaaaaaacaaattaataattttgtattggttagtgattcagtttgttaatggagttggaatgttttacaaaattcacgtgttctttactgtttttttttttctctttcccagagttgttcagggaataagaatgttttatgatttttttttttaataaacgaatgttttatgtagtttaagtttgtttttgttttgtaattttggtttaatgtgcttctgtttctgataatgactcagtttgtaagatgtgtttgtcttaaattgtaagatatattattattgaaatagtaatcgtttcttataaaaaagaaaatgggcattactaagtttatgtgccattggttattgattgtgtatttcagtgccgtgcttttgcaaaagccctgcattacaaagaaatggaatttgaaggagctcgctccaagaagatggatgcaaaccctgtggctgtagttgaagcacttattcatataaacaatcagttacaccagcatgaggtctttttcaagaagaaatatgcctgtttttctttgatgacttattttcaatttcatgttgggatccatgtttcttgaattctcctggttgaactgtattgatgacagtctcttttatcaggctgctgttggtatattgacctatgcacagcaagagctggatgtgcaactgaaagaatcatggtaatctcgagtataattcctttgctttgattggagtgcatgccaaaaatagtgatttttggaatgtttataagaacataaaaatcttaatgaggtgcacttgtttaggtatgagaagctgcagcgatgggaggatgctctcaaggcctacactgcaaaagctgcccaagcaacgagtccccatcttgttttggatgcaactttaggtctgtgtccatttctatatctttatttctatttgcattaaatgtgtacttaaacatagaccactcacatatactcacccacgaagtagttttcaatgtttaaaattgcgaatttaagcctcatggcgtttttttttttctgaggcgaggcgtaagcctcaaggcacattgaggtgttaattgaggcgtaagtctcaattattgaattaaaaatatgtttttagagtaactaaaaataaggaggaaagcaggagcagcattttctctttttttctttttcttttcttctttgattgtgcaattgagaagatgaagtagggggtgtctcatggctactaatcctaagaaatatagttttgttccgttaatataaattgtgtaggcttagtttttagttgggcttttttttttagttatttgtttgagttttattgagtttttattgttttattgggcccttttcttaagttaaatgttattaggctttctttcaagttgttgaatgaaaatgggctgaaaaaaccctaaaatcttattttttttaggcgtgcgcctcactcatattaacgccttagaccattttccaccgcctcagacttttgaggcgtacgcctctcttccaaatattgaggtgcacgcaatagtgcatttttttcccgcctcaaaatgaggtgctccttgaggcgtgcaatagaaacgcaatttaaacattggttgtttttgttaccctctcgctatctctcaatgaagctatattaaatagtagagattgtctcttatttttctgcttggctgccatgttttcaaagagttcttttatctttagatctagcccatttctccttttgcttaacacttggaaaagcgcattaggttctctttctttttttggataattgaaggtaacataaaatcactttattgcttcttttctattttttgttttatttatttatctgatgttgcttattatttcaacctgttagaccccatattagcaggacgtgctagagcttaagaaataaaggggtatgactcattgtattgagagtagtcatgagtgagatttgggaaagtatatataggggtgagtaaggagttagtggatatgtagtgtattaagtaaaactctatttgcatcaaaggggcctaaggaatcctatagtttttaattggatttttttatacattcaatatcaatattctataattctctattgttttattggttttattgagtttggagattcggtacttattaaaaggtattagagcactgattctggttctccaccatagtgctgatgttgtcgtttgttgacagatgggaaataaaatcacatcaattagtttcctaattttatgtgttatgatctttttaaaaatataggctctctgatatgctctcttctctctcctc

SEQ ID NO: 15741 - DNA, 6121 bp, Cannabis sativa
atttcaacttctttaatgcccatatcctcaaccacttgtatttaatactctcttgttccaaaattataatgggaactgcaaaatgttactttcatgactgattgcttatttgatcaccaatttctaacttttatgaggaaatattttgttcctatttgaagcagagtagagaaaggtttgctttgaaggtatggcagattggcagtgaatcaatctcttgccatttgtagttatctagttttgggaagattatctgggtactctctcgatttattaatttactggaacatatgaagcttttcatggtagaaattctactgctcccactacatgtgctcatctttctcattgcaataattcatgaatttgtgttagaaaacttacttttttcatgcatttgccgaaacttatacaactccaacatattctcatgtctgaattcatctactccaccatccatatggctcaggatccaattgaatattattgcaactttaactagccatctatctagttttgaattcgatgctttagttaaattttcttgtcaatcagtatgatagggacaccttcacatgcctcgtttggatgacacatggagctgcaaagttgtacttatcttcatacattcacacacataaatacacacatctactaacaatattcaaaacataaatttaccaactgggagagttgaatttataaattttctctcttggttaattactactctttagtgtttaaattcacataattatataattgtgatcacgcataaacacgaggagagtagtaccaaaccaaaccaaatatggaaatgtgtaagtatataagaacgagtttgacaaacactgctagatctaaaggctgtacataatacaataaataggattcactaattaagcatcttgtctaggattagtactgtctctttgcaagtgcatagactcctcaggatcacgtagcccccaaactcttgtttgttgttgcactaccaaaattgaagcagcaattctgatttcagagctagctagaagctcaccgatcgccccgagatccccacggtctttccattttgctatttgagtcatcaaccacgactctgcatggcgccttccaaccatgacaagttcatatgcgccatccagagacctcagtacgtcaagcacttccttcccacttcccacctcaacctcctggaacgagactctgtcatcgcgaaaggcgctgagcctgaacttgctcaagacatcagtgtctagtgccttgctcctggcgcttccctccactatgtctgtcgaagaagagaagcagaagagagtggtcaagacgttggaatgcttagacatgcggcctgcgtacgccaatgcctctcggtcgtctgcaccaccgaagaagagcactgcaattctatacaacgaagtgtttatgcaaagagaggatagatacttcctacggttcactcggtcaactagaacccctaccgagcaaggagccttttcgagaacattcttgttgaggtggcgaagagagtgagaggtctcagcaaccgaaccgtttatccaaagcctgtgaaaagggatgataataaaggttgatcgcttttctagagccaaagaacaaacgtcgttgtgcattgtcgagtatggggaaatgcccttaaagcaatgtacagtgacatgttcgctgtaatgtttttcaaacttgtggaatgcgttgaagattctctcagattgagaagggtattgggttgaaggtggcttttctcgtggctggtgggagacgaggagagatgaggcttgcccaacaagcttgatcaagtggaggatgacaagattgatggggctctcctcggtgggattggaggctgccaagaggtccaaaatggcagatacattctcttgcctatggacacaagctagcattctcaactcttctccttgcctgtgatgtaaaatagtcctccttctatatgccaagaaacgctttgatggatcatagagaactctcacaagaggtgagataattcctgcaacaatcaccacagagataatcataatggcaaagcattcttcgtttagtacctgcacattaatttatagggtcacttatattaatcatcatcaaccaactaaaccaaattgttatgtactagaccaaaaagtataggtgtataggtgacttacttgttcggtcttccaagccagaagcaagaaaagttcaacaacgcctttggagttcatgatgagaccaagggagatagcatctaggattggcattctgcagaagaggggagggattgctgatccaataatcttcccggcaaaagcaaggaaaacaatcaattgaatagtggctacgttcttaaactgttgaatggcaaatatatccattcttaatccacacatggcgaaaaagatgggcatgagtatttgagaaacaaagcaatcaagtttctctactaaagcagctccaagagggggaccatctggaatgaccagacccaaaaggaatgatgggaaaaatgcattaagaccaataacttctccaataaaaccacataccaatacactgatcagaacggcaaagacatatgcctcttttacaggttccccttctggggtctgtcgaattgcccacaaaacagctggacggactccaaagaatagtattgcagcaaaaaggccagctgagagtaaaaacccaaatgatattcttattgacctttgtgaagctaagtgtgttagaaacttcaagacaaagataaaccagtggcatacatcacatactatagatgaagaagacgctagacgtccaatctctgaattgagaagcctaagctcatcgagaaagcaagctacagtaggaaaggctgttagggtctgtattgaaaccacaaagggaagcgcacttgaaacatcaggatccaaagacagaaaatggtctatgacaaaggcaacaaatccagccaacgcataaggaacagagaaggctaagaatccaacagcaatggctctcttacctgatcttagaagaatgtaagggtccatcttcaccccaattaagaaaacagagagcatgaaaccaaaaactgataatgtctcgaataaagctctccctttaggtgggaaaactttggttgcaaatgtaggacttcttcctataaccgagggacctaaaattataccaccctggtgacaaaacataaatcagacataattgtatgacaaattaaaaacaagttctttataataaagtattcacttacaagaatctgagaaacaattgagggctggccaaatggtttgaggatgaaatagatgaagcgggtgactattgagatgagagaaagctgcagcagcaacaatggaagagaaaatgccaaagggtcatctccaaaccatataccccgggaattgatctgatcaataatatggcaaatgtatgaggttgtaacctctcccttaagatcattcttacccataaacattgggtccggtacgggcttaccctgccagcgtcaatggctagttgaaccttgcagcataataacacagagaggtgtggacaagaacccctctaatttgttttttatggagaaagctatggagagaagaggagaggaaacgatatggctgttgcatgggagaccaactgggagaaattgagacacatatgggaaacaaaagaaccaaaaatgagaggtaattgttccttcttatacgttgagacgtttgaccaatccacttggcaaaggataatttgtcactttggcatttccatacatccttggcttagtatttatgagatgtaactcggaattttatttattttatataatttttgtatagagacaagatagacatgtagaaactgaaccccgatttggacggactgaaattaaaattggacgttgattaattagaatcatgattaggtctaacaatataaaccttgtcttaaagataaattatcaccatttttataaacttagcaaagagaatatgtgtattgaccagaaaatcagacgatttaaaggaactgaaaaactgatataaaagaatgtgtttgattcattattccattgaaaattgtcacaattgaattgatgattataaagaagaaaaaaagaccaactttatagttttctcaatacaaagaatatacagcctatcatatacagaaaataagaaacttagcagagacagttttgtgttacccatcaccaccattgatgtacaagaactccactctttctaagcgaaatgaacaagtccaagcattgatcgtatgtcttctcatacttggaactcctcacaccagggcagcatttttgcaatctatcgtaatgacactctaaaaatagctcatcaatcaagcatattgcccctgtttcaatcaacttgggtatcagataaaactcagttccttctacatccatcttcaccaccacgaaatcattctgagttactgtgtttttcaaccaattagcaaaatcaaatccctgaatcttatccaggtcttgcatataacttgttgaaggcatcactggctgaatcctacccatccctcctcctcttcgtcttctttgtttcccaattctgttgcttgtgtctctggaaatctcgaaaaatagagtctcgttcctgatccaggctgcatgaggcaaaagaattacccctttctttcttttgtagtcttcatgaaaagtattatctgcctcaattgcatatatttcaaaagtcttgttctgttttggatagtgtttaagaaaccaatttcctatgcttgaaccataattacgagctccaacatcaacgtaaacatacctctgcttgaagctaatgtccaccattgaagtcagatactttatactctttatattcctcttcaatgaaacccaaggctttaatgactctttcttgatcaatggctctgcattcccaattatatgtcgtttatacgcaggaactgagcaattattcccaatggataattcttctccatggccaagaaatgcagtctccttcctcatcacaatctcgcgaactgatgaagaatcaaagccgtcgatttgtcgagccctaatcagtctgcaacagttgaacaaatcaagaaaagaattgaagctgtacaaatctttagccattgtgtgaaccacaaaaaacccacccggtttcaaagtccgacaaacttcagaagcgaaatccccaggtcgacctgaccagtccagacgatttttccccacgaactcgaaatcgaaggtgttatcatcgaaaggttggcgataggcttcgccggagaaaagcaacggcggcgaggggttcttggagattcctacagaatcaaacacgccaatctctctaagcgccaccacgtcctcaccggcttgggtttccacacagagagccttaaaattgtacgataagaaaccttcggattccaaatcttggaatatggaagaataataatcaacagttttacggtacctcttagtggtggagaagtcagggattaaagattctccggcgagagtatctcggtgacatacgtcttcgactccgggaagaacgtcgttcttggggaagaagcagcggccggagccacagtagccgccggcgacggtgacgatgaaagcaaatctaacggctagtattaaaacactgaaggagaggagtcttaagagataatatctgaggagaacaggtttgaaggtaagaaatctcattgttaatcaggaaaatacaagggtaagatttgaagattgagaacaattctgagggctattatggaaattcaacagtgtcttctacggtttttacccgccaatttctggctactccaaagtccaaacggcttttcaagaatttaatgtcgtttatttctttgtttgagacgacaagtcggtttttttgtttttctctcgcactaatgacgacttgtcgtttcatcacaaatgccaagtaagtatatcttatttagatttaggtaaatacaattttagaccctttgttttgtaaaagttactaattagagtctctgctttatcaaatgacaaaatagaccctgtattttttaaaattgtacaaataggatccattttttgtcaaaataaaactta

SEQ ID NO: 15742 - DNA, 7928 bp, Cannabis sativa
  modified_base (361)..(362): a, c, t, g, unknown or other
atctgtaacttttgcaaaatataacgtctaaaatgatatttactcaaataattatcatgtcaaaattttttgtttcaatttatataaattaattcttcaaatatttgttcctattttatatacacatgaatattattaacataagaaattcatttatatttatttattcatttgttcacaatatttttttacccaaataaaatatatttactatacatttaaaaaaaaaacaaataatattcatattaaaatcctttaaatatggatagtacatatattaatttaacttcttatatttataatttagtctaaattttaaaatatacattattcatgtttttgataataataataataatannaataataataataataagctttaatatgatatgatctaagttaattagtattaagagtcctaattaatctttaaatctcaaatcataaattgaaatttacttcaaatattcaaaacccttttccccaaatcaaaaattcattctctctcccaaaattgatgatccaattttcgtgttgacttcaatccatggcagtaagcttcaaattcagaagctccttgatttttgacaccgtccatatcgacgatggtcgaccttcaatttctgttcgcgatctcaaatccaagattatccgattcaaaaatctcaatttttgtcaagattttgatcttctactatctgatgctctcactggtcaaggttagctttcaattttcgattggtttgtatttgataaatatccgaaccctagtttagttcatagggattttttgagatttttgattttgatttttggttaatggcagagtatattgaggacaactttcaaattcccgatggttccagtgtgataatcaagagagttcctgctgaattggttcaaggaaacatgtatgattctgggaatttgattaactttctccctaagctaatttcttaacttgtgttttacttttccttttaattttgttacagtgctggacctatctctaatccacacgagaatcttcggatgaatgaaaccttgaagctcaatccatttaattcacaggtacttttgcatatatgttatactgttttccaattttcaagtgttgactcatttaatttctttactaatagaaggcaaattcaaattgaattaactaggaattcggcttccattagtaattttatgacgatttgataatacttgggattctcgaactgttctattatttgtgaacagtagcaatttaagtttaaggaaataattcatgagatttatgttactaagccttaactcgggttttggtaacagtgtaaatgttgtgtttggtgtgtgactaaatttatcaaaaaagtttaagaaataagaaagtgtggatctcaaattgttagtttcttgcctcacttttcattttggtattgttttttacttaacagaatgccgagacactcgattttgatgactttggggttgatttgtatcctgttgaggcgaccttatctagttccaatcttgatgagaagaggacttgcatcaatagtgaccctccgaaatttggcactgcatcaatgtatactcacgcttatatacactttttttgtgaatattttttacttgacattgaaatacaattaaacttttgattactaaaacattgtttatttgcagatgttccgagtctcctttgagagaatgtcagaaacttgatgggagcgatctcagtaatgctgttccagaatgtatgttatgttcttgattgtattttgaaaatatttactctcgtagagatctatatttagtaaattttaattttgtttttaggtcctgccaatgatgcgaatgagggggatttgtttcagaagaagtcggagcctaaacttcagaatgaaatgaaaaagtagggtatcgtttgttagtatatttatttggtcttagaaaatatcaatacgaattgtttatattatgttttgttgttaaggaactgattatatgagccatttggaaattctagggtggataacacaaaagctcaagctttgctagatgtcaatctcccttcagagcttaaatgctccatctgcaatttgttttttaaggaagcggtgatgattccttgttgccagcatagtttttgtcataaatgtaagtgtatttctttttttactgcagcattgttgaactttattttactcatgaaaaatgaataagaacaattgttagctgtgttatttaagtcatctctgtgattgttctgagtttgttttcaggcatttatcaagtgcttctcgagaagaaaagttgtcctaaatgtttctctaccaaatatagagtacaagatctcttgccaaatctttctcttaggcaagcaattgagcattttcttgagtcccaaaatttaactgctgattcaggcaacgattgtcagcgatatgcccctggtaggtatcttatacaagttgaagtgttatcaaagtctgaatgggaaacacaatttaataatttattatttaacttggcttgcagatggagagtctggaattcaagctaaagatgtctcatgtggtgtgtccgtctttcgaagagcattagagttgcctcactctccctctgaaactgggaagggatcaaatcatatatttgtagaatcacctagtaaatcaaaattgccatttaaaatgaatgtgtacaaccattatggaagcaatgatactttgaaatcacctcctttgttacacaagatgaagcatatagataaaattggacccggggatgtggtggattttgatgatttccaaggagaaagccagcccatgtttgatgaaggtatcgtgttatggattttctattttattttatttaccttctgcccagaattttctctcctggaaaaatttattattcttttgttgttcagggatagaacaatttcattttatttctttagctcttaatatataattttcatctatgacagtgcctgctgctaaatctatgatgaagagaaagagggaaggctggactgataatgaaggtaggatctgtattttttgcactacagatatattctaaaaccatttcttgtgatgtaataaattataacttttcaggtggacatatgaccaatattgagtctgcaaaacacaaaaaggtgagtggacaatttatttctacaccttaaaaagttacatgaacaactagatgatgttcaaataatatctcatatgctttaatatgtatatgtatcctctctcgctttttcttttttgcttcagactggtatgagcttaatattgaagttgccatcatgattttttattctatttgaagcaaaattagatatctagaaaagaaatcaatttgtgcattatacattttagacatgttttagttcataaaaactgattcaaatctatcttgatgatttcagggtgctcgaacatgctactattgtggctctccagaccatttcattagagattgtccagctgctataataagcccacgtcccatgcctcagactggtatttagtcgataccttgctttaacatctcatattttagacttgaagatgtgtgaatgctcacctattttggaaattacaggaagtgccatgtttcctgggactatgccaagctctgtgccatactggaatgggtctcctgtgccttatgcgaggccgtatggaaatttctatggcaatggtgggatgataccttttaatgcgtcgtttttcccatctgtcccttatgctgttcctacctatgtgtcaccaatgtatcacccggtgcctacttttgggtaattttctaatctgttcaccaatgttttcgtaagatgtcccataattattaatttgaaacaagtattgatatagttatatgatttttgccactcaaataactttgcagtgggtgcatgaggatgggaggtgtagcgccttcaggaggaactattgaaaaccatcgtgctagtcatcctgagttttcgggctttcaagaacatgagaagagtcgaatgctttcaaatcataattttaggaggtaagtatttgtggttctggatgtgcatgcaatggggactcttaggaaaatttgactcacttttgagcttctcacatagcaaatgactattttccaaattataaaaacatggttcatcaaattatcaacttagtttgttaacaaggtttatgttttaccataccaaaagtgggcctttccttcaaatattccttttctatgcattgaaatccttatagtttattttagtttatctaatatatatgttttatgtaatattatgcactacttttctccagagagctgtctccgactgacaaccaaactcgagatgttgatgagctgagtcgtgttggtcgcagagaaatatcctatgatcgcaaacctcgtgaaaagattttgagctactcagcagatacctctgcacaaggttgtcagaggaagcattatcgcagtaatcacattgatgatgaccaccgttcaactgatgaatatcatcacaagagcactccttcagtggttcgtggtagagaccagagacataatcatcggtcagaaagactaagctctgaagttgacaatctgccctgcagctccagttggaacggagatgagggcgaaaagcatcactataagagctcgaaaaggcatgatggagatagggagcgctctagcaccagtcgaaatgacgatgagaggaaaactcaccatcataaaagctctaaaaggcacgatgtaagaaaagagcattcgagttctaatattggtgtgaaaaagcataatcaaaatcataaagaagctgagcgaagtttgaaaaagtccaagtacaggtcaaagagtaacaactctgaatcaagttatgagaggtggaaaatgatcagcggatcagatgaagatggttcagaagactatcggtattataagaggaaaagaggacactgaataagaaaaaaagctatagaggggataatcattcccgagctatagcggtatatatgaaatgaagtacattttctacaattcgctgatcactctggtacactcattttttttgtaggtatttgtataaatttggtttttaatctctaagaagatgatggatttattagggtaattactttcatacaaaattagagattctttctgagctaatattggttttgatgatacagatgtagtacagcgggctttcggactatgaaactattgtttatgtattcgtgctaactttgttagtcttcacttttttgtttagctaagagatgttgaagatagccaggaattattaaccagtgcagcattgatatgctgagattcttgcagaggagaaccaaggtatgttttctttttcagaaccccgaaaaacaccaatttcttttatcgatttcgtgtgtgccaactgatgttaaaaacatcttttacttcatgatattatatcggttggtgtagaagaaattggtacaagaatttggtgtcaaattatttactcctttccatttatgctcctcttaaaagggtggctataatataattattggttttttttttaaataaatattcttttagaaaaattaattaattgagtcaattatgagtaatatataatctagccaccctttaaactgagctgaaagatcgatgatggttttgttgctaaagtgatagcaatgaaaattccacatgaattggattattaaaaatatatatatatatatatatttataaattcgttattttcattagtacagtgttttaattttaatgtaataaattattcagcttttttttttttaaaagaagttctctataattaattattttaaaaaaactgttgatttttttttttaattttgttttttggcaaaattcttgaaagttttttgttttattgaaataataataaatcctaatttttttagataacataaaaataatacaaaacttatgtgtacatatgtctattgtctccattatattaaattcggctatataataaaagttttttttttttgaaaaaaaaaatattacaatttaaatttaaactcactttttttatcttttattttatattaaaggagtctatttaactaatttttttaatattgaaatttaaatttaaagtcattgtacatattttaaaagaattatcattctattatatatttttttactaaacataatatatttctagtattattattattttttaaaaaatgaaaagtatatgtttatttaactatattgtacgtaatatcaacttagtatcctaatatggctatctaacgtaaattgttggtttagcaattttttttttgttaaagttaacagttaatactagtaccgttaaatcaattaattaattaattaattttttttttaacttttttaaatatttaaatttaatttaaaagtatcaacaaaattattgttttttatataaattttaatttaaatttaaattagatgttaattcaattaattaattatataaattataatatttaaattatttatttattttattgtttaataaaattagttagttagaattcataaaaaaaaagttagatataattttttataaataaatatgaaattaggttaaattttatgaatttaaaaatgttattaaattttattaaatttatcttttaaattaataattatggagtaatttgccgcataaatatttaagtttaatttttattagtattaatacttaagttatatttttaaaaatttggtaagtatttaactgttaagtattaagtcaattgtcacgtgacaatttttgattggtccacatcattaaatttttattttataaaaaaattagattaaacatactaataagaaaatgacacgtggataatgatttgatatttaacgatgacgttcttacgaagttctaaaagtataatttaagtatttatttacaactgggagttaaacttatgtatttatgtcgtaaattactcgtaattaagtaatacaacataatttattgttgtaagtttttgttttttttttttttgtcaatatttgtctatgtagaaagcttattattatatataaaatatttattaagtatttgggagaggttaaaaaaaatgaagatatttcatgcaaaggaaaagagtaacatttacacttagaaccaaggtcaaattctattgttcttcacaaacaactagaagaacctttaatttctttactcgtattttagtgttcttaaagtatccacttctttttgctcatccaaggaagagagtattctatttattgtgacacaactagattttcatggtagaataagttgtcctcgacgattggttcgagataatgaaaagaaatgaaaatgaattaattttcgtttcactcatttgtttagttgtttaaagtactaaaatattattaagtatttaatagttttttatatttttttttatacattttaaatttaattcttatttttatttttatatttttattcttttcaaccaaatactatctaagaattagcattcaataataaaccaatagtggtaataccatcattatggtcatttaatatttgatagggcaacattaagtgtagaagttaagttgctttgcctttatccatatttttggggatacatatagctttttgttgaggtcgagttggtcttcatttacctttttatcctagagttgggccaataagcatgactattaggctatgttgtgccttatttggatcgatttattttttattctttgccactttatttagcataaatgcacgattaatttttttgttactaaatgataatcttgagggtaaatagcggcataagtacctaaagttttaagtttgtaagtagcataatttcaatgtttatttttagcggcat

SEQ ID NO: 15743 - DNA, 4132 bp, Cannabis sativa
agtagagttgttttgtaattgaagctatgcttcttgagtgattgtgtcaagaacacattgaatatcaactttgtaattctctcttctagttcaataaagattcaagcctttagggctgttctggccgaggagtaggcaagtgattcatcatcacttgttcgaacctcgtaattctggttgtgtttgattttttcttcctacattcttgtctacaattgttcatttctggtttattgttgctggtttatacattgttgttctctggtttttgaatcaatttgagttgcaaataaaactgttagcattgttcttgatcaatatataaatggttgtatctaattagaatcaagaattatcataagagaagatacacctacaataaaacaagaacaaaatttcaaagaacaatacaaagaagaaaacggaaagacctcaaatctgtgatctgttttgttatagttgaatttacataatgtccactattggtaaatgttgaattttggaataaacggggccctcattcgactgcactcgatccacaaaattcttgggcatgttccaaataccaaatttcttcaactttgttagatactgaatgccagaaggaacctcctcaataagtggacatgattcgatgatcaacactttaaggagtggcaacgcccctttatctatcttcataaacttcaactcaggcaaatattttaagcgaatctcgttgagttttggaaaactgccttcctcaaagtgtagttgcactccttcatatgagttgtccatcaaaagaaggcatgtcagattgggcaagtcctttagatatttcagtggattctctgtcaattttgaatggcgtagaatcaacaccaccaaattattaatatctaataaccaatgagggaacttgtttaatcgacctgacaagtaaagcgtatgcaacaatggaggaggagatgatgaaatcggttccaaatctagaatctcatcaacatcaccaacactcagaagcaaagtgtggagatgattcaacctcttagagacatcacatatagctctagaagtttctttagtcaaatttgaaacacccaacatcttcaaattgctcaaattcttcaactcatttgtgaaaccaaccacatcttgatacacttccacatgcaaaagaatttctaaattctttaaaaaactaaatccttcttgtatctttaccgcagacaaattggctagagaatcctctttacatgaagcaaaaatttgttggagattggaaagcttattaatctcctttggaagctcccgtacaaaagcttgcaaaatattcaaaacacgtagattatgaagcttgccaatggattttggaagcttatccacttgagtattctcaagactcaaatattgtagatcatgaaggttacatatagactcaggaagagctttgatatttgtatctttcaaattcaaatacctcaattgaaacaaattccccacttcttttggaagataatctagaggtgcattttcaaagtccaaaactttcaatagctttaaattttgaaacaaggcaaccataaaggacttgtcaatacactcaatctcattgacgtttaaaagtaaaatcgagcgaatagttgtgtaatgttggatttttctagttatagatgttggtatggttccatggattgacaagcgacgatgtttgttttcatcaaattctgaagttttttggctcagaatttgacaaaagcataaatcattgacctttgatatgatgaactcatgcatcaaatcatgcaccttgcaacctttcactgttccatataaaaactcaagcgaaactaaatttctttcaacaagctcattcaagtatccttcagcttcttcctcaactgttttgccttctcttgcttgaacaaaaccctcataaatccataatccacatagtctttctttctcaatcaaataatcttcgggaaaaataccaaaatacaataagcaaggtttaaggtggtaaggcaaatcacgataactaagggaaagaattttaaaaattcttgtgagttgaggatttgttttgaattcaaaatcgatattatcaagaactttttgccactcaaattggacattttttcttgataataaaccagcaatagcccttattgcaagaggcaagccttgacatttttggataatcttatgagataatttctccagctctacaggacaaagtgtctttttacaaaacaactcataagccatatcatgagaccaagtttccaacttttggacaaaatcacatggggctactacttcattgcgagttgtgataataaccctgcttccattatcattaccaggcaaagcatatttcatcttttcccaaaagtttgtatcccaaacatcatcaaaaataactacatacctttttgtctccaaatgttgcctgagtggtgtaattagcccttggatcatcatatcatgacctaaaatactgcattcagcttttagtccaaactgccccatcatgtccttcaataaaatcttcatatcataggattgtgacacagtgatccaagcatggaactcaaatttgtgcttcacctcattgtacactttcttagcaagagtagttttgccaatccctccttgtcctaccagtgaaataatcatccgctgagactctccttccaacaaaaagctttttagttgtccctgaaacaaaggaatatccacatattcttcatcttcctcaacaaaatgagcaccaaatcgatcaccatgctcttctgtccacgaagttttgtcacctgaaccttgcaaaccctgtagagattgactcaaaccaaatccttgacccacatctttgatttgtcgcaaagattggatgatgtcttcaatctgagaagatatagtataacgtgacttcaaagctttgattgggcagaaaaaaccattgaatccacacttcttggtggtactctgcgccacatgccaccggtattcatcaatgacatcgtttatatgatcagcttcttctcttagttgcttcatccaaactttcatagcatcactgatcaaatcttctctgtttgcctttgcatctgcatctttgagaagagcctggatgatatccagttctctctttaggctttcaacttttttacggataccctttatggatccaatttcgtctttaagtagatcaatcaagctatgaatgatcggagtcaagaacgtctcagccatttttcttcctcgcttttcaatatagctcccttcgaaagacaaatacaaaatgactcctaataaccaattgttatggcatacagagattattatatttttgctgaatatacaagaattatttatgaaagaatatttgggaaagaattaatacttggagaatatgcagaggaaacactatgtctggcagtgattattgaagaaagagtgacatagttgcacccaaaattttcgggtttagaaaatgagaagttggttgatcaaagaaaagatgatgaagaatcagagaagaaaataaggaagattagataagtgttgtaagtcaatgaagacttggttgtggaagaataagctttatcactttttctttcgtggatattaaagatgccaagaaaaatgatgtatcccgtatccacaattttcagccgtttacattaactacttcaaaacaattattacttgatagtgataacaagagcattcttaataggtatcagtcgtgcctagcaccttcttgacatgtcgcgttgcgattggctagttatactcgctaaaaactattatattaaattatgtaggacctaatacttaattagaccaataataatattgacacataggaggtgctaggcaccgtgctctttaacatttctcttatagcaagtatccctactcatgcaaataagtgatagtgatgtaaaaataaaatatagtttattttataaaaaaaattacttattttattatttaattttagttagcttgattatttgtattaaatgatttacatattattcttaatttattattaaattttatatttatattcacaatattattattttatatttctaataaattattagatgagacatattaaaaaacaataatctaa

SEQ ID NO: 15744 - DNA, 5793 bp, Cannabis sativa
ttaggaaaaattcaaaccgcgacctcaccgcaaagaatttcaaaccgcattttttttgtggtgcggtgtggtgcgagcggtttgatgaacacccctagtgatcaccaacaaaaacccacgaacaatgttccacaaaacatgcgaaccccaattgaccaacccatgcagaaagacagggacgctcatgtcccaaggttgggtcaatcgatcaattcgtggagcagagtcgtgcaggataatggtctaggcactcaggtgcacggtcccaatgttcggggatcgaaaaaccaccccggtgattctattaaccaacatgttcaggtagaggacctagaccttgaagataacatgtctacagtggaactcaaggcccacttaaatgtgaaaagagcaagggcgaagggtgaaaaagccatacctcgcagatacgatatgtgaaatagcattaatgatagaatccgaggacatgaacatttgaacgatcatacaagatggctggaagattagatagcttggactggaagaaaagtggatccgcgtctgattcaaaagatgaagatctgaaaccatatgtgaagggaattatcgaggtgcaactaccaaaaaacttccagatgtcacaaatagaattggctgaaggtaagaagggcacagagaccatctattaaaatacaatagactgatgtaagtggcgcaggtcggtaaagatacaaagtttctatgcttctctttgacattatccaagtctatcgaggattggtagaaatgattaccattaaattccatctagagcttaaatgacctataattcgtgttctagaaacaatttatcgctacaaaagactttgttatgaggtcagtttgttgactgacatcaaacagtaacctagagaaagtctcaaggcatacatccattgaatgatggaagcggtagctaaaactaaagtaaataacaatatgaagttggtggctctataatcaagaattacagcagggtcctcattttggaatgaaatgcaaacgaagagggctgacacattgtcaattttcttgataagagcccaaggattcattagcttggaggaaacatatactagagtctttggagtggctctgacaccatcactcaatgctgacaattccgtgactgtaccacacttgctagctctatctattttccctcccgaaacccaatacacaatgacatctatttataaacctactgccttggggtatgcgcctccaacaacaagtttctttagttttagagcaacacatactagatatagtggtgctcccgaataggcacaaagaaaccaacatgcaaaagttttggaggcaggagtgagccggtcacagaataagagaaactggaagagccagagttagagtgaggctccaaagaaataaaggaagggatatgaaccccagtatactgagtataccaacttagttgacatgcgagaaaatgtatacaggggtacatgcaactcagtccactaccgaaagcccccacagatgtaaaagggggttaaacataagaaagatcctagtaagagatacgaatatcatagtgatgttgggaataccactaacgaatgtgaccacctgaatgatgaaatggagaacctcataaaaaacaaatgcctccacaagtgggtaagaattcttatcatttatataggaccaatggtaggtcaaggataattggtaattcccagataacaaggagtggtttacccataagctccgagaatctaagcttctcaagggctcccaaatgtccaagctcctggaaacatccaagctttcgtactaggaaaccgttatccaccgggtaggtgttcataaaaattgaaaaactgaaactgaccatcaaatcgatcagaccgtaaccgaatttttggttccacgtcatcaacaaatttggcagtcagtttcagttatggttttttttgatatggcggtcagtttcaggtttcgaaataaaaaaatggttaaaccaaaaaatatcaaaaccgctaaaaatcgccatagactgccaaaaaccacctataatcgccaaaaaaccatccaaaatcaccaaactgaaaaaccactaaaaactgccaaaagccgtacggttggttgtaaacggttataatttctaaacggttggtagttcttgtaaaataaaaatcgtaattgaccggttggttataaatttataaaaaccgaccataactgaccgattttcacccctaccaccggggacagctctaccacctgtagatagtcatgtggccacgatatctggaggtccacatattgtcggtggtacaagaaatgctcaaaaaagatatctcaatgagcttggctaggaaggggaagtttgtgccttagtacaaacaccaactcaaaggccatggatgatgggtctgcctatttcattcgtagaggaagacatgaggcacatgtactttccccataatgattctttggtgatcgaggcttaaatcaccaacaaaagagtattcaaaatgctagtgtacaatggaagtttggtcaacatcctattcaaggtcacgtttcaagcgtttggattaactgaaggaaacttatcacctttccagatccaacttcagggctttaatggagactcactacttcaaatggagaagatccaactcccgattacactgaagataaggataaatggaagcaatacttctacgaccttcaagtactacacatttgttatgctggattgtccacccacctgcaatgccattctgggatgacctgtcctagttgaatttggagcagtaaactctatccaacacgtatggatgaagttttcatgtgataataaaagtattaggatagtgaaaggtgatcaaaaaagtgtgtgaaagtgttataacacctcgtccatttcaatttttatggttagagaagaaattgaagaactaatgtttgaggcaccttcctagctataacaggggtggcctagaaagaagacgagctagacccccgaatgggggtagaaagaatgatagagccaatagaagagatggaataagtgagaatcagtgagatatatgccaataaggttataaaagtaggttgagccctgcctccagccataaaagaagaaatagtgtccacaatcaatggcaaccaagatatcttggcatggaatcatgttgatatgacagggattaattcccaatggtattttccatgccctgaacattgaccaaaatgtcaccttagtcaagcagatgtggaggccacttgattcggtacgcttaaaagtcgtcaaagtgaaagtcaaaaagttaacagccatagatttcctcaaggaagcactttacctagtacgggtggctaatccaatacttgtccctaagccaaatgagacttggaggatgtgcatagacttcactgacttgaacaaagcatgcccaaaagattgtttcctacttccgcacatagactagatggtagacgatgcatctgaatataaactactcaattttatggatgcgtactcaggctacaatcaaaattaaatacacgtggcagatcaagagcacactaatttccaaacggacaaaggtgtgtactgctacttggtcatgccttttgggctgaagaatgccagagccaactaccaacgactagctaataagatgttcaaggatgtgttgagaaagaacatggaagtatatgtggatgacatgttagtcaagtccaagacagctggggagcacaacaatgatcaagaagaagcattttctatcatttggaagtatggtatgaagctgaacttaaagaagtgcacctttggagtctccttagggaaattcatgggtttcatcgttagcttctgaggaatcaaagccaatccggagaagattcaggattttataaacatgccttccccaagaaatcataaagacgtgcagagtttaattggaaggattgctactcttggcaggtttgtgtccaaatcaacagacaaatacaatttattttttaacgccttacgcggaagcaagcaatttgaatgcacaactgaatgtgagcaggccttccagacgttgaaggaacatttgatcagagttccagtgttgtccaacccaattaagggagaactgttacttgtatatggaagtgtctgttcaagccatcagcgtcgcactagtgcgagaagaaggaagggtacaacttttagtctattatgtaagcaagagattgctgggcacggagtccaggtatccgatgatagagaagtttttctatttcttattgatagcttcaaggaagttaagactgtactttcaggcccacgccatcaaactatcaaagtactcacgaaccaccccctctggtgggtcttgcaaaagccagaatcctcatagagattgctgaagtgggaaatggagctcaatcaatttgatatacaatatcagccaagaatatccattaagggacaagccttaaaagattttattgtggaatgcaccaggataaacaatgatccggaagaaccaactttagactaagaagtctggaagatttatgttgacggagccttgaatgagaaaggtagggataatgcccatttcctcacaagggctctagctacaaaatgccctctgatttgagtttgctgcctctaacaacaaggcagagaatgaagcagtgattatcaacttacacttagccaaggaagtcggagccaaaaaatatcgaagtttacaacaacttccagctggtggtaaacaaaatatatggagaatatcaaacaaaaggagaaaaaatagttgcttatgtaatgccctaacctctaaggatgccacgtgtgtgcttttataaattaaaagggttacatcgatataaatattttttcggggatcccctgttacaaaagttttacaaaaggttttgttcaaattttatatcaaaataatatatagtcaaagtgccaaaaacatattctaacaactcgcactgcaagttggataagttgatatgtacatttactagagaagactgctgactcatggctaacctaatttacccttgcctttacctgcaccataaagcacccatgagtcataaagacttagcaagaaaagtaaaagataatcataaataagcagtacaaataatcacatatataacaatccaattctacacaggtatttgtttaataatacaagttatatttgttacttcataaaataacccttttcattgttgtctaatgaggcaaccctgataagcttaaccaggcattcagtgtcactatcattacctaataaggtaaccaataagtaagaaacctaacaacgatttcaattgagagtaatgactctttcttgtaaaacaataattactatgtcttataattgacaataattgaatcacaaacgataataattgtatcttatctcgacattctaagcggtacaaatgtatttttcttatctcaaatccttattcaggtgtactgaccaacctgagtggagaatagacgatgatctcggaccctacgtcacaataatagtaaattaattaacaacttgatctaatctgttctaggtcttaaatttaaaagcagaaatttccctattgataaatagcgtggtaatattctaaatatcgagaaaacacaaaaattgagattcccgagcttcaccaaaaatggtagactgtatggaaaaacggcaagccatttttctgccatgtaaaacagtttaccgttttactggaaatagtctactttttccgtcaacttgtaaa

SEQ ID NO: 15745 - DNA, 5038 bp, Cannabis sativa
tttcgaatctggtgggtgttttcacaccctttagcttccctttttataaaatgggttaaaaaaagggaagctaaaggcccatattgtagtagtgtagtatttttatttacaatattatgtcactttctctaactaatttaaaccttgtagggctcgtttggtacgccgtattgtattgtattgtgttagattgtgttgtattggtattaattgggttgtattaatagattgtgtaaagttataatatattttcaatatacagtcaaccccaacaccaactataggtctgtgtgggtctgggatccgggatcgggtcccaagtctaggtccaggtcccgggtccgggtttgggtcccgagtcccgggtccgactctgggggcttggtctcgagtctgggtttggggtctgggtctggagtctgagtccaggtccgggtccgggtctcgggtcccgggtctgggtccaggtctcggtccggttctcgatctgggtcccaagtcctgggtctgggtcagagattggtgttgaccccaaatcttttgcaaatattataataagctaatacagactaattattatgtattaaataatataacatacattgtattaaaattttttattgtaatattaacaactagagaattagttttcaaataatctttgcctaattgttataattactgtaaattaattagttataacatttagctgatttaatgagttgtgtaactatttcttgtaaggttccctgtataaataatttaaagctcatcgctctactgaaagtgaagcttttttctttcttttttctgttttgctctgctgcttttctctcatggtcataccttctgggttttaccattaatcttgaagattgtaagcttctacaggaaatagtattatacaatactattataaagcgatagtttgagccatgaattttatttgatacactattagactcggttcggtatcaaaagcattatctatgtcaattgttctctatcatcatcaccacttcctcaatatatgtatataaatatacaaatattatttatgatgatctattctcatataattaataagcaacattggattggattagatgttcaaacagtaccacttctatttaattacaataaatcccactaccacaaatttaaaaccttatccaagtggaatcaatgaattaaagaaggagttatatatgtaaaagaaagtggaaaagaaagcataatggaatttgtaattattccatgctcttaattaaggttataggatcacactttctgggaagtatcgtaaaaggctcactcttagtgcattgacactttacaatgaaccaattaactttatagcccacttaacattcttttcctctaactttaatttgcttttttcccatatataccatttgcaattataatattacatatatgaatactatatatgtatatacatatttataaaacaataactaatttagttttaattaccacacaaaatggacaatcatgaccaaggagaggcttataatacttctacaaataatcttaatacttcaacaccttcaaactcttcttctcctaagatctctacacatactcaatcttcaggcagccaacaagttattatgacaataggtatgattatttaattatatatgcttttaatcatttccatatatatgttttactacaatattacgtagtgttaattattaatatattactgcatgcatgcatgtgtacgtacattatttaccagatgattggtcaagaagaaatagcctcttccatgcaacacttagtggagactacacaacagccaaaaaaatcatcgacgaaaaccctaatattttgaaaaaagattttttagagagtaaaggaagaaaggaaacggttcttcatgtggcggtcggagcaaaacaagccaaatactttgtgaggcaacttttgagagatttcgaggactacatcgacgtgtccttgaaagattcaatggggaacacggcgtttttctcagcgtgtgcggctggcatcctagatatcgtcgacgagtttctaaaattaaagaattgtagagacttcatcaccattccgggtggcggagatgttagccctctttacattgctgtttcatttggacatggaaaggtagcttcacgtttgtactatcaaactaaaagtttttatccaaattatttcagccctagaaatgatctacaccaaagaagaaattatgggatttttttccaatgtatctgcaatgatttgtacggtaagtacttggaatatacattttttttttcccattttgtgatatatattatttttttgagtacatatatacttttatatatatatatgtgtatatttttcagatttagcattaatattgttagaggatgatgacataacacaaggtgtggagattgctcgtctggaggacaaccaaacagctttgcatttattatctcggaagcctcataccgtatttgcaactcctaaatttcaaggtcggtcttttatataaatagttattagttgcattttaaagtattagaatgacattctaatgaaatgctctttccaccattttggtggaatggctattctattttaaaaagaaaggaatgaccattccaaccaaacgcctcctaatagtgtttaatattatatattacgaaaaagtatatatcttgtaaataataaataattttctataataattattaaattaaaatatttaagtgttacataataatactagtgctcaatctttatcattttgtttttttgttaattttttgcaatatagctaacttttgtttttgtggaaattctgacttaaatgttggagactattttgaaaaatattatttattaaattggacaaaagtgaaaaatattaataactttaaattaggacaactcaaattgctaaagttagcttctccacttaaaaataaattatatttgccgtagcatgcattgttattggaaatttcttatagtgatgcaacatatcaatatttagaaaaaaaacatgttttaattataagtattataatttccttaaagaatattagttaacacataaatctgacacatatttatgcaatatcactttaaagatatttaactaaaattttctatgtggcaacgcacacacttatatggttaaaatcacttgttatacaggtgtatgttaacttgtgcgcatgtgttgagttttattgtgtgtgcataatcacacacaaaaataatgtaaatataattagttataatttttgtaatttgtcataaattttattgtcactaaaataaaattaatttgagtgatcattacttatatatatcttttataatgatttgttgtgaataaacaaaatctcttaatatatataatatatataagtgattatgtgatctaacatatatattttataataattaggtactctttgttcaagattaatattgggccaatcaacagttgaggaatcaaaagcactaaaactagtaaaagtggtttggaatcgaattttagaggcaaaaaattacattcattctgaaatcagtaaagaaattcaattcccatttcacttattaatggaagcaaccaaagttggtaaccatgattttttggttgtgattttaagtgggtatccagaattgatttgggaacgtactcatgagaatgagaccatatttaactttgcagtaaaaaatcgtcatgttgatatttttaaattgatacatgaggttggtttatcaaaacaaatagtacaaaattttgaagatgaaatatcaggaaacaatcttttacatattgctgcacttaaaccaccacacagtagacttcgtagtattgttggatcagctctccaaatgagagaacaaatcttgtggtttcaggtaattcatttcttatttttatttccttttcaatgtggatcataatttatgggacacgattttttcctgtgatgtaactttcacggaatgtatttcgtagtacattagatgggtctccgtgtacattagatgggtctctcagggtacgttactattttttaaccttaattactcctagattaaccccagccctcagatcaaataactcccccatctaacggttgtcgtacatcacgaaatacattccgtgaaagtacatcacacaacaaaatagtgtccccataatttattaattaacattatttttttgatttgaaactaaattttatattatttacaaactattcttttcaattgtaggaagtgaggaacattgtgatcccttcattaaggaataaaatgaatttaagtggtcaaacaccgcaagatttgttcacagaaaaacataatgatttgatgaaagactcagaaaagtggatgaagaaaaatgcaaacatatgtctacttgtggcaacaataattgttacaataatctttcaagcaaattctgatatttcttcttctggggatgaaaatacaaattgtgacatctctagggatcaaaatgcgaattcgtcgaatattgaaagctccatagtaaaaaatattctcttgatatccaacaccattgccatgtcctcttcttcaatagcggtaatgctaaacttgttcataataatttctcgtttctcagaagatgacttgtttcggccattgccaatcgcattcatcgtgggaattatttcgctttacatttctataactttcatgatgacaagtttttgccttacatcctttatcggtactaaatcgttagcaatacgtatttttacttgttttttggagcttttgccagtaattttatttccttatcttgtgtatcctatttttattgacttaataaatatgacatttttctcaaaatcaaagttcaagcctggaaaacgagtacttggacgatcgttatgatttttggtgaaataggtcatataatgtaattaaagattggtggagaaattgaaggattattattaattagagatttatgtaaattataatattgtaactatcttttgag

SEQ ID NO: 15746 - DNA, 2920 bp, Cannabis sativa
tctttgattcacttgttaaagtttctcaaagaagatgattcttacaacttctgttttgggagcttaataacatgagtggttggggacatgttatatacaatagtagaattcaagttttcttaacagatcgaatattaattttcttatagtgttaattttgagagtgctaacagttggatctaaatctataataagttatatattaattattcacattggattaaaggtacacaaggagtcaagagataattagaagggtaaaactgtaattttgaccaactctaattataaactaataattagagggtgaactacttatattaattatatcaatggactacaagtatgaattctgtaaatataattttatattgtcaaagagtgcaattctatatttatagtggagtaataataaaattaataaaccaggttattctattaatgagatcgataataattatgtgtttattagagcttcaagatataagttcatggtctatgagtcacctctatacaatactgtataggggaaggttttatttgatgagtaaatttgagtgagaattaatttctatgagaaataaatttttaagggcaaaaaagtaatttatgaaattattattttgaataattatgacaattatgaattgtataattaataatatttaactacttagttttatttcataaaattatattaattagttaaatataatattattcttaaataatattaaaatggataaatatattattttagagaaagtaatatttattttaattcttgtgaaataagagattaatgagaattaataaattattatttattgatagaataaataataaattttatttatgacaaaattgaaattaaattcaattttggaccttaaaatatatatggcccacacgtgtaggtccacacgtgtaggatgacatataaaggcccatgttaactttttttaattattttattagttaaaataaattaaattaaattaattaattatcttttaattattaaattaaatatattattggataatttatttaattcaaaagatattaaatattttctttttattttaagggattacttaaaaggatttatgtataacattatatatatataatattagaataaaccaacaacctaaaatagaagagagcataacaagtagagaaattaggaattgaattattcactccctctctctctctctctcctagtctcacacgcccacacgctatgaagtgtggtatgagattgtgatcaaccatatctcagttatactgtaatacataaattgttcatcataaataatctaataatccactctaatcttgagtgttgatgttggcttggtagattgcagtgtgaattcttcaacgaagtgtttggattggatgatcgtaattatactaaaagttagaaaggattctatgataggctacaagaagtattgtctttctatctattatataatctaaatatttaatctatatatattatgttaagatccttgaaataatggttcatattagacatatatattatttttctcgaatccgtttatgcttttttaactttgatatggatcataagaatcaacagttgatttcaagagctattttcgtaatatagattaaatattattttaggtatatatgtatatatatatatgttgatatattgtgaagtatggatgtgttcaaatttatccatgaatgtgaatcgttaattataatgtaaaaattgagttaggaatttttatagttttttattagaaaaatggtacaccataattatggtataagtttttgttgtcatttattattaaattttatttgtaaattttgtcaaattatgtaatatttaaattcacaaattcctccattgatgagtgagcttgtattttatttttcacgtaagcatgcatgtcatgcatagccatgcacgactagaacacgtgaaagagagaaggacaacctaattgggttcgggttgcacggacaaccacgaagggacccgattggtcctatgactacatcacggtggtcgaccaaccctacagggccattggtcaacgtcaacgatgggggaggaggaggacaaccgatcccgaaccgtcaggctccgtcgagcttcaaaccgggtcgtcttgacccgttaggttcgtctggagcttgctcgagctggcaccggccctggtggctttccagtcaccggccgacgatctcctcccctctcctgcctacctcgactccagaccagcccccacgaccacatatggaagacccccattgtatatatatgtatgcgtgcgtgtgtacatatatatatatatactttttattttatttcaataatataattattaatttaaaaattaaaaatatgagatatgtagaattttattactatcaaacgacttgtttgaagaaaagattaacagatttatgaaaatagtgagcttaaggactattgtcgtcattttttgaagttggaggcttatttgtatcaaattgaagtttttgagaactatgctgtaattttccctaaattctttaaagagagtactaccctcaacctcctattacaatctccgtgtctgaaaacatatgttggaatatatttttcaaagacggtacttgttatgcttataatatcattcttgtaattttttaaaaagtttaaaataatttacagtatttaaaaatatatgaagctttttgaacacgcagtaaattagaatatcataaactttgtttttggtattgtaaattattcaaaaatttataaaaatgatactgtaattataacgaataccactgtgaaaaaaaaatattttgatatataatttaagttgtaaaaattgaattataataaaaaactttataattaaaactcatctttccc

SEQ ID NO: 15747 - DNA, 3933 bp, Cannabis sativa
atacatgatgatgatgatgatcaaaagactttttcgtattcgtattaaatttcacattcacatatatatatatacatattttttaatttcaattttattgtaatagtagttttttcaatagtgagtatgatgtattatggaaaaagtcacagatgcatatttattgtagtgtgatgacttggagaagatcaaaaaagccccagcagttttcaacaacaagtgtccacaactataggactctcaacttccttcatacgacggcgtttaatttgttcacatacataataacaataaacgagcatgacctggtgattggagtagttttggacactgactgaatgagtattattattagaaaaatcgagtcaaaaaggatcaaggccttctccaatacacaaattatcaactctatattaacaattgattcttaatttgaacaactattatatatctatttataaactatatattgtagaatagatggcttccattccattccatgatatatatatatatatatatagtgattaatccaacttaattcataaaagggctttattacttgtccatcagaccatatatttttagtgtaaaaatactgaaaatcttttgctaaatatcttaaacacagtactagaataaataacaaaacaaattaataaacataaaaattataataacaattatttattattaattaaaagaaagagtagacacacagatcagaaattattaatcatcaaagttttaattaattattctctccctccctcactcttaattatctcatgcattctcttttgtataatgataataatcatatatcatcatcatcatcatcatcatcatcttcatcttcatcaatactgtcttcatcacaatcacagtcatcacaatcactagtactagtactactaagactactgtcaatattaaaatcaggatcatcttcagcttgtacattattattatcaccaccatgattatcaccatcaccatcaccttcatcaccttcatcaacatcatcatcatcatcagattcaattacatgaacaaatattacaggttcagattcagattcatcaggaggaggcaactggtttagatcaaaacccgtggtggatccagtttcctcaactcctcctactacatcaataatatcatcatcatcttcatcttcttctggaatctcagctaatcctcctggcaaattaagatcaaaacctgtaacattcctacctgatccactttctgacttagtctcatcactacctgctgttgctgccaattcttcttcacctatacacatattattagtttcatataattagtgatttattaataactaagcattgggaaactagtgcaaaagtttaaaattgggaccatttaaaaaatatcgtcagcatgaaaaccacaattttattaatttataaattttttatttatgtatgtataataagaacaggaaaattggaactcaaaaaaatgggaggcttgtacaatgaggtaattataccttggggaattagttgttggggaagattaataggaggaggaaaacatccaggccaatctctttcagtattatgtgacctcatgtgttcaaatagtaatctccatgattgaaaatccttctcacaaatgttgcaaaccggcattaaagcatcttcattgacctcaatctcaacaaacttccttttatttttattattattcatcttcaatatttcttcatcaccattatctgacaccattacattcttacccttgttatcgcccccaccactactactactagctccagcagaacttgcaggtacaagaatcgatctactcaacacacctctagtaaatggaggaaattgaggaacaagagcaggaggagtaatctggcgatggtgatgatgatcatttattattggtggtagtgaagatataggagtagggttcagtggttgagttgttgttgtagtagcacgactaagaattggaacaaaagaacccgaccttctgtgtctgtttgggcatagtatagctcgtgcttcactaccgctaattgtatgaatcacaggaaatgaagcagcaggaggaggaggaggaaaagccatagacaaagttgttgttggtactactccttgcccttgttgttgattattattattattatcactagcaggctcaattgatgaaatagtagttaggccccctcctgttattgttatatatatatatataggagaaataaacattgttaattagcactaccattactattaccaaggacatgagttgaactagctagtgtaacagactcaccagcttgttggctactaagacgaagaggagtagtactagtcacagtacttggcgttgatcgactggtaaaaggcggtggtagtggtggtggtgggcgtcttatactaaccacttgtccaggccgaatagaagaaggagtgtttggaacaggagcaacaagtgctgagctggcagcggtggtggcggtggaggcagccgtcttagccaccgaaattattggtagttttgggcggcgtacaaattgtactaattttccagtactaggccgaacatgacgaatgtttgggacaagagacacattagatgggttcacagaagaagccaccctagcaggagttgaaagccgaggctgagatggcaacggagggaagcctggtgggcttaacagttctgaaggatcatatttcttttcaataggggcagtcacaacagtggtggcagcggctatggtggtggtttgtggttttggtttaggctcaggctcaggctcaggctcagacttagggtttggcacagtggatggattaatggttgaagaatcatcagatgaagatgatgatgataagtttgtgagagtattcaccgtcgccggaggtagcgacagtagtggagaggagggttcaaccttagtgtcggtggtggtggtggtggtggtggaaggagaaggaggaggagtaggaggattgtttggagagttggtcatggtgtttttgggttgatgaaaaatttgaatcaaaacaaaagaaaagaaacacaacttctcttctctccaaaactacaaaacaaattaattcaacattataacaattgattaattacattaaaacacatgtaattaaattagagaaacaaacaacaataacaacaacaaaaaagtttcatatgatttatacaaacatagatctacagacaagtcgagcaataacaaatatatgtagtttttttactgaaattattagttttcacgtaatgaagtgaaggtgaagtgaaaaccttaataatattactacttggaaatgtctcttctataccacctctagagaaatcaaatccacaaacaccatttctaaagtaaaaataaaaacatagtcaaaaataaaaaagaaaaccattaaaaatctacaacaacaacaagagaaaaatataaaattatatagtcattaacaaacctttctaacattcaaaaaacttaaagtaaacaaaacaacacatcgattcatatcagtaatttaataaaataaatttaagagagaaagagagagtactcaaacaaactaacccgagttatggagcaaaaagatcttaatgagaagaagaaaactaaacaaaaagaagaagaaaattgtttgagtgagagagtaagagagtgagagagtgagagagtaataagaactcaagaaattaatgaagaagagtgaaatgggtatggtgaattatgctcacatatatagtacaaattttttttaaaaaataaataaaaaaaaagtgtttcctttagggcaaaatgggtttgaaaaagtgtaacttttagagaaaaaagtattcatatacatatatggtaacttaaggaaaacaaaccaatcattaatgtctctcctatattgtaactcacgt

SEQ ID NO: 15748 - DNA, 2813 bp, Cannabis sativa
atatcttaactaaagagaaccacacggggtgccttgagttcagcaatgagaatacacagtgaaacacacttgctctttattaacaaaattgaggaaaccttacttcactgtcaactcagcgaaatgaatagcaagaaggaaaaggcaagcccaaaaatgttgtatggcaagttgcaagcaaacaattgcaatttagcataacaggaaaaggatgagaatatcgacacaacataaatcaaggcaatatgatagctggtacaacgagtaagatgactttacatgtctagttaagtgcagaatcagagccaaactttaaacttctaaattaaaataaataaaaaaacataaggatggtgtagaccgtagatggcttgtggttcattgcataggcatatgtgtgtgcgtgtgtggagaataaaaaagaaaaagagtttctggtcattggtcttgattcttgatgaacaatcctaataaagaaatatcagctgaaacctattagagcaaaatcaaactacaattggttttgtagtccgaccaatttgtatgagaagtggacagggactaattaacaataataacaagaagaaagattcaaaaaatagcgactacttgcatctataccaacaaaacatgaactaacacataatggtgtgtagtttcctcctatactctggaaaagaaaattcaaacctgaacaggagggaattcagatgaactggactcgggcctccaagatgaagcgtaaggtggtggacctggaggaggaccgggaggtggacctgggggcgtaaagggagggggaggtggaagtggacctggaggtggaggtggcagttgttggctgttcaaagttggatagctagaggtgacactaggaactgaacctccaaaattagatgttccaggcacagacagattctctgtcccaggagcacaggggacctctgactgattgtaataatctacccattgcttatattgttgttgataattatgtgatgttgcacttgcagttgcagttgtagttgtagttgtagccccagaactgtaagcactggttgtgcctgaattgtaatgtggatattgttgagaagaataatttgcataactggcatcattccacgaggtcgtctgattattgtaactgctacttgagtaacctccagctgtctgataatcaccaggattgtaataagtgcttgaataacttgcagagccagcataagacccagtattctgaaatgaggaaataggctgataaggagcacctgtgttttgatatgctcctacgggttgtgaataggaagggttagattgttgttgatagccgttgtagtagcttgagtatcctgagcttccataaccatatggatcagaagaatttgtgtatgatgcatatccattgtaatcttgtggtgcatttactgttcccaaacttgatgaactagaaacaggaggttgcatgtgttgttcatagtggtaggttgagttagaaggcattccactagatgtggagttatccaccttatgagctgtccatgatacggcttcattgcctgctgctaaaggaagatgcgaagatgtttgtccttgacttgcgtatacatgtcgattctataacaaacaacaatttacactatgttagttaatagtcaatacaagcattgtaagaacttatgtcaaatttaaacctcaactattgcacaagatacaagttgttctagacatttaattgcatcataaaaataataattttgcaactatgaaagacctagaagcatgccatataaagtcgttaactgtttcactagaaagtgcttgcataggaaaagattaagcgccagttcaattatattacatcaaagtaacagaaaatacacactaaaactggaaacaacaccagaagtttaacgatgcacgagttattctataaagcttggttgttcttcatgtagcaatcattagtgtatactagccctacctcaaacttccctaaggtaagcaaatcgcccgtgatgtagcaaaataagaaaaatagaactatcccatcaaactaatccagtttggtgttacgaaagataaggaagctacctcgagcgaattggagtccagtggagctatggcctcggtattacctccttggttcatcattacattaacattctaccaaagacaaaaacaaattttcaataaaccaatagctttacttaaaattaaacaaattacaaattagacatagcataaataactgcaaaatcatacaaaaaccctaattgggtcttagaaaatcctatcaatacttaccttcaaaaaagcaccatagagctcgaaaagcaccaaattcctcaaagataattcgaagtaggtcaaggtacggaagaaggaaaaaaaaacccaaggggaaaaggaaaaacaaattgagatcaacaagaacccagaaaagcaaaaatgaaattatacaacaaaaacgataatagaacaagtaacagtaatgaatggacaaccaaaaataaagtagaaacgtaagaatcaaaaaaccgaaataggttcggagaattttgagacaagaacaggaaaagtgaaactaatataaaaaaaaatacagttaagagagagaagaagaagaagaaggagatgggattgagccgggtgatggtgtaggtctggcgtgtggtgaaatggtgtttgggagggggtaggaccagggaccctcttaaacgttggcggtagagactagagaaagataattatttgcaaccccggctcactcagatttcctcctcttttactaacaaactggccctaattttttt

SEQ ID NO: 15749 - DNA, 4263 bp, Cannabis sativa
aaagagcacggcaggttgtctagatttctaatcatgggtttggtgctcaattaactgaaaacaatataatttcattggtgttctaacataactttgtatgctaaatgcagacactatcatttgcaaatgacggtaaaggccaaactaagctcgtctggaatgatgaaatccacaatccgaggaaaaagtttctccatcaaatatgaaatgtcaataaactttgctagaagctcatggatctgccattatttggcttaaagtggaggttggtctgtaacagatcacatgtatcttgagcttttactagtagtaagcttcagagtgtgcttttatcctgtaattcttgccctgcttccagtttaatatatggcataaaaatgttggcaaaattttggaaccctgtggcttctaattaccaaaagcgcattaatgtcttgcactatgctatattatatatataaacccatacgcaaaaatactcataataataataattaacttaatacaacatctgtgaccaaaacaattgactgaatcttgtatctgttgcttgagtgtcttagaataaatggttatcacttataattgtatgtctaaaatgaactacaaagacgggaaaaatactcatacatatatttcttttcttgtcacctggacctgagattcagtgtaatatagccacacaccttgatcatactttgctttagtacaacctgtttcccgcctcaaaaatcaacactgagaaaattataatacactaattctttttgccattcttgaggtttcgcacggtcatcacaagctgctgcctctcaccttctacctctgcaaatcgtagacttaactctgagtatcttccttccatttcttttagttcattctccatggatttactcttatccttgagtgatgcaacttcagttagtaattctgaaatgttatgttcactggcacgggaagaactagtttttgactctttctcagcttcctgccttgccaaagcaagttttgcctccaagttttccttttctttattcaatttctttaccagcatctctttttcaaaaactgatttcttcattcgctcggtttcatttttcaatcttactctttcttctttttcttctgcaagattggctttctccttattgagcctttctatttctgctctgagcttctgaatttctctcaagaaagcttcatgcttttcttccttgagattttgagcacattcaagttgctgggacttattgtttagctccaacgacatcttccctatctgcttttctttcagatcaatttcattaacaagttcttccactctcactttgtcctggtctctaatcatcacaagttcttctgcgactttctgaagcttttcttctagaattatgttgttctggcgtagttcattagcttctgtctgtgctttggcagcttgacttctgaattcctcctgaagatgctcagctttattagaacctttcaaccttatattccttaaggcctcctctgcttggttggctttctgttcttgctcaactttagcacgtttaatcgaatccagctcattttcaaatctattggcttgtttctccagttccttctccaaagctttaacctgcatttcaagttcattgagggagaccaaagcatctgcaaattctcgagcttgtttcttaattgtttcttctaatctctctacctgagattcatgctcttcagtagttgctatataatatgcgcattcattttctaattttgtctgttcttcttggcttcgctttaacttcaaagacatgtcatagttatcctgtttcaaaaggtcattgttcaacatgagctggtttatacgcctgttctgtttttccctttcctccttgtaaatgtctatttcatcacatagatctccaattttagcctctaataggtccacttctgcatcattgtgtttcttagcaatagattccgatgattgttggtcaaaccctgtggaggcatttttagcagcttctattttgcttgaaagatccaatatttccctacttttttgatccagtgtatcttcaagatccctcacaaccagtatcaattcagagtttgagtcttgggtcttctgcagttgcaactgaagatcattacttaattccttttcatgattaagctcctctctaattgcttctaactgaactttcgaatccttaattgcagcctgtaatctttttggagcctccgcctcatcagtactttgcaatgacttgaattgttcacactctgatttgagtgcatctctctcctctctgagaataacaatgtgtcttgataaattctgaccttgtttgatctccttctcaacatgtctccgaagagactgtatttcaagttctgaaagttccgcttgtctcatcaacatggtattttcatttttgagtttttcagtggaatcatctgaagcttctttcaaccgcacacttggttggttgtcttccaaactgctcggtgattcaagtaagctgtcatctgaagctgaatctgctgaccagttcatgttagatctattcagacttctcttatttgtctcagaaccattaacccttccattctgtggggcagaatttgttacgaagggtgagagaaagctcgcagcatcccgctctgcgggagtcatgttgttgtagttttcatcctgaaaaaccataaccaagaacacattcacttaaggttcatcataaaagagctgtttttttcttagagattttgagtttctgatatcaaagtactgtttggggaaagaaatacaaaagctttaatatatcttacttcagtataatttagattgtttccatctgtatcccagttgctcccatgactctccacacttccattctttacaagttgaggggctccattttcatctctgagattaaaaactacattttcagtaactagcagcagaaaaaaggggaagaaaattcaataaaaagagtagtgatgcacaaatagtaactgattgttactgatctttaatcacctttcatcatctccaagcatcctttgaatcagaacctgataattttagttgaatgtgaggaataatgaaacatgttttacaattaaatcacattcaaataaaagaactttggaagaaattggtcagtgagaacaatactaaaatagctaaatcatgtgagcatgtacaggacagaaagagtactaacatgtaaaattgcaccagaatttgcaaatttgagaggcattgagacagtcaatggttcagtctcagttgcaaaatcagagaaatcaatggaagcttctcctagataaccagattttgatgttccctacaaaaacccatcagaattagatgcctcaaaagaaaagaaaaagctcacacaagaaaaagaaaaagaaaagattttgaaagagagaaaggcatggttggaaggtttcgtacagttgaaacaataaaatggtaaagtttctcattgatttttcctgttttgctatccattgtaagtttgactggttcaaacacaggattttcccatgtacaagttccatccttaactgcaactttttctaatttcaccgatggttttccagcatcctccggcaccaaagttatcatcactgaagattttttcaatttgggcacctgcaaaagtcagaagaaaaaaccagatatgaataataccataacccaacggcatttccaaccaaaattttgtcaagaactcgagaaaaaatcataaaaatttaaacttgcatagcaattcaaaattagaaaggaaaaaaaaaaaaccccactttttcatttttgtagaatataatttacctgagaaacatgaaactgtaatttgaatatggctttgatcttgtttttcttgctccatgacttaaacatggtttccttctatctatcttgaaattgcttgatatcccagaaaatctttattcccaaaactcaatcactgctctggtacttgggccaacaatgctgcatcttaggacacttttcatatacaaattgttgagtagttacataagaaccaaactagacgtacctctctctctctctctctctctctctaacctcgttgaagaaaagaatatttatgaaagcagcacaaagtaaagaactataatttatattttatttatttttcccttgaagctgaaatatagtagatactcaaagaaattttggagcttgtagttgcaagtagagagaaacttttgaaagatatggtgtagaaaaaaaaa

SEQ ID NO: 15750 - DNA, 4899 bp, Cannabis sativa
accttaaaattgagaattgagctactctatggtgtcagtttttaaaattaaatgattctggaactgacaccaaaagtattttttgtagtagtgtatgaccaggttaactttgagaactctagaatgggtatttagattccaccaagttatttctaatccaccatctttcagtattttgtaccacaaaggcatggagcatccaagtttatgggtcaggagctaaaaatacacaaaacaacaccacgaaaatacacatgggtacctagggtttcacccagtgcccaggttgatcataacctaacaagggtttcagctttttctaccatcttaattaaaacgggtcaaactttgtactgggatatgaactggacatgtcatgaacatatttcaatcatcataatcaaatttgaagaacatttatttttgagcaccaagtgccctaggcacccatcacccaggttgaaatattgtaaatctaggccacttccaagcatcaaactagaaatctgactctagagtcttcttcctcttcatcaaaaacaaagaaacaagtgttttttgggaagaaatagattagcctaaaggctaaaacaagggaccaacacctaagttgacacctgtcgctaggtcaacgcctaagctgacattttctcaacttgtgccaatttcgtggagtttctttgtaaagtcttccaagcatattctccgttttcaaactgaacccaacgcgtaggttgaaacctgacactgtctatgtgtttgaaatgtaactgtctatgggcctaaacctgaacccagtgctaggttaacatattgtcaacctgggatgtttccagttaattttctataatagttttctcaacaatttttttcataaaaaatatctaagttacaagtaatttctgcaagaaaatgacaactatatgtgcatcaaaactaagcctaatgcccaggttgaaaatctacctggtgagcttgtttcgatcatccaaatgtgaattctgctctaagcattctctccaaaatggtcaaaaacatggtaggagaccttgtctctgatttcaagagccttggaaatatcaaaacgataactcaaaagctccaaagagagcacctaacacccagcaggttgacatatggtttgtgcgctaggttctgcttattcgattattcaatgtcgatcgtttgtctaatttttaatagtgactgagggctataaagtaagaagagtcaaattcaccacttcatattttcactttttcgaaaaatgacttacctgaaaactaggtagtttcaagtctctcgtttccgcaaaacacatctctgagaactgctaacctatttcaccagaacacaaaacctaactaagtgatgtcaaaatatcacataggcttcaaaaggtacatcccaaatgctatttttctttagcccaccgtccaagttgacttcacatgtcaacctgggcacaggatatcaacctcagtgtaggagcatttatgtgtttagtaaaacggtcataactcacacaatattgacctaattgatgaaattcaacgtgtattttgaagctattccaattatctaccaactcattatttacacatcaatcaaaattccataattatcgactctaaatttaacccataagagagttacatatttaagctacaactttctcgaaatgtgtctcacaaatgcaacacaagctctaaaaattatcgacggacctccggagtcaacttcatcgttagatcatcatctaccaccaaaaaagcctaaatgtatttctccatagtatttttttgaatattttatcattattttaataggaccaccttccctataaaaggagagttctactaactcattttttatgttctaaaaagttcccataaggtcacagcatccctctctagtttctctctatagaaatttgagcatggtgacttaaatattttttagtattccatctagttagaaataaaactcgaagctgatgtagctctattattatcgcgatacagggagtgaactactataaactattttgtctctctcttatttatacttaactcataatacattctcgccaatctagcaagtgattatggtcaaatatctgtgtctagatttttgcttcaacaaaatgtacaagcaatgcggggaaaaatagtagaaattttgcattttgtcactattctgcaacccaatgtggaaaaaagaaaccgcgcgtcattgaaaacctaatttttttttagttttgcatagctagccgattgtgcaaaagcgttgacaataagtacataatcaattctttaaaataatcgcctaagtatttgtgcctatactgatcagtatccctgacagttttgcacaattgcctattcttctaagttttcttgacggtcgaataggcgacaatcatagagatcactgaagacactttgccctactgtttaaattagttgaaaaaaacccaattttttatatattagtgggatttgataattaatgagtgtgatactcagcaggatgtccggacacttcttgattacttctcgagacgctctaaatgatattttctggattcaagttatgttggatgactatcccgctcgcttggatgactataggcgattattttaaagaattgattatgcactatcttgctcgctctttcagttgaattcgctaattaatgtggcacactatcttagttgggcctaaagtgattgatttgtaattagttttggaaattacatgtatcctcatctaaaaatacgaataataatataatatacttatatttggtcatatataaaaaaaaatatataaataatgttgtaaaaataaataagtttgtattatataatgcagtgtaatttaaattgatttaaactgtgattattaaatttaatacgcaaactatagtgcaccacacgctgcgaaacaaaccacaacactgtaaagatttcaaggtgctatttttgtgtagtggggatagtttgtagcgtgtatacattttgatgaacacccataattaaaataactaagtttaataatcttttaaacatagaatataagaaatataatattttaattaagttgcttcgtttgattcattaaaataggacatgcacacatgagacaaagtttcaaatcaaactagtttagagcacgggtaaatttgagggtcaacaattattcaacaaatagccattattaaatacccccattacaatggttcctgttcacttcatattgcacatcgcaaatgcctctttcagtgtgattcccaatgtcctgatgatcattacatatcgctggattaatttcagcttccatgaggcgcgtgctgaacacctgctctgaaaataaatcatcacttccgccgtcccagttctcgaatatctcgtcaaatcttaacggtgaccccccgttagtacggcttgacggcgccgtcatgtagctaagctcagccgtagtatcagtagtactaccagtgaaaccaaaggataagctggctctggcttcaccatcaccgttaatactagtgtcattaaatgtacggtcacgatgataacttctttctttgtttttcgaaaagaacagacggctctcccacgctttcaaaatgtcgaagcaccgcggcggagcgaatgtggtgggcatcttcttcagtatctcatccgacgtggcggcgagtatatcggacggcgtactagtgttactcttattactgtttctctcgtctatttctctaaggagccttgactctctaacaagccgagcctccgcttcgagcctcgtgctctcccactgagctatgtggctgagcttggaaacgtcttttgggtcagcggcgactgagcggagagtgtgctttagaggcttatgggtgactgggtcaatacccatcgtagtcaaccttttcttcagatgagtgttccagtagttctttatctcattatctgttctgtttggcaagtgagaggctattgctgaccacctaaataaaaggttatagttttagaaactaaaattaatagaaactaaaaagaaagtgacatttatataatatacagtatggtacctgtttcctaatagagcatgtagttgaatgattgttctttcttcctgtaatgtgaactttcccctcttaatatctggtctaagataatttgtccatctcaatctgcagctttttccgcatctttggagacctgtttttggatcataggttatatattaattaaaactaggttatatatctaaatatggagatggtgtgcattttatttattaataatgaaagatgaagtagctaccagcttttttgggcaccaaacgccagcttccatggccatgttgttggatataggctaagagctttttgtcttcttctggtttccatggacctctcttcaaacgatcaaccatattgtctctaaattgttaagttcttgtgatagaaatcttttaatcctactcaaagcaaaaccgtaaattcaatattttgtttggttttaaagatatatataaatgtagtagttatagtatagtagtactcgtactactagagtaagttgaaaagatcagagatgaaaagtggggtacgtacgtaagtggggagaaatcagaaaagctggagaaataaagtaatcacatatatgggaaatgtgtcaaaagaacttagcaaattatattaatttactcaaattataaaactctgttaataaatgttgttattttaaaatatgtggtaaaataactattttttcagattatttattattacattgttttttatcacataaaaaaatcaatatattttttatatattttttagaaagctaattaggatttttgcccccagaacttttaagatcgttgaaaatg

SEQ ID NO: 15751 - DNA, 10693 bp, Cannabis sativa
acaattcatggtaataaataaaagatttggacatccacataattattaatatttataatatatatatatatatatatatgatggcatgtgttttagttaaatattatctaataagtcttataaatacgagtggtttttacaactctcctgttgaaatctcctcttccaccaatataaaaagaaaattaagtcttattaatgtttaagactttaataataattttaattatgttttatttttctaagataattttactattgttttattacaatcattatatagttaatgacataatgagagtagtggattgacacggtacgtatttaagaggtatgagcacaatatgatacgaaaaaatatatgtttaagtacgatacgatatgacacaaaaaatatgtgtcggactagcatgacacacatgtatttacaattatcgattggagtcaactagagcctttagacattgccccacatggattaaagtaactgaaacattttaatttcaatgcttgtttggattatattgcccttatatggattaaatgtaaaaaaaaatattaaactatttataagaagactaattaagattatacatttgaatttgacatgtatcaaatcatgcttttgaaattttttagacgtttaaatattctcttaaactattaagattgttggactaaacaacttttttgttcaatttttgtaatgaaagtttgacacaaatgaaagttcaaggaacatgatttgatatatgtcaaagtttggaagacatggagcacgctttagtacatggataatcgtcgtgttagtaaaattgaacgaagttagataaaagtccttaaatttaacaatctcaatagttcaagagcataatttaatacatgtcaaaattcgggagcaaaaattttaagtagaatgtgggttactctactcatcactaattgattttaaaatagaatctcacaattcttatcattaataccgaggctatgattgctatgatataactagttctcatttccacgaagtgcagttgagaatgacggtaaaaacttgagaaaatgatgaaagaaatagcttgtagggttttgaaatattgaagaaacttgatctatggcttgtttgaaagaaaacaaaggtaatattgtaggagagcaataaaatgtaatgttgtatagttaggataaatttaagtttaattaaaccattaaaaactaacagaacttaaataaatataataataaaataacatttattttaatttagtatctctaacttaaatttgaatatatgaacctatcttaatatcgatatagaaagataggtactataaattcataaaaatatcaaagatatcaatggatatttgtctacaatttttaaaattaatgatacaattaacttttaaaatgctaatacatatttgaataattgtaataattcatacaatttaataataaatagaagttttatttaaatattataatatcgtcttgattacactatcatataaaataaatacattaaaattaattctctatacttagtacttcaattcacatttttttaataataaataaagcatattcatgaatatttttattcttttatgaaaaaagttatattacttgaaaaaaaaaatatgtatccatacaatttaaaaatatcaagaaaaaacttaaataaattaatgtgtattgcagtattacttatgccaacaagatgcatcttctttttgatagctcatcaattaaaaattctaaaattaagcatcatcttacttgtagagatagatctcatcacctcttactttgctccccaaacgagtataataagtgtattttacccaatgcctcatgtgggatttgtggtttcaatattgagtcagtctctcatgcttttttgcaaattttttgatctttactctttttataagatgaataatgtgtgaatatctatgattttattgtaaaagctttgaaattgttaaattccgacttgtatgagagtggattatgtttttgtggccaatcttgaacaactgaaatggaattatttttggcaaagctgttatccctagaaaaattgtttctttggtctaagcattggttgcaggagtacatggaagcttagaagcagctcaagtcaatagaaatatgaattagctactaccactaaaaggggaccttaaattgaatgttcatgaaacaaacaacctgcattgcgttagattggtctcgaggcagttgttgggggaccatgctgttgtttcagaaggtaggcgaagccttgcttggggccgttcgatggatacctctatcgggtattgtttgtctcctaaaatgatgttgggaatggtaaatattccaaacttccttaaaatcctgtaactgtgtacttcctatttcgatgaaagttacagatttcacaaaataaatgaacaatgaatgtgaaatcataaatataaatctagtttgataaaaacgaaagaataatccacttcagtatatattgaaagaagtcaaaaacacaagtagcctacaaaaaacacaagaatacaggatatattccaccttaaacagtaatcacttttctttatactctttttctttcttcttttaaaaaaaatagaataaaataatgaatattgtagctcagcattgagtagtaaagtttgaccaaatatatatatatatattacttcttcttactatgtacaacgcttctcaggggttcctctcttcagttaatagcagtgagaggaactctggaatctcttaatgactgaggagtagcttcataagggcctgcaatgtgttttacatctccatttgcttgctttaccgatttcgcttcccaaaatggctttaacaattcatcaaaatcgggggttctaagctcttcaatggatgcaacactaggtagattgaacgacctctttcttggtgtggaacaagacggttcgtccacctgtttgttgtcaaagttgaaagaactttgttatagcattttgtgctttgtagtagaactaagagaataatgaggaagagaaaacaggtttttaccacatattcatctagaagacattttccggcgtcctcggttatttctacaatcttatggtagtgaccacctttcaattccctcaaatctccacagcaaggaacaatcattgagtttatatttccacatgcatcgtggtcgagttgtaatgattctgcagatgttatttttcatcagttataaattgagagttacaccatatgaagtgagaaaaaatagacactcacgatcgatggatgaaagcatattcttgtttgcaatatctgcatcttcaagtgcagctgacacggcagttgaaaacctagtccgcagggtttcattggcttcaattcctcgcctaatgaaaagttcatagaaagaaaatgagaaatctttcatagaaacccggtaacaaattctttgagaaaagtaaagaagccaacctgacaatggaatccacagaagtgacatttttactttctagagtggtcaaggattcttgagcatttctccattgttgtgcacctgtttttgccttcttcagactgcattatattgttttggattaatgccaggaacaaaataaaaaactaatcataagactgaagcactcaatgaaccaaatcgtcctaccagttatgaaggacctcctgtaggtctttctttccagattcaacagcagaagtatcttcaacatagtgggattctgtttcttccatgtgaactgtccatttcgccttgacagaagaggtagactcttgcatggttgacatctcttgctgcaatttgacggtcctactagtggcactctccctaagatcatctactgccaattggacctaaaatagagatgggtcaggtcatgttatcagttttggaacgagaagtgaaaatttgatttttgatcataaagaacaaaatctgtcttttttataccagctcttttttcctagcatttgaacttgccagcagctctgccactttttgtaacaattgttgttcctcattagctgcacactcctataaaagaaaagaaaagagaaaatgaatatcactcagtaaacagctgaagaaaaaagaatctcatttggtaaacgacgtagcatattttatgcaagcacctcaaatttcttttcaaatgcagataacttttgatcatttacaccctgggcttcttccacgatttgggtcagattggatgcgtgtatgtctagagtcttgaagaagtttacagtaatcttggaaattgagcgcgcagtttccacagctctggcatgtgcctgtattgtgaagtgatgaatatcagaatactcactttataaactccataaaaacatgggaagcaaaaacgaaaggcaattggtgaactagaatgtgtaatgctgattaagggtaaagggagcaaacctgacgctgctgttgtgcatatgcagaaagcttttcctcttgcttgtgaaggctactttcaagatcacttagtaattcatcagcttctgaagcaattcctttaaagagctgaaatcaaataaatgaagtcaaatgctgtataaagatgcatataactgaagtcaaatggaaaaggaaaaggataaaaatttacaattgcttgagaagtatgttgtcaaacaatgttataaatactacttacatcctccaatgcagaagcatgtttagagacctcagagtttagatcaacaaaagtcgaccgagaatttccttcaagctcaccagaaatattatccaaagatttaatgccagaaccatacatggcttttaattttcctagcctttcttgaagttcttcggtagcctacagcaaatagaatacataaaattttatagaccgaccgattagtagcttacgaaattgaattaacccatttttgagatcttacctcagcctttgttgatacaaaggatttcatatcttcctccatatctttcaattgttgctcctgttgtgtcacagaaactgcaacagtcttgtgcaggatttcaagctgctgggttaattgggactggaatttctgcacaagtgacttgttcccttcttcaattttatccttgcgttctggaaaaagatcaacaaatcactacaagttttggagagctgattatccaacaaattgacttctaaaattatcaaatacaaaccaattttggcaaataaactggatacgtcagaagcagcattctccagctctgttcgaagctcaaatgcacgctcaacaagtgctttctctgagcatggaatgacagtgaaaaagttaatttgacaggcagatgacaatttgaactgtgaagtggaagtgaaaaataaaaaacacttgatgaacaaaaaggcccatggaaggatataaatggaacacttcgtaacctaaacctaaaaacatgagtatgacaaactaaaacatgcatggattggagtgcagtggaagtgtataatcccgaagcaggacaaacaacaccaaaatttcttaccagatttgaggagattggatatcaaaaactccttctctttgatcgtcacatttgcctgtctatgtttctcttcgagatcaaacagcacgtgttcagtttgatcgagtcttttctggagtacaacagtagtaatttttaagttcaagaatattgaagaaaaacgagagaaataattcataagaatacttaatatctaagcataaaactgaccaatcatatttttaatattacctcagttctttcaagcttctcacttaaatcagcggtcaaaagttgttgagcattgtagagttcttgaagctccatcacttgctgtttaacagtcattaagagttagtctaaatttcaaactgaaaatattgcacattgacatcaatatacaatgatgtgaataccttatctttggagtcagaatcaagctccatacgttctatcttctctgccattgcctacggaaacataaaaatagagtcaaaagatggagttactagtgaaactcggataagtattccaaaacttagcaaatataacaaggattagaccttcttctctgcttcttcactaagatatcgatcccgtggtatatagattccattcttctctcttgcagcatatacctctgatccaagtaagattacaattgacaatcagaaaacataagtaaatgttttctagaaaaacaaaatccaagagaggaaaaaagcaaaagacatgtatgttagaatcagtcattacgtaccttgcttgagcctgtcaatttcagaatacaaatctttgatcaaagcagatttcatcatcttttggtttatctgaaatataattaacagaaagccataagacactacgaaggaaggaactaagttgcattagaagatggaattgcaccaacgagcttgacagatgaagaacataatactgacctctggtttgttctttatatttttggcacggtgtgcataatcaagggtactgagtgtttcttccaaacaatgtatggagggtgatattgtggctattatgcatgtctttgttttccctcccagggaatccctcagcaatcttgttagtttactatccctaaaataatccaactatatttcattaatatccagaagattgggattaattaaagttcaaaaatattgactgcaaattgaattctatacctatatggaatatgaccagagtgttcaaccagagcattaataacacgaccaagagtaagtaagcttttattaatctccccggcttctcttgctctaccctgcacgagaaaatctaatttcagcagatatgagaggaatgaaccttttcccatgagttatatgtagtgcaagtaaggataaaaaatttctcgaaaataagattgcaatgagaaaattgtattaagttcacaaaaaaaaatatttatatgcattgcaagtatcagatacagcataatccttgaagaaacatgttaatatgattctcttattcacattacaccaaaaagcttatcaccatatgacatacctctctggcaccagaacgagaaatgttctcagaaccagcaagatcaacaagattaagctttccacattttatcatttcttccccttctggagtacattccttaatgtgaattgtgatagaaaatattgaatgggaacgactactttgtttgttaagaagagtctcagctgtacgcctttttgcagaacctttctctaaaattttgtagatttcgttagcggtacatactatttcttcttccaaacccctaacaaagacaccaccctttccatcctccatgagggcaatgggctttttagatttatcatctacaaattttgtggtctcctctggggccaaaagatccgaaatctcttcattgtacagctctaaaaatgttactttcatgctatactcagcattctgtgcttctaatatgtcgaaaatttgtttgacagctctagggataacacctgcatcacttggaaagtctccattctgccaacgaaaaaatggagaaaattttagttcaccgaagcaaagtcgaaactagaaaagcaagcttatttagatgttttgaagttgccttaattttttagccaaccttttttcgagctccaccttccatagtgtacgtcttcccagtaccagtctgaccatatgcaaagatggtgcaattatagccctcaagtacttcaaaaacaataggagatactgcctggtcatataactccttctgttgagacgctggaccgaagacctaaccaccacaataccaaactttaattatccacaggaccaggagttcaaattcttttagtgctcaagatcacatcaccaagaaattaagttattataccaagacttctttctccagtacaaaaaattcagtataattgaaacacagtaaagaaaaacagaaattattcaaagacagaccttgtcaaatgcaaaagttctatcaatttgcttgttagctatattctgaattgcagaaacttctcttctaccgtcattacaagttatgacaactggggtatgtaacctcatctcatcctcactcagaggcctacaaaatggaagcaaatattacatctaatcaatttgtttggacaaaagaaagaacactaacacagaattgggtttactcaacaaacactcacctgcaacgcacaagaacctgcacattgacacccttgtctttatcatgcttgctacttgaattagaatctccagatcgcagatcccgaactgccttgtcgctcgaccgtggggtctgagaaggtgagagtgaaactaatcctcctcttctcagctgagactgagaagaatccatagctctctatacttgttcgaataaatctcagacctttaaaccaatcagtaaaactcagtgagtcaacccaaaatcagacataaattaagctcatttaaacctaaaaatagaaactcctaatcattcatttccacaaatgcaggatcaaatttggatgaaattcaactttataatatactgattgaatccgaaactcaagcaaatactgattatgtaccagaaatttaaaatcacagtcaacgcagctccgtttatccaatcccaaaaaataaaaatctaagctttacaatcaaatccaaaacagagatcagaatctcccagacaactcaacaaacagagatttgatcaatcaaatcaaacaatgcaagtcttcattgcaccgaaaatgaaaattcaaacaaaaaactgaatcgcagccagatcgaaaatgaccgatcgaaaaaaactacaacaaatttaaccaaaaaaaaaacaaatcatttttaaaaaacttacagtaaaatctaaatgccggcttgaaaagttcagcttcaattgcctaaaatggatagaattgatatagacagagaagaagaagaagaaagaaataggttcttgaagcaatgttggtgaggaatcttagatagagaaagtcctagaatttagagagagaaacactacgtacgtgcgtgtttagtacataagaaattttctttctattttttttcttcctttgatatttatatataaaaattaaatatttatatatatatattactgtgtctgtgtgagtgaagctgtgtgaaagagaagcaatgaagagagagagagtgtattgtaggactacctaggctcgcctgcactggaataaaataaaataaattacgtcaaacttttttaaattaataattttttaaaataaataaataaattgggagcttttctgaaaaatccaatccaaggacggcaaatgacagttgaacttaacggcgttaagagggaaaagatccgtttcgatcgcaattccggttcccgaccgttataaatggacaaagagggttttaattaatcttttttgaatttttttgaaaactcaaactcaatcttatttgattccgattctgtccttggtttgcttctgatattacgaaactgaccctctcttttatggaaacttgagcaagatttggctatttttgaatttcattatcaatgctactaagctaacctaatctctttatttaaagggtccacttttttttttggcttatttaattttcatgaacaaattggattatgtattaattgttgagattgttttttttggcagttaaatgtttcaaaatttaaatttgtaattaaactcttaaccttgcctattgtgcttaataaataggaggcacctttgatttggggagctaaagtgcaaaataaaattaaagggtgcgattataaaattttaaaagaaaattaatgaaaattgtaaaaaaaatatgctacaatgttgttattatggaaaaaattgagacaatatgttcttgattgtaacatcaaattatatgtacatatatattttcttaagaatatattgctattaaatattagtgaccaaaaatttttaaataacgttctaatgagacatcaagaaagtgttagtcactagtatatgttagaaattattttttaaaaaaaaaaaaaaatttaaacattgttttgtagatatcaaagtttaattgtaaaatcaaacccatcaagaaagaaaattttgggttataataattaataaggatttttcttttttacgaagcttttttctttttttaaggaaaacaaagttttgtttaatcacataaaattttcaaaaatcatacttctcagaattgaaactttaatgaacttaactatccaaataaattaataagtagttaattaatgtacttggacttacctagtcttattatatggtgtttttgctcaagatgtcttaagtctcttttcaaaaaaataaaacatatatatgtttaactttatatatttctttaaaaaaaatcactttatatataatttaaagtgtcatgcatgcattaaaaaatgtgatttaattaactattaaatatgcactaaatttgggtagaatcttccatttgtcagtattaaatccatgttagggtacacttttaagctcttttccatttaaacaaaagaaagtgccctctctctcattcattacttttctaaaacaaaacaaataaaaataataacctacaaaatctaagagcactcacaacaagtgaggtataatagctaaaaggtaaaataaaatagctaagagtttaaaattgagctccatcaaatgctttaaa

SEQ ID NO: 15752 - DNA, 4774 bp, Cannabis sativa
aaaaaaaaaaaaacttattcaataagtatttacaattttattaatatttagaaagataagaattaatattttagatttaaagtttcgttaatcttatgtgtaggtgtttaatatgaataaaataaaatattaaatataattagatggttattagatgataattggattgcttcagttctattattcattaaactagatgtcttatgtaaaaactgatccgattcgattgaatttttaaaatttatatccaatccaattcatttataattagatatctaatttttttttattgtatcagttgaaattagatgtgacattataattgaatggggtgaatttgtgcacaccatgcttgacatttctcatatatttaataccagtgaatgcattgcctccctctcgtgagtagtgtatttaaaatgattgtacaataaattatatatactagtttttttttttttttgcttaataaaattaattatactatttgaaatactgattttattggatcagaaatcagaatataataatgttcacaagatttggagttcccaatcttttaatatcgtccttaattatactatttagcttgactatggtttgtcctctagacaactcaatttacaattctcttccccacaagtctgaatcacattcagaatttaagaggacgcactaatatataaatatatatatatattttttgtcatttcttggaagtttacctgttgaattttcgtactgttttttaatcatattttcaaccataatagtttgaagaccataatttatatatttgctattttcgataagaaagtgtggtcgtacactcatcatagctcaaacaagagcaaactgagcatatttgatatttctcattctgggcatcactgggtttttcacctcaaggaaatcgagaaagagagatgaaaaggtcagtaagtcgtacatggcaatatttttcggcttagacatcggctattcctcaacggccatccatattttgatatttttttgccataaatttcattagattgttcatgaatgcgtgtcagtcaaagtttttgtttttgttttttttttaagttatctcaatctatgcattttcatgctccataagttttataataaatggcgatatttatttatttatttatttcccttatcacaccagactacatttattggttcagaagagcgggatcattacttccacgtttaatcttctggtttttctcaatgttatcttttcagggaggaaaaacaacaagaaaaaggaatatttatataaatattgatgtgaatacaaaacaaggaatactataagggatctatattgattccaaagttcgagaccaatatgtcttcttcttctttttggatcacatcactttcttgttcatcatcttctgtgattcaatccacagaggtctcgactgtttttcaatggcttagatttattttcctctcaccttgtcctcagagagctctgtcatctacattgaacctccttttcttgcttacccttttggtatttgcaatccaaaagctcttctcgaggttcatttccaatgaccaaagcagtacgagcctcaacaagcctctcataacaagtgacagagctcatcaaaaaaccaatctttggttcaaactttcagtttctttgactggtttattatcaatttgttatactgttgtatgtatcataacactcactaagagtggtcaatcgccatggaagatgttagatggcttgttctggttagttaaagccataactcaagtaatcataacaatcttaattttccatgagaagaggtttcaagctgttacacaccctttatcgcttagaatttattgggtggcaaactttcttgtggtgtccttgttttctgcttctgggatcattcgtttggtctctgttcgagaaacccaggttccagatttgcgtttggatgatatactttcaatagtgtctttgcctctgtcgcttgttcttgtcgttgccgccattaaagggtcaactgggatttcagtgaacagagaaacagagtcaggaatggacgtagaacctgaaatatacgaaccccttttgaacaaaacaaacaacgtgagtggtttcgcttcagctagtatagtatccaaggcgttttggatatggatgaatccacttcttcgtaaaggctacaaatctcctttgaaacttgaagaagttcctactctttcaccggaacacagagccgagaaaatgtcaaagctcttcgaatcaaagtggccaaaaccagaagaaaagtcaaaccacccagttcgaaccacgctcctccggtgcttccggcgtgagctggcgttcacggctttcctcgccgtaatccgtctttgtgtcatgttcgtgggacccgttttaatacagaagtttgtcgatttcacctcagggaagggaagctccctatatgaaggatattacttagttttgattcttcttgttgcgaaatttgttgaggttttgactactcaccaatttaacttcaactctcaaaagcttggaatgctcattcgttcaactctcattacttcattgtacaagaaagggcttagattgacctgctcggctaggcaggctcatggggttggacagatagtgaattacatggctgttgatgctcaacaactctctgatatgatgctgcagcttcattcaatttggcttactcctttccaggtccttatggccctggctctactatacaactaccttggagcttcagtaatcactgccgttgcaggaattgctggtgttatggtgtttgtcatatttggcactaaaagaaacaacaggtttcaattcagcttgatgaaaaaccgcgatttgagaatgaaggcgacgaatgagatgcttaattacatgagggtaatcaagttccaggcttgggaagaacacttcaatcaaaggattcagtcttttcgggacttggagtttggatggttgtccaagtttatgtactcaatttctggcaatattatagtcatgtggagcactcctttgctgatatcaacgctcacattcggcactgcccttctctttggagtccctcttgatgcagggactgtgttcacaaccactaccatcttcaagatattgcaggagccgatcaggacattcccacaatcgatgatttcgctttctcaggccatgatttcgctagggagattggatcgctttatgatgagcaaggaacttgcagaagaatctgttgagagagaggaggggtgtgatggtataactgcagtggagattaaagatggagcgtttagctgggatgatgagactggagaaaaggttttgcagaatataaacttgagtgtcaataaagggcagttggcagctatagttgggacagtaggatccggaaagtcttctcttctgtcttcaattcttggtgaaatgcataaactctcaggaaaggtatggaagttctcctactttgtgggctatctatttatgaattgaaattcccatttgcaaagctataggatgaatcaaacttgatatcacttaatggtttctgaataacaggtacgagtttgtggcacaactgcatatgtagctcagacatcatggattcagagtggaacaattgaagaaaacatcctatttggtttgccaatggacagaaggagatataatgaagtgattacggtttgttgcttggagaaagacttggaaatgatggagtatggagatcaaaccgagataggagagcgcgggatcaaccttagtggcggccaaaaacagcgaatacagcttgccagggctgtctatcaagactgtgatatctatcttcttgatgatatctttagtgctgttgatgctcatactggttctgatatcttcaaggtgaaatgactatcctacactttctttagcattataggttgattgtagcactatccactcaggctgctaaactattttctgtaaataaattaggagaggaatcgcacacatatgcaatttagctatagaaagcatttgttaaaaattaaaaccagagacttatactcttcttcttttcaaatacttacctgattttcacagaaatgtgtaaggggagcgctcaagcacaagactatcatacttgttactcaccaagtggacttcttgcataatgttgatcttatcatggtaaggtcttctatttgcttccttgttttctctttatgtaccttaaactcatataaatatcatggaattcttggacaatgttgatcttataatgaaagggtctttttactttctcccctattttctatctatgtactcacaaaaatatcatgtcaggttatgagagatggcatgatagttcaatcaggaagatacaaagatctgcaagcattaggcacagattttggagcactagtagcagcccatgaaacatccatggagcttgtagatgttggcaccacttctcacagcgaaaattcccctaaacggaagatgtcccgcctaccctctgctaagcatggggaggccaatggtgaaaaccacgcccttgaccaaccgaaaaccgaagagggaagttccaagctagtcaaagatgaggagagggaaactggtaaagtaggcctacatgtctacaaagtttactgcactgaagcttatggatggtggggtgtaattgtgattgttctgctcagccttacatggcaaggaacgatgatggctggtgattactggctggcctatgaaacatcagcagaaagagccactatgttt

SEQ ID NO: 15753 - DNA, 5285 bp, Cannabis sativa
gagaaataacttgaaaaactcaaaccggaaatttgaaaaaaaaaaaatacttaaaaaattaatatatggagtaattcccctaaaaaaaaaaacattcgttgtcccttccgattgtttttccacccctacaccgcaactttccaaataataacattttgacgaccaaccaaatccacagttcatgataaaacaaaatatttaaagccctggagagccaaaatatgcagaagtacaatagaagaactgtaccatgaaattggaaaataggaatcaatttattcggttattcatgtaaattacaaatagcacatgttaaagtaatccatatagccagtatcacttgctgattcccgaaaaaacatctcacaatgaaacataatgtcaacatggaaaatcatcaagggaaccccatccacccccaccaggagttaaaatctgaagaatttccccagcctgtacctcaactgtgttcttacccccaaggttaactattcgtttatcatttgtaatcaagaagttagctccacgagcaccgtgttttcctccattcaaccctctaggcacatgtacacgcctctctgagagaatgctaaccacaactggtcgcttgaattctatctccctaactaacccatcaccccctttatgaacaccagcccctccactattttctctgagctcaaatttatgcaataaaactggatatctctgctcaaaaatctcaggatcagtcattcttgtgttggtcatatggcactggattccacttgttccatcccaggttgggcccgccccgctaccaccgccaattgtttcgtagtatccaaaagtatcatccccaaacgtgagattattcatacaaccttgtgaacaagcacatgcctgaaatgcagtcagtataacgtcagttattctctgagatgtcaggacattgcctcccacgacagcagccttatcacttggagacaggaatgaacccggtggaatataaatttttacaggagccaaacaaccttgattaagaggaatatcaacatttactaaactgcgaagacaatagataaccgctgcagatgtcactgcttctggtgcattccagtttccatacacttctggactagttccgctaaaatcaaattttgcttcacctttataagaatcaattgtaagcttcagatgaataattgatccatcatccatgtaatcctcttcctcaattgtcacagacttgccatctccagcacacgttgattgggatgaaactttagcagcaactgacttcagcatttctcttaccgcctcttcagcattcaactgtacatatgtcatgtaagcctgaactgtctccaaaccatactgctgaatcagttctttgatgagaaaaatacctctctgattggcagctacttgagcttgaagatctgataaattatcttgtagcctgcgagttccagggacctgctttgttaattcaccagagctggggaactgaagaagtttagcaataccttcttcttgaaaaatcccattttctacaagcttatacgcttttatggcagcaccttcctcccatattgacttggaaaaaggtggcatgctaccaggagtaataccaccaatctcagcatgatgccctcgacttgccacaaagaacacaagtttcttattatcaaaaacaggagtgataacagttatatcagggagatgactacccccagcagaaggatgattggttaccaaaacatccccttcctttaaattattaccccagtaattcagctgccagcgaactgtactagacatggctcccaagtgcacaggaacatgcggggcatttgcaactaggcccccatcaggcccgaatagcgcacaagagaaatctagcctttcctttatgtttgtggatatagaagttctttgcagggttcttcccatctgttcagctatacccataaatctatgattgaatattgaaagttgcacaacatctgcaaccttttcagatactttgatggtgcttgcaacaggctctatttctattctaatatttccatacttggttatgacacctttgcagttgggttctactataacagtactgtttccattcataattatagcaggaccaagcacaacatgtccataacttagtttctcaagcttgaacagcagcgtctcttgccactcatttccaaaataaaccttgtaggagccttcaacttgaggaggataagatgcaagtggtaaagcccttggtttcaatatattggtgactcctacaccacgaactctaacatcgcatattagaatattcctctgctgtaatttaaatccatactcttgttggaacaatttcacaaattcaacgtcgaagccatatccaatttcatcagcagatgtctgtttctttaccataattgaagtgtctgtgccttcatacctcaagttcagatatgtctcggttttaatgctttcatcttcaaaaccttgctcctgtagcttctgcttaacctgcttcagtaaaattgcttccctgcgggaagcctctaccactgtgtcatggccataaacagcagaatatggcacttgtgcctcttccacaacatctgccaatcccatcccaaaagcacttaatatcccacaaaacctgtgaatgagtacttctgtcatgcccaaagacctagcaatagcacatgcatgttgaggcccagcacctccaaagcatgcaagagcatggttccttgtctcatggcccttcatttcagttaattgccgtataggacgacacattgcttcatttgctacatttacaaaccctaaagcaatctcctccacagtcatgtcctttgcagatgaatcttggctctttctgtaggtatttatttctgttgcaagcttttgaaatgcttctctagttgccaaaatatctaagggttgatcttcattagggccaaatatggatggaaaataatcaggtatgacaaatccaagaattaagtttgcatctgtaacggctaattctccccctttccggtaacagacaggaccagggtgtgcaccaacagattctggtcctaccctgaaagctccaaactgaaacttcaactttgatccaccacctgcagcaacagtatttatgtctagttgaggtgcctgtatgatggctcctgcaatctgagtttccaggacttgttcataatctccagcataacgactcacatctgtcgatgtaccacccatgtcaaacccaataagtgatttctctgtttcgagcccaaaaagagtctgtgagtaaccaacaactccaccagcaggacctgacaaaactgctttatgtcctgaaaatcgactttctggtgcaagtcctccatcagactgcataaacaaaacattaaccttttgcagcccttcatcaaattttgatataaaccctgataggtattcttttataacaggagttaagtatgcatccacagtagctgtaagaccgcgaggaacagctcgaaccatgggtgtcaaagacgaagataaggaaacatgtctaaagcccaaactcatagctaactgttccactgataattcatgttgtgggtaagtatacgagtgcatcaatacaacagccaaacagcatattcccttatctaacagacctttaagtgaaagcttcaaagcttccacattaagaggcttcacaacctttacaagctcacctgaaatccctctgattaaagatgcagaagagtccgtattcttatcctcaccttgtacaagctcaattctctcatcaacttcaataacctcctcataaaggtttgatggtttcgatacagtgagatcaaatatgttgggacgagcctggttaccaatttggagtaaatcccgaaagccgcgagtaacacaaagagcaatccgctctccttttctctccaaaagtgaatttgttgctactgtagtacccattcttatccattctatcttacctgtgggtatctttgaagtccgcgggatttcctctcccgtatattcttcaagaatcctcctaatgccttcaactggagcatcctcatagtttgctggatcaacagacaagagtttaagaactctaccatcagggtaaccagggatttctgcataaacatcagtgaacgtgccccctctatcgatgcaaatcctgagcttgtctacgttgtcacttcccattctgcagaacagctatcatcaatattaacataacccaaaaatttcaattacttataagaaaaataaaaaaaagaaagaaagtaaatacccatttaactgtataacttattcaagcccctcctacatcacaatgattgaaatataattttttttttaatcttacatatataaaaaatgcttatctaacagaattttttacgacttaacagaatttttttacaaacaggatgttaattcgtatgccgagtacaatttgaaaaaaaaaaaactaaatcatctccccaagcttcgtccaattgttccaaattgcatgcaaagttacattatttgccactatgatatgagtacttaaataattgaaaaaaaaaaaagaaatagttgaagaaacaaaatcagagagcgaattttttcttttttaaaaaaaaaaactcgggcagccgctggtttgtgaaaactcaggctgtcaatcaaaagcggttagtgaatagctgcagcagcaatagtgataaaaactaacattcaaaaggtttgttattcccatatagtttacaaatatactattcgtgctcatcaattcagaaaactcaatccactgaacaatttttctcaaagaaaaatccaaaagtttgtttaattaattgcctttactatgtttatagcatacaaatattagtttcagtctatactataaagactgatcattgggctttcgttttaagacttaattgcattttacctacctcgctgtctttgctttcctcagaaagcccagattatctttctcacgcaactctatcttctccttcttcgtttcgctatgcttctaatcatcaaaaattggaaacgggatttcggaatcaagacttggaattaccaagaggattcttatccttttggaaaaatcagctaatggctctacaaattttggagttgatatgggactgtgtttagggttaataataataataataataataataataataagggaaaaagacagaaaaacacaaaaaaaagaaataaaattacaaaaatactatgggccaattaaatatttataccgtccacatacaaatatttacaaa

SEQ ID NO: 15754 - DNA, 8897 bp, Cannabis sativa
  modified_base (111)..(137): a, c, t, g, unknown or other
aatatacaatgaataataaaatatttttgtcaattaaatatgccaaaaatagaattaacaatcatcataattaatttgaattctaatctctcaataataataataataatnnnnnnnnnnnnnnnnnnnnnnnnnnnaataataataataatatatacattgtaataataatttaatatagtttggattctttttctcactgttatttttattctttctctcattcatataaattgaatttttagatcgagtaacaaaaattaaaattagttgttgttgattaaatttaagtaattctatttttttttcatgtatttacttcatttctttgaagtaattaaaagtttcattttttagtgtagtaaaatttaatatgtaaaaattttaacattattatcatgtagtattgactttaatttatgatataattaatttttccagtcacactcatgttattcatttacttaacattctttgaatgtagttagttgattagtaaactttgtcttagctatcattattaattaaagagttgtattatattatttgtattaggacagcatatacataatcttgatcaaggttttattgaattaataagatcattattcagttcttctttatttttagctgagctctatgagctaaaatggtatcagagctttagaatttcattctgagttttttttttcacttcatcttctctgatcatgcttcgatcgttgtttttcttcttcatctccttcgatcatgaatcaatttctttttttttttgagcgcttatggctcgtggtggtggtcgtaatcaagcttttgaattaactggtgtttagactcggagaaagacaatggaggcgaatcatttctcaatcatccatctgtcttctcgttttggtactgatgatccaagaaatcattatttcttaactaatggcgatcatccaagagctagtttggtggcagaagggagaaattatagcttctgacatctttccatgacaattgcatttctcaccaagaacgaggttaagttcatcaatggctaactgatgatgactgcaatgcttggtgtcgctataataatatgttaatttcttggatcattcacattttcttctaaaatatcagagataatttatctttattatgcttccatgatatagaatgatctttataaacacgtttcattaaaacaatgggccttttgttttttaggctaaacgattgatgcaattattctgtaaagaatctaccaatgttacgacctatttcactcgtcttaaagaaatttggattatggttaaagaatatcgtcctatttctatcgatccttaagtataaagaacaagacagggttcttgaaatttttatgtctgaatgatttatacaatactgctcattctcatctttagatgcaagatccatttcttagtcttatcaaggtgaattatgaattatacaagaggaatgacaacaaagaattcatcttatctcctcttcttccagtgagagttcttattcttctttctcgggataatttgtcacttttactagcacagtttgctactgttttaccagtgcatttcgcaaactgcgttggcaaagaggtcaaagttttaccagcatacatttgcagtggcaaaaatctaacttttaccagtgcatttacgcgctgggaaaagtcatttttgctagcactttttattttatgcttgtaaaagttctaataccaacgttgatttgtcaacccccttttgccaacacatcacaagtaaattctattttaccagcgcaatactaaacttttgccagcacattttagtgacatttcttatagtattggtgcatcacattttgggagatctaagataacctatcatcactgtcgaatcactggccatactatttctaaaaattgtaaacttcttggctatccactaggccatacatttcatggtagagtgaaaatgctcacccttagaataaacctactactcatctagtttgatcttatttccaaactcaaccaatgtcaaaagatgattgccttactctcttagaaggttcaagactactcttccttctacatctcaatctccttctcttgattaacttttggtgtcacacttcactggtaagtttttatctttctctacatgcacttggattcttgactaggtgtcacccatcatgtgtgtcatgatttagccttgtttactcagacatatactcatgcttctttatcttcaattgcatttccaaatggtaaatttgctataggtttttgcattgacacgatttctatttcctatctattatattaactgatctctttcaggtttccaaacttcattataattttgtctgtgagtgctttcacttactcatctcactacactttcactttttttgacaacaaatgtgtcattcaggacactacttagaatcagatggttgggatggttgatcaagttggaaacttttattacttacacacttcaaattcaaatttactcaataaaactcgtcacttattcattttttatttctaaaacttctaatgatattgtgtggcattaccaattggggcatccctcctttaaaaagattatcatcctctcaataaagatttacatttttcttcctcttcttgtcctaatttctattgttctattcgtgattacgccaaataaaagaaatttccttttatccctaatcataatatttcaccaaataattttgatcttatacatgtagatatttgggaccctttctagcattaatggttaccgatattttataacaattatggatgatttttcttgggacacttaggtttattttcttaagtaaaagtctgaaacatagcaagttatccttgcctttttaactcttattaaaactaaatttaatgtccaagtcaaagctattcgattacaatgcaaaggaacctcagttccctacattattcacttttctttgcattattcattatacttcatgtgtctaaaggctacaacaaaattttatacagaggaaacattaagatctcgctagggtcagccatgagttaaattgctttctaaagctggtcgggcaacacttattaagtctgtaggtctctttttacctatgtatgccatgtaaaccaccatactctctaatcgactggttaccaagattgatggtatagtttgtgacttcggtggggttttgagaaggggaaccatgggctacacatgaaagcctgggatatgctttgtcttcccaaatcaagaggaggccttggatttaggaaaacaaaagagatgaatctagccttcctggctaagtggggatgaaacttatttaatggaagtcaatctttgtattttaggattatggaagccaagtatttaaaagggaaggagtttgcaagtataaagactcgggctcctggttttggaagaatgtggtgaaagtgactgatatcctccgaaaaggagcgtgcaaagtggtatctgatggcaaggatacgagaatttgggatgatccttgggtgacacatggaacatctttcttccccaaatcacatgggcgttcaacgattgggttcaataggatggcatatcttttaactagtgatgggaaatgggacatcccaaaattgacaagcttgtttgatcatgatacaatagctgcaattctgaaagggggcaatctttctggtaatggttctaataagtggatttggctaaggatcgtaatgaaaggttaacgtgcaagttggcctatcttgtttaggctttatagagagatcctagtagtgatgttgccccttctctttggaacagactttggaatattaaaatcatggagagacacaaagttcattggtggtgcattcttttgaatgccctccctcttagcgccaacattaagaaaagattccttattgaggaagtgaactgccctttatgtggaggggaagaagaaactacagagcatttgttcctttattgtgactttgcgtttaatctttggagatcgtccccctaggggatttatcctattactagttttgacattcgtgtccgggattaggtcaaattcttatgggggctcagttctaaaggtttaaatgttgaggaagtctttatttatgcgtcagttgtggtggatactatatggcatgccatgaatgaaaagatcctcaataattgatttcttaactcggataattgtattgactctaccctttgtgcttttacaaatttgaaaggtactttgttacccgctgtgacctcggtccagagggaagactagcgcaatcttccccagtattggctgaagcttaattgtgatgtaagagttggtttgggtagttcctgtattgctgtggttgctagaaacaatttggatgaggtggtctagcttcattcagctagactagactatgtggatgctctctctggtgaggcatctctggtgaggcagcggcttgatgcctagccctggatatcgcaaagctcaacggtcacaagttcgtcattgtggagagtgactatgggattgtgatcaactctctcaaccttgtttcgtcttgttgggatattgagaactactctaattgttgttttgagctctctagatttttttgatggttgcttgttttggtgtattcccagaatttgtaattttgttgcccataatgtggctaagtgagccttcacccacaatcagtttggttgcttacctatttctcacattcggaaaagacttattttgtaatgaccacgaggtctaattttcttattaatagatgatcatttaaaaaaaaataaataaataaataaataaaggaagaaaatttaatattttaattgttggagaaaggaaaaaaacccaaaacgttcaaggtatacatatacaaaatgacctatttattttagccttatcttctagatcttcaaatccctttttctccatatctctcttccaagtacactcattcatcataatcgacaaactatgaatacaaatcaaaatacatttgctactagtcaaagattaattgttggaaaaaactaaattggtgaaatatggtacaacactatagagcaactagaaaattaaggacccacataaattttatattattttaatctatgccattgtcggccactagagaattgctaaaaggtgtcgtatctaacacttttctcagtgtcataatgttatttcatataacttaagaaaataatttttatggaatattgctaaccaatcgtgaggtgctacctataaaaggtgttagacactactaaaacctaataacaatgctttggttactaagggaaatttcaacttcaaaggctttccggtgagaggaattcagccgtttcttgtccaggatttttttttttttgggtgattgccatctgagaattttagtatgttttctaacttatttgtgcttcctggtaattaagtgttctattacaaataaataaaattataaaattaaattaaattaaaaaaaaataataaattaagaaagtatacacacataaaaagtatattcaagtgtttctcatacaagcaaaaccaaatttcattaaatgaagtgttatcatcatattgggtccgacacactctatgggatcttttcccacgcctctataaaataattgtcctatatatttattataattatattttaatgaaattatatattgttactaaaaaagaaataaaaaactttacaatataactaaagtttttaaaaattagattttgaacctccatgttttttaatcaaacctattgaagcatcacacacaatttggacaatatacaatattttgcaaaatattatattaaacatatgtgttatacatatatagatatgcatatttatacaaggttgatgttacgtttaatgcacgtataattagttttttttttttgttttttaaattaggtgatgttaagtgcaatacatgtatgtttaatttttttttattaggtaatgtattttttttttaattttttaataaggtttgagatttttatctttaagaaaaaaatttaactatttctacattagtgtgtcatttggatatgattatatatatatatatacgtattttttaaatttttaaaattttcttaattaggtaacgtatattatattcttaaccaaaactcacatgattagatttaagtgtgtctatatataggttggattcgtaaatttgatagaaagattttttatatccgcactttatgaaactttagaaaaatatggtgtgtgaatcgatttaccataattaaaatggaaagcaatcaatttcttattacaaccatctttaaaatataaaataaataataataaagttaaaaatatggttaaaaatatttataaaatttgaaatttaaatttctttatataaaatatttacttaatttttttaattttaatttaaaattaaactaataaatttaaaaatataattaaaaatatttataatattttaagtattttaaatttaaattaaaagttctttatataaaatatctacataatttttattttttaaatatatatataataatattataaaattaataaataatattttgttaattgatatgatattcgtttaaagttaatatagaaactaaaaaaaaaaaaaaatcattaaaccaagaattttttccacacttcatattaaaccaacaattttgttaaatagtcacattttatatagaatagatatgtataaataattagtaaaaatgaagtgaagcactttatactacgtatttaaattaataatattgttttaatttttaatatgatcgatctgaccaggacactgatataatgtggctacgagacccattcgagagatttttcaaagaagcagatttccaaatagcatgcgattacttcaaaggaaatccttacgacagaaaaaacaatcccaacggagggtttacatacgtgagatcaaacacaagatccattaatttttacaagttttggtacttttcgaggtgggctcatccaggtctacacgaccaagatgttctcaacttgataaagtttgatcccttcataaacagaattgggctcaaaatggtatttttagacactgcttactttggtgggttttgtcagcccagtagagatttagaccttgtttgtactatgcatgcaaattgttgtgtgggtctccacaacaaaatcaatgatcttaccattttgcttgaccaagattggaaaacatatatgcaacaacacgaacaaccaactctcaattctagtacaaattctactactactcatgcttcatggactgtacctcaaaattgcaggtacgtatatttatatttattgagtccataccctttttacttttttttttttaatgtagtcgatagtgaaaattgattacatgattcgtcctgaaatgatatcaatattagagtacatataattattgaccatattaaaattatcaagcatattcacgacgaactgtactattctcttaaaaaacaaacactagttacttggactttcttaaccggaaatatctagattatatataatatatagagtaaatattaatttgaatcctatattttgtaaaaattatggattgaattatttattttattaaatgataattaagataatatatattttaaaatagtacaaaatagtactatagactaatttttcttttaaaataaaatttaataataatttaatgacataaaaatattataattaatttaattttctacacatttttatatcatatagacattagttttaagttggttatattaaaaaattaaattataaaattaaaccaataatactatttcgtacggttttaaaaaaaaatatataatttaatttatcccaattaataaattttacaaaataaaaaatctaataattatcctaatatataagcttttgttgagttaaagagatggacaagctaggcagtcggccacgtccatatgagaaatatttaggaatttatatatatattttttgaatatttacatatatacatatatatgagtcaatcaatactgtaataacttaatcttttggattggatatatagatacggtgtaaaaatataattggtatgattgataataaatctaagagtagaatatattacgagggtacctatattttcgttttggtatgcattccatgagaactttaatcttaaaagccaaaccacatcaaactaaatttataatacatcaaactttgatcaaaatttattcaaaaacaaaagttgtagtacataataacatgtattctgtttttttccgaaacaaaattcattgtatttttatgtaaatcatatttttgtataaattaacacacaaattgattatatatagagagataataaaatagtagcctttgtatgtcgaatatatttataggggaacgatttagtcctgcccagtacggaggcgaaacatatctcgtggatgcatcgtgttaaatcaaagggctcaaagtgagaagtgaagaactgaagaacatgctcattctcgtcatgcaacctttgttctctcacctcaatcaaaaaagagcccgacaagttgtgagtgaagcattgttccacttttcccaataggaattgattagctcaagaatttctcacctgcttggatcggagcaggtgagaataaggcgagagaacaaacgtggtagccttcaatcgtataagaccatctcatcataatcaatcatataggatttgagattaatccgggttgttttctttttaaatggggtgtgattctcgaatatttaatatcagttgaaatattaataagatttgttttattattaatttattatatat

SEQ ID NO: 15755 - DNA, 5621 bp, Cannabis sativa
  modified_base (5583)..(5596): a, c, t, g, unknown or other
gaattcatagttattcatccttattatcaagaagagaacaagttgtaaatgcacatatgacctttatggtttatgcagtcataaaatacataatttttattgttatgctttggagaaaagcttagaggaattaattttagaatgttgttgtagaaatttttatttttatggcttttaaagtataagtttgcaaaatatgatttttctcaaaaaaaaaaacgaattattttattagaaaatttcagaaaaaaagttaagaaaaatatagaaaaaacagcataaagtatctggttaccccatttatgataattgattacctatcagtaccttattaccttaattttctcatattgttcaactttttctttaattttctcataaataatctttttaaaaaagttatatttttgcacaaacaaaaagtataaaaatccatgacatttataatttcctcctgggttaaaagttttttttttctaaaaaataaagtcatataaaccataaataatgtgattttcacttatttttatgtgaaacaccatttgaaggtagttaattgtaatcattacataaaacactaatttttataaaaattttatatttttacgtttaatttttttggtacatttttacggtattttataaaaaatacaataaaataacaatacaaataacgaaaaatcaactataaaataacaaaaacagaacataaaaatacaataaaaaattatattttatataaataaaatctaaaaatcataaaaatgttgaaaaaatctatatttttataatttttgtatttttttgaaaactatccctagttaattgtagtgggcctagtctttgagcccaaaacctaggcccaatttcataaaccccaaattttcaaacacaacccttcttctccttcttcgttctgaactcaaaaactaagcttgaaaataatgttttccgaaaaattcatttcccaaatcccaaaaacctaaaaaccatataagctcttattcttcttcgcctcctacttctctcctattgttcttcttcttcacaactcgtctggttccgaacagcatatccttcaacaaatctgtatatacattttaattgtaagtcttgtttttttcactctcattttttttttttggatttgttgtataaaatttgtatttttagtggatttcgaatcaaaataattaagggttattgttatagagaaaaggaagtgaggaatatgtagtcttttttgtaaacgattttgaatgactgccatatgttcgataaaagacctcaatgaattatgacaaaattgttgttattgttcttgtttaggcattgtataatgtttatcgtagcacattacaagtatcaatatcacaaagatcagttttttaactgaagaataactatttagttgtatttactataatttagatgaagaccctttttccacatagcttattgtatgtagctcttaacattcaacgttgtttaaaaactaagagaaataagggtatagtcagtttggctagttagctaaaaagagttttcaaatagtgagagatgagtccttgctattgttattgttaggtttgaggcaggcatgagtcttcactctatctttgtcatgttaaatgagtgaagtcatgtgtgtagtattttggtgtaaatattttagaaagtgagtcaatcaaatttttcaaaaataagttttcagtaattaatttcagattttcatttcaaaattacatttttgcagttcaaagcctgtgctatggcgctcctattggtaccaaaatgcagaaccttggcgaacccttctctgttccaccttttctccaccacctcctcctcaaactcagctgacccagatgaccaaaaggacaaatcaaagtcctccacgtccgagtcccccttctcttcatacttcagtgatgtcaaagccagtctgaggcagcagcaggagcaaagatcaacttcaccgcccccgcccagaaatttcactttccctcatccctctcaatctactattaccaacccctccaaggtctctgatgccctgcaagaaattcgtaacaatctttctgagttccgccgcagatctgatgcaccttcgcctttctcttcaggtgggccctcgaacaactcgtttaaggagttgttgagcagaaatgtgcttggtaaggcggagggtgacaatgccgaccaaattggaaaaggaaacctttcgtttgaagctattcgtatgagcatgaaaaagctaaagtcatctggaaagggtcagcaagatggcaatcgtagggagtctgagatgtataatttgtttacgaaccgtttgagattgaaaccatcggattcccctcagcggacaacaatgataggaggcactgacatgttgccagcatctgtgtttggaaaggatacgagggagaagagagatggatataggtcaaaggctacgggggcggcgtttgcgaggacatatccagaggaggaattagggaatatgttgagggagttgaggcctgaggccaaggacggagcttggttttcgatagaggagttaaatgagaggttgataaaggttagggagtttgaagaccgaaaggctgagtttactcttccttacattcaagatttgaaggagagtttggagaagatatccgcggaggaggaaatgaagaagaattccagtaagtaaccgaactttgtgcctgagtttcttgttttattatccattattcatggtcagactagaatatgctcataatctatattcacttgttgatttggatttttttagcttcaattgagagactcaatttattgggccggttgagtcaaactcctaactttatgacacaacctccacaggaacacctggttgagaaggtaagtttctgtttcatttaaattacagtgacgattaagttaaagtatgtgaagttagttttgatcatcgttgaatttatttgacacaattggattacaattaatgtgaggacacttttattttgaattttgaaacaagttttttcttgtcccagatcttgttttaaactagaacactgtattttaattgcatgtttgagtagataagttggagtctcaaattcaaatccagtgctctgtattttattttcttttagaatttatacatgtatgaattttagagtatatgagaaatgtccattgaattcttcattcttctaattatagttatctacacatcagttaataaaagcaacttcttttaaaaatttctctttgcttgaaatgagtttgtagttttttaatgtctgaacattgaactgaatttcttcaactttcgaaacatcatcgatgcagtatttccatccagataacatgtcggcagcagaaaaaatgaaacttgagctcgccaaagttagagatgagtttaaattatcggaatccgattgtggatctgcaagagtacaaggtatctatttatagggaaaagcataatactttaagattgtctctgtatatattcaactccttactctttatttcgattgttcaatgcagtggcacaactcacaaccaagatcaaacatttatccacaactctacacaaaaaggtgagaaaagaacttaaaaaatatcatacatgtaactcccaagaggtaaaatgttttttttcttatatatactaataatatacatatcctatgattataggataagcattctaggaagggtcttacaagtatggtgcaaaggaggaagaagttgttgaaatatcttcgaagaaccgactgggattcatactgttttgtactttcgaaacttgggttacgagacaacccggattacaagcactagacaacaagattgtatgtatactatatgtcatctttcttctgtctttcactgttcttttgttctgtttttttctcttgcattttggtcaaacatagtttggttacactcatagttgtgatgtgggaaatgaaattgtagcattatttgattcatttcttatttgtttttggtccctttttttttttggaagctggaatgggctgctatgaaaatattgttgctgaattttcaagctgataataagagagcagtcaacaacagaatggaatttatcaataagattcttgttcttagtgttgatgcacattaatttctaatttttattttatttggtaaatcaatcaaagtttgtgattttgtgatgcaaaacacaaaatacattgagtgagtttagtttagtgaatatggattaaagatgagattacagatctataaaatttcactactcaatgtcagaaaagtttttagtaaaacttatacaaaatattggaagccagcttattatggtcatatattgattattcactctaattaaacttcctttttactatcctaattactcaaaattgagtttttttttattatttattttaccttcacttcactctatgttactctcgattttggtagaaattgttattggttaattaagaatttttcgtatttgaaatttgatatgtaataaatcatgttctcttaatatttttttactattaaaaatttatctatagaacttgttggatttaaggatttttatttaattttattaatttgatgactgttcatgtactaaatcatattcttcgactttgatatctattaaattatgctcctcaaattttgatatgtgacaaattatgtctctcaaattttgacatgtgctaaattatgttccctgaattttcattattttagattgtttttattaaaattagtaaaaagtctttaaattcaacaatcttaataatttagagagaattttagacggatttcaaaatttagagagcaaaaattctaattatcatttattattttgataattttttagtctatattgacatcattaaaatatttttagaaaaaaatatggagttctctaaacttagaattggtattaaatatcaaaaagtaacactaacgaataccaaggacaaatttatcaatgtaaataattggaaatctcttcttataagtagaaaataatatatttcggtagaaaattcattaatttgttttggtgttattttggagcattttcatttctttgctgctattctaaaataaaataaaaaattgttaaaccaataattcaccttataaaggcactaaaattaacttagtagtgagagagtgattagaaaaatgaagagttcatcgattcgaactcaaaacttttaaattattaattaattgtaaaataatatacactagagtaaaaaaatacaccttataattgcatttaatgtattttttggaatttttactattttttttattatttataaagatataacctagtcatgttttatagataatgtgattgatattcaactattaaaactttttgagattagtaaacaaacatcaacaaaaaaaaaaaaaaattattcaaatttcaatctatgtggttatgttgttcatgtttgtttcaattaagcactatggaagattgcattttgaggttaatgctacagtccgctaggggtgttcacaaagtatccaatccaatccaatccgcannnnnnnnnnnnnnccaatccgcaaaatgcggatatccg

SEQ ID NO: 15756 - DNA, 3247 bp, Cannabis sativa
tttttcgaaaaccaacaaaaaaaaattatgcaacttttcaaaactgacaactatagtttaaaattgttgtcgatttttaacactcgcaatttattcccatctagttactcttactcctggaaaacaaaaatggtgtgtttataagttgattacatacatgttggtagctccataatcagctaaagtataactgatggtttaaaatagtcgactatattatatttaactatttataatggtcaagaaaattcctttttaagtagtggatatatccaaattgtaaaatatttttttcttgagggagaaaagaaaaaataaataaataaaaataataattgtatatgtaataccagctagttcccaataacatgtcgttcagaaaacaaggagacatgcatgcataaaattttgtgtgataattatgtatgtaataaaatgatcttttttgctttttaattttgttttatcaaatatacacacatgtatatgtatgtactaaatatggtatgtttatgtacgtaaaataacaaagggtattctagtcatgtgatcagtttgacaaataatcccaaaagtcatcaaacaagagctagggttttttcttatcatataattattaatacattatgtacatgtagttttgatttcattctatatatatcttccaaatattattttttttatatattttcttgtaattcaaatagaagagggttattatagtaaattcaatacccctttttcatataataacttccattgtaagcttagttatatttggttctctttctaagtagctaggtagacaaatgtgtatcgaatttcaaaacctcctttccaatattcacttttcttgaaacccttcttctctctctctcttttatcaactttctctcttttcttttctctttctctctctctcagtactctcttctcttattatctttaagccttggttccggttcatggatattgaacccttgtgggctcttggggggtggtttcttcttcaaatttgcatggcaacacctaaaacatcaccatcatcatcaccatcatcaccgacatcgtcgtcttcaatcttcgaaatccaaccaaaatctcttctttttctaaccctaatcttcattttccttcttctcctcactagtactagtactagttcttctactactacatcgaattttcggtattcttcatcaacatctatggcttcaacttccttaaggagaagacttctcttggattcttcatcatcatcttcttcttctactgcgaaattgaatccaaagaaaaccgaagaatctgcacgaaaatcatcatcgtcggctacttcgagtagaagagagtttggagttgaagctcatgaagttcctagtggtccaaatcccatatccaactaggtatatataaataaatatagcaaattatcaaaattatgatgatgatgatgaacatggaggtttgtaatggcaaatttaatatgttttttcatgatcttttgtggggtactattggttttttttttttttttggttgagacactttgccattaatactcctttgtcttttggcagaggtttgttgccttaattaatggtttatatatcttcattactattttttttttaattttaattttatgttttgttttttgtttttcgatttaagctagaaatgtatagcaagagatactatttttccatatttattatgtatccattattatctatttgtttcatattaatatagacgatatatatgatgtttatgctatatattataatatttaatacataatctacggttgtttcttcttcttcttctgtttttgaggtgcatctctctctctctctctctctgactctccatataatatttacatataaataatctatagtttttattttcttgtgatgtataatcttacagataggtttaaatatatataatttgccaatatataaagatttaaccattttgtatttttttttatataataaaatgggcaaataatagaaaccccaaaaccctaatttccatataggcaactcaaaaaatgaatcatatataattccacatttaattagggtttcttatatatattaatatatcaagtaacatctttatatatatgtttggctaatcaaatctaaaatacatacaaaagaagcaaaaataataatatcccagccagaagaaaggaatatatatatatgttgtaatactaatagggatctatatatgtagtagcataattgtgtaataaaaatgattttattttattttaaaaaaagaaaaacaacctgatgaatgaaagtgagggaaagtaaaaaagaaagaaagaaagattagattagggcaaaaggggaatctgagggtgatagaggaagcaagttaattatagtgtcagatctgagatatacagtcacgtacagagaaaaaataaataaagagttatttagcttttactttgttttgttatgaaagagaaaatttaatgatttggtgttgagtggcttggctggtttggagttagctttgttttgttttgttttttttttaatgagaaaattgaaagtgaaaataataattgtttgtttggtttggagtttgcttttgtcgtctcaaacacaaaatccgataaagttgatcagataccaaaccgaaccaaacaaacacaactacaaaacttctctctctctctcatcagaccccatgatttgataattataactgtatcatttttccctctttgtttctctccacccatatatacccaatcatataggtatatgattttgtctcgtggtgtattttcacggaatgtattttggtacattagatgggtctcagggtacactaaatgagtgtatacgtttctactttttaaccctaattacccctagatctcagccgtcagatcaaataactccctcatctgatggctgttgtacatcacggattacaatccgtgaaagtacaataacaagacaaaatcatatccctatatataatatcaacaatattgctacagctactagcatcttctataggtagtattttataattggttagtaatattttttaaaaaattatttttttaaattgagacccaatttttatttatactatgacacattgtaagcgactgttttttgtataatttttttcaataacatgctattggacaccagtgtgctttgtgattggttagacaaacttttaaagttattatattaaatta

SEQ ID NO: 15757 - DNA, 7245 bp, Cannabis sativa
ttagaatcccaccagccacaacacctagccactcaaaatattactttagaatcttctatggtgttactaaagagtgggatgctgctggttaagcagggaaagaaccaaactcagaaactttctaatgcatgttttcaaagggtttgcgcagaaaatgccaaagaaaaaaaaatcattaaaatgatgactcattttcttctttttgactccataaaagcataggcttgtgctcaaaacatatataaacatagcgagtagagtagcgggttaagaagaaaaagaaggaagatgagcatgatttcaacttcatttcttgcttacacaaccaaaatcaccaaaaagccaaatccatactcaatctttcactttctcctatcttcttcagttgacgataccaaccaaccccaaaaaaacccatctttctccacaactactattcccgccagactcaaccacaaagactggttagccccaaatgaggtcgtccaagttttcgcagccattagagaccccaactcagtcctctccgcattagatcactactccaagcgcaaggactacaaacccaacgagcctctctattccttaatcgtcgaaaagctcgcccaagcccgtttgtacgacgacattgatgatgtcgtttcgcggattagagccgagaggaactgccagttatctgacgagttcttccgcaacgtcatcagggtttatggaaacatggctggtcggataaacaaagccatcgagactcttttcgatatgcccaggcaagattgttggcccactgtcaagacctttaacttggttctgaatttgctcgtgtcggcaaggctttttgatgtcgttcatgaggtttatgtgggtgccccaaagttgggtattgagattgatgcttgttgtattaatatattagtaaaagcattgtgtgagtgtgggaaattggatgatgcacttaagatgctcgatgaatttcctcaactgaagttgaaaccgaatgctatgactttttccacgcttatgcatagtttttgtgatcgtgggaaagtagaagaagcttttcgtttgcttgagaggatggaaattgagggtatcgatccggatacgataacattcaatatattgatttctgggcttagaaaactagggagggttgatgaaggaattgtgcttttggagagaatgagggtcaaggggtgtaatccaacttctgcctcttatcaagaggttttgtatggtttacttgatgcagaaaggttttcagaagccaaagattttatgagaaagataatctcaaagggtgggagtcctagttttaaatcattcaagtctttgattaatggactatgcaaggaaaatcaactggaagatgtagattgggctttgaagctgatgagaagacaaggctttgtacccaaaatgggaatgtggaggcagattcttcggagtcaatttgctggaaaaaacaatcatatctgtgattcttttgaagaaattatagccagttagatatattaacatggataattttgtagtaatgctatattcagacaaaaataaaaacagaggattaaaacaaaatatgattacattttctagcttgatctgtttccattggatttcaaatcaaaactgtacagattgttaaaacatttggtccttgtacaaatctccacttttactgattgattggtccttttttttttccaaagatactatttttgacattttaattcctaacaaattcattgtttcttagcatatccaggccaagtgacattcaggtaaacttttaggggtaactagcttcagtttttgacttctgtactctgaggactgaggggatattacaaggaaaccagaaggtcagagcaagcaaatgaattcttcaaatgtgaatattatattccaattggccttgttataacatgaacgacgttattttagactgaaaatctacagctcaaccacattatttgttcttttttccaaaatgtaaagggaatttggtatcctagcattagtttgaaatttttcaatcaaacaaacgaaaacaccatgttcagagcatattacctttcagacgtgaaaaatgtcaatttacattacaagctttaacactaaaaaagaaaacaaattttattcagaaggcgtcaaaattccaatcaaaatatcactctagctctcttaacttgtaaaatatatattttatatatattcacaaataaacataaaatctacagcaacttcagaaatattcacagagcaccaataccaaattcagtacacctggaattgacgcatggtgtgtgtatttgcaaagcaggacgaagaagacatatggttcatcaaacctgaaacctaaaacactattcaggttagatatacaaacaaaaaacaggctggcagcctcaactagacaatctttttttcttttttttggtaaacaaattgatccacggggaggaagaatacaagaaattgcttgctagtattattgtgctttctcttccaaactgccttcatcaagcttcaactttaaagactcagcatcatcccttttactaccaaggctgtcctcccccactctatcatgcaacatttccaagccttgaggacttactaccttcgctgtaggactacttttagcatcagcttctgtattgatttcacttgtttgaaccacatgatctctggagctagatgaatcattacccccatcaacatcagcatcggggacgacaacattagaagcaactggtatgctctcaacttttccaggaagagattcatcatcagaagaatcataatctgctagaactcctttgtctgtcgccgcagggtagtcgcttgtatgtcttctagaccctttccgagacagtaccctccgagcagacttctcagcatgcttaaagaagttctttgctttgttttttattttacccttcaatgggctctctgaaccaccttcttctgagcttgaatcctcttcatttaatatctctcccgaggaaggcacaccaccatcttcatccacaaccagcataacattacggtctgttgcattgactgccttaatgtttacatgtggtgattgaataggctccacaaagctgccagactgctcctcctttctgggactcctgtgaaacaccgaagtaatcttttgtagacccctcctaactcttcccactcgatttttatcatcaggtaattcatcagtgctagtactgctgttttgggatccagatgctcctaaactagagttcttggttgagacatcatttgactccccgagaatttgagtatcaagacgcctattcttcccttttctaggctcccaagtctgtgaaacttcacttcccggacgatggacccatatcccagtttctttttgcccttcaacattaatcggctcaaaattatctggtaccttctgagacttatccgatgataaagacgagaaagaactggtattattggtctcattgacaaaggaatttctcttgtcttccacagtggatgggtcccagtcacactgcatatcttcggcctggtcagaagatgtaagatatccaggtcaaaaaaactgttaaacacacagtctcgacatcatactaataatttcgctgcataaccctgtccacctacatttcttacttaatatatgtctcacaaaaaatgacgagaatatacctttgcagtctcgtcaagtacagttatcgcaagatgcaacctccctgttttaatatttttaagaggcaaccacatgtcatgtctgataccatccctaagatcattaatacaaacagaacagtccctggatatttaaaattttattagccctcaaaacataaagtaacaaaagacctttgcaaagaagagagggaaaatagtacagaaagaaaattaacaattaagtatgccaacaggccaacaaaatatttctttggttaacactacctaaaagatacttgattaatctggaaacacatattttgttaattcctaaatgagggcctttctataaacatcatatgttacaaggtacagagacaaacccaagtagatcgtcaacaaagtgatccttgtcacgaatttcaagagctagtgtgttcggcaattcccatgtaattatagggatcttgaattcctcaagccactttggagtcagtgttttcttctgtatcttagtcttgaatctgtaattacccatctgaccttttacatagggatcagccaaacctgaaaaaaaaaatagtttcacttgttatgcaggagtttaagaaattattttagtgaaaagcactgcgaacaaactactcaaaagaaaaatcttaacaaaccgttaagatcagatggcttcatgtcagctgcttcaacaatttctactttgacatgtgcaacaggctctttctcatccacagaaaaccaattttctgacattcaaataaatgcatacaggtaagcaagcaaacaagaaagagaacttttgaaatatgcaagatacagagaaacagcagatatcattataaaactctagttaaaagatacaagtacaattcgtaggcaaactgctactggttttgataaaaacatgtacagaaaggttttttctgatccgtgaagatagaagctatgaactattgcatctacaccttatcttatgtaaagcctataaaagttctgtttcctaaaaattagaaaataattagggactaacattaatgactcattccaccagctttaaacttacagcagcttacttattttatttctgcagaacataagagccaaaacttagtccacccaagcgcctcaagaatattaaaaacaaattcttgtttataattaagcttcttgaaaatttctatacatatggaccactttatgttaaatgttaaaaaggaaaattggcaatcaagtaatgaaaaaaagtctttcagaacatgagctattcaaaaacattaaagatacagctaaagtggttgaaagatgcataatttccatgaaaattgaactgagaaccatatagaaagcaagctaacagccattcgcaagtaaaaatgcaaaatcaaaagaaggacaatttctaacagaacaatcttagataaaagtaagacttcaatcttccacgacaccttcatgacattataaaattacatactttgaccttgctgctcatataataagttgtaatctggtaaagtacctggattttgtgaggcaaatttctccatgtcaacaaccagcatattaggctgcaaggattaccaacaattaaattcagaacatttacacacaaatgttgttgccaactgatgtctagcataacgaaggaacaggcatgacatggaacaaaagagagcagacgataaatgaaccataaagtggagtctcaaaattcaaattcacctcaacaagcgtctgctcaaaagcaatggaaagtagcttatcctgaagaacaacacacatttcatcaagcactaccaagagaaagcatgtgatgaaaaatagaaaacaaattcaagaacagctgtgcagaaaatatgataaacacattaccagccacccagcaatcccaggtaattctgtgacatcaagcccatgagtaaaaataggcttgacagtcatctgaaaatatggaggttcaacaaagcataaccgtatacggccaaggaaaggccagtcacgcagaaacttgatcccaatcaagacctgccaagaaggaaaagaaatatccatcagacatgcaaaacatggaagagcttattttgtccagcacattgagatttttttccccctgttttttataaatcagttgttttcaaattcttcttgtaagtaaataaatattgatcctgcaatatacattacactaaacctaactagtttatgtgtagtagctagtagggggtgtgatctctctacatataaaagagaacaaataaaaatcagcagtaagattgcaaaatctttattggaaaactgcatgataagtacacacaaatatatttatagagtggtagtaaaacgaaagaatagtattaacatcaaattaaaatatttaccacagagtattgtaccagctataaacattttttaaacctgaaaaaattctaaacttaagaatgaaaactaaatttattcattaagaacattcatctaaataaataaaaatacttaaacattaaactaattaaatgccactcttgtatccttacctttccttcaatatgcatgccagttatatttaactttgcccacattccgaatcccaatctttttcttagcttcacagcaagtattgcactcatatcatcagctgtcagaaaattcattcccaactccagaacctgcatttatgtttagagcatgtcaactttctatattgaaaattgcaaccaccggaagaagtaaggaagtaagagagactgatccaatatcccaaaaagatgaaaaacaaatcttaccaaatgatcatcatcagtagactgacgaagaaccctcatttcagtaaatacaggtggattccttcccaaataaagacgctgaactgtggcttgtttctgcagatttgatcataaagattccaaaatgtatcaaaataaagtgatcaaagaaaaaggaaagagaagaacaaacggatatcaagtgctttttagcaccacacatgaagaagatatcatcatgtagtactacttgaacaagaacttttacctattccacaaaaatgtaacctcaaagtattcatatacttggcctcaaaatcaatactagttcaaaatagcataataaagaataaagaacagatatcatcttgcataactaaaacaaactatttctgttacacaaaaattgccctcaaagttactagttaatctgaataatatatgtcagtgtgctaatacttgaatatcctctaatgtgaaacaaacacagcttgtaaaaaataaaaagaagaagctaatgccaaggaagtaacattaaggtaatagaatttgctcaagaaaaaaaccactcaacacttaaaagcacaatacttaatagttatacaagcactttgaaacgaaatcaatgagccaaataaaccatagattgggctttataattcagaagaaaaatcatacagcagtccacggtttgtacttctccaagaaccaaggaatgatagggaggaggatcttctgtgaagcaatttgctccatacatataggccatatcttttcaactgcatggttcagccac

SEQ ID NO: 15758 - DNA, 8290 bp, Cannabis sativa
  modified_base (6998)..(7000): a, c, t, g, unknown or other
cgtttcagtaaattccacaacagtacggaggtaaagctacgtagtaaaaaaaatatctttcccttttaaaaaaataaaataaaaaataaaaaaagcgtgcgaccgcgggatcagtaaaatatccaccaataatattatgccacgtcatcgaattcgctgcatgcatcaacattcatggttcatacacataaatatgttatgtacacattaaataagatctctcttttcttcccctgaattttcttttattacaaaagtttctctaagactattaaaattgttgcaaaatagtcctctttaattatattaaaattattttttttgactagtatatgttactaataagttatgaatataactgaccactaaacaatattagaggacgttgtaagagtgattttagttaaaatatagatcataatcttaaggataatacaaaaaataaacatctttaaattcattgcaaaaattatcttttggacaacattgttccacatggatcaatgatgaaatattgagctatatataagagtatgggctacgctacttattaccaatttattttgatatgaaaccttatgattctcaacatggtatcagagtcatatctccctatcagactgtcgatccaacaatccattttaaatatgatattgtcatacccaaagcaataacattagaccatagcatgccgaagagccaaaacctccaccactttgggatcaagacaactttccaagtaccacataacaaaaataagaattgtacccaagtaatcacgctctaacatactaaggccactacaactaccaattttatcaatagcaacatcgtgttaaccttgatagaaccacccaaaggaggagaccatttcaaaacaacctcatcaaaaggcaaaaaagtcgcatgtcccaaagagaatggaggcccagctcgagtctagctatgttggaagttttgaagaaattcttgagcccaattcaccaccaagtcatgaggtagattaatgttattatggataattttatttctcttgaaccagatacgccacaaaatgaccataactaatttaattttattcttaggcaaatggtaaataacattgtgaataaaactaagaaaatcattatgagtggacaatgggttacccatagcaaaattgtaaagtttcttacaagccaataaagggcacccccataagcatgatgagtagtctcttcatgaagttcgcaaggaagaaaaagatcatcagataagagatcatgagtagtcaaattgatttttgtaggaatctaattagaagacatttgccaagcaaacaatctcatatttggagaaatatttaaggtctactaatttttctgtcaactagagtacccaccagaaagagaagtacgacccaactagtaaccactcttgacagagtactagcctagcttttcaaaattccacataagtttatcatccacatctaaaaagggtgaatgaatagataagataacatatgcttcattagggagaaagaggcctcgaactaaacccaagttctaaccccttgaagcctcacgtaacaaagaaactttgcttccctcactaagaaaatgaggagtcaacaccaatgagggagctgcagaagggacaaccaaggaagtaggaacattgtaggttctagaagcttggattctaagaatacaaatagattttattataatttatcattatatagtaatttatgtattttttttatttgaactcttaaagtgtactatattaatgtcacgttagtagccttttaaaaaaaatgtcacgttagtactattttttttttttaaaaaaaataagtaaaatgtaactaaaatatgatatttgcaatatttttataattcaagaaaaattttgtaactgaaaaagttaagaaagtaaaagtctactatagttttagttcaggtcaaatcctatttatttcatagactaactaatatttttatttctcgaactttgatatttaccaaatctcgtttcacaaacttttcatgtcgtgcaaatttccttaaaattattaagattgttgaattcaaggacattcgttcaattccattaaaatttacaacgactcgtctcacatgattggaagtctagggacacaatttggtaacatgtcaaagtttggaagaataatttggtacatgtcaaaatttaaagacataatttggtacataaaaatgatcaatttagacgttcattagcaaaattaaacataattcgacgaaaactcttaaattcaacaatttcaatagttacgataaatttttaatgacttaaaaagttcacagggcatatttgtaacatgtcaaaattttaaggtacgatttgataatttcaataattttgggaaaacttttaacaacttacaaaattgaaaggacatatttgatacaagttaaagttttaagaatagagaaatgtatgtatgtataatatacatgtacatatgtatgtatgtatacatgtattatatacatttgagagagagagagagcagtcgttggtgagagtagcagaatctgagtctgaaaaccccaaaaagaaaattaaaaaaaaaaaatggtggtttgagtttgagactgagaaccatttcttcttcttcttctttagaacgatgtgaaaagagtgattcgaagaagaacctctttggtctctctctggtctccttcaacagagtcatcatcggcactctacaattttgtatgtattatttttttaactcaaaaaaaattctcaacccaaaaaaaaaaaaacgccattgactgtaaataaactcgattcagctctttattgttcttatttttatttttattattatatttttgatatattataataataataatttaattagctttgttgattcgttgtcatttctcaatttttgttttttttttttttaaaattttgattttggattttcattttcgttttctccgtagtgacatcgaatcaatttgtttgttttggttttttagggtctttgtttgtttgatcagcgactggaataaaattttgaagaggaggaggaagaatccatggcggtggttgagaatgctggagtggaattggggaggaacgtggaggaggtagcggcggcggcggcgggtggtggtggtggtggtggaggaggaggaggtggtggaggaaccaacgatcaggatcaaccgaagcacaatggtttgcatcagaacaacaatggtccgattctgaggcctcacgatcagaatcttttcatgaatgttgtgccggagttggggtttgatcatggcgcgaagatcgggggtcctcagtcgatgcagacagtgggagttgggtctgttcatcatcatcagcagcagcgatcgaacggtggggatttgcagatgaatggggatcatcatcatcatcatcatgatggtggggagagctttaatagagatatgagggaattgagggagcttttctcgaagcttaatcccatggcggaggagtttgtacctccttcacttgctaacaatcatggattaaacggtgggtttattaacaatgggtttggtcttttgcttaacaacaacaacaacaacggcaacagaaatgggaacgctaatggcttcaatgctcgacgggtattattaccatttaagtattattgttttgaaattaataacatgtaaaagtatgttttggtttctgggaacaggaaataagaacatgagatgttgagaactctacacgattttcttgctgtttgggtattgtagcttgtgattaggcgtccaaaatgttgtattgagtagaagttatactcatatgtaagcttgttcaagctatgaagtgtgttgggtaaagaagaaaccatgcttttatcatttatagctaatgtgaattggactgtattcttgagaatcaaattgaaaattttgttgatgggttttgttttctcagaggaatagccaaggaaaacggagaatgaacagcaggactagtatggcacaacgagaagatagaattcgtaaaactgtttatgtttctgacattgatcaacaggtttgccatttgcagcttttactttcagcgtttccattatgggtagtaattatttctttggtgtgtgaatgattaatttattggtaatttggacataggtcactgaagaacagcttgcggctctttttatcacttgtggacaggtaattggtctaatctaatgatatatggactgattacagttctgtgtttgcaccatttctcttagtctctgattgttctttcccctctgattgctgaaaaatgatatatgtcatagtagaagtactgtgtgtgtgattttaaatcagatttggaacagtttcccttatctgtttttcttccactgtgaatgtgaaggttgttgattgccgaatttgtggtgatccgaactcagtacttcgttttgccttcattgaattcactgatgaaggtaatatttaccttcaaacatcattactgacctgtcattgtgaaatagtctttagatcggctatgaatgctaggacattttgaccaagttcagttttatatctgattaagcagaaggcgcaaggactgctttgagtcttgcaggaacaatgcttggattttaccctgttagagtattgccgtctaagacagctatagcaccagttaacccaacattcttgccaagggtatagaaaaaaccttgttgttgactattttttttactctggaatgcacctgtcatttccatttaataatctatcaactgtgtactgtttttcattgcagagtgacgatgaacgagagatgtgcgcaagaaccatttattgtacaaatatcgacaaaaaggtgattttcttgtaatttatagttgaaaatggcctagcccaacctatggaatatcttacatgttttatttggtttttcttgtgtaggttgctcaagctgatgttaaactcttttttgaatcagtctgtggagaggttagtgcttttgccaatgctttctctttcttttataagtctaaaatccttgataccatttgtgagaggggctgcatttatatacatctattctaatgcaggtttatcgactaaggctgcttggggactatcatcattctactcgtattgcctttgtggagttcgtaatggtatctacctttttcaatattcctacattctatatatgtgtttgtgtataatgtcctctctttcccattacttttaactgctatatttaatgtaaaaattagggaaggtctattgtgacaagtggggctttcacacgacaattgttgtaataggaagctttattacctgattaaaaatttcattttccatgcccatgcatgtgcattgtcaaaaggaagcattaatttatttataccttatttttttggggtgaaaaggaaaccttactatccttgagggatagctttggtggtgaccctgtagtttgctcccatgaggtctgacccactgaccatatatgaagggaagtagcttgtagtgatcaactgaccacacacactcatcttttgtaatagattattgaatcaccaaattgcttctgtctttctttaggaccatttttccatccttggcacatgagaagatttttcatctcatttggatgtgaccttaccaaccacttttttggtattcacatggagatatgagcctgcatatgtaactctaattgattgttgtttactcttttgcaagtctaaagactgtggtagaaaacgtctgtttggcttttaatttatatatatatattaccaagcataatcagtgtcacacaattgtaatcttggccaactaaagaaggatgagtcttttgtcccgtctttattactttttttttttattgtttatttggttattattttctcatttttggagtgtgtaagggtgatgtttttgatgtcttttaattttttaattgttcgtttcattactattatttttggagtgctcgtgtgttcttaatgattatgcaatcatgtgtaacaattaggaacacatttaagttttcatatcttgcaagccattaaaacacattacaacttcattgcaaaaggttccataaaaaaaagcttcattgcaaaaaaaaaaaataaaataatatacattacaatttagtaccatatgtgttaagtttagtttcctttagagcatatgtcatagtatgtatttatactgcggttgttggtgtcttcagtggtttttgcagtatatctcatagaccttctctagtgcttttaaatgggtttcatacaatgcactgagaagagcaacaggttacaggtgtatccttttgttggactgttatgttgtcttgtctgtagattgtctctagcgatatacgattgtattttttccttgttttcattttgtctaataatctgttttactttgctcaaattcaatccatataagctattctttcagtgggtaaaatgtgtcctgcattaacctttccctacatgtactggttaaaacttaaaagaaacgataatggcatttaatttataattatgctagtttttttgtttatttatttcatacatgttctctatccgcaacaatttatgtccatggtaaaaaatgttgcattctttacttcctatttatgctgctggcgtttagattgttgctttacattttttcaagctcttactggttggatatagtgcataatgggcaagtttaaaattttaaacctacatggtgtttctactattcttttattttttattttcttctttcctgtttagctcaattgttaaagcagagatgttaggcataattataacttgtttattggattcgatacacgatatgagaggaaaaaaaacgtttgggtccgtctttttgcttttgggattaaaaggctcggttagaatagactagactagacttgttttcctatatcgggctgctcgaggaagacctgagtttctgtcaggnnnaagtgttgaacactttcagagattatatagtccaaagtctttgtatgaattcctttggagaaagctgcatgtagaaacacaacttttcttttttccttgaaaagaaaaaccatgaccctacctttgatttttagtgccttgcttggtcccgctgctactacttttttaatcatacatgaccaaatcgtattcaatacatgttatttcatttcatttcattaaaataaggaacttgacgggagttttaatgatgtatttgcaggctgaaagtgcaattgctgctctcaattgtagcggtgtggttttggggtcgttgcctataaggtgggactgtctttaatctaatctcatttttgttaaaagaactttttgaccaatgttctaatcaaactaagctttggtattgtaattaatcagggtaagcccatcgaaaacacccgttcgaccccgagctcctcgtctccccatgcattgagctcactatcatcatcatcatcatctttagatgagcacacaaccactgtccagagtccagacatatatatttttttggttatggttcgaaatgaagtaatgttagcatatgacacccatgtaaagaaaggatgttttcgatgtctgtggtggtcagtctgatgataacacacaatgttgtgtctcttctcttttccctgcctctggggaccttttcatattattattactactattattaatagggcttattatgtttatttttagattatagagttggaacggaacatcgaggctttcggaagatttacttacctacctgtacccgaattattttgggattttacccccaaagatttatgttctgctctcttttctctggttactcaaagtaacaaaaatggggtttctttctcttttcttgcctttcatatacttcaccgttgaaacgaacgggggcgttttatggtgtctaacattactcgatgcaatatcttgagaataatattgaggctaacatattttaattttaaaatttaacactgcaagattacaaatttgcagtggttatcatatggtgtctcatgccaataatgagtattaagtagtaaataaattcacacaataataagagaatattgtgctttgtgcttagtacttatgagttatgactaggtctcagttttggttagtgttattaattatacaattgtacatacttgaacttcacaagtagttttctctaaaatatattataggtcaattaggagagtgaaatagcagtgtatttaacaataattttcagtgatttttata

SEQ ID NO: 15759 - DNA, 3917 bp, Cannabis sativa
ttattataatatattttatttattataaaaataataatttctttttttgattatcggtatctcaaaggagcacccaagaacacagaaacaaattgaagaagaacagaccaaccaacacgagaaaagggagataactcccaaccgcaacatcaacaaaaggaaaacactaaacactaaacaaaagacaacaaactaaataagaaagaaagtcagagacaacaaaacgccaacacagccatatgctcaaccattaaatagggagctgtcaaaattggacagatcaatgttctcgaattgatttgaactgattgtccatttggccacaccatgggctacaccatttaaccttctagggatctaagaaacctcctaaagacttagatgttttgcattgttgtgaaactttgccactaaatcctggacattatgatgcaaggcgttgatatcattccgcttcctaagcacagcattgtacagaccttgattgttggcagttttagcacccccgttaagagcaacaatctcgccagcgaaaggatcactatagatcagtcgcgcaatgaagatgttcgtggttttcccatcttcattcctgaaaacagctgctccaacagaatgacgatcaccaatagcaacatcagtgttgcatatgatccatccaagtggaggcgggagccacttggacaatgacatgccatcgaggttgtgaaggttttccatctctaggagtctcctattgatttgaataattaacaccgtaagagaagtatgacttgcattgtggattcgattattctgttctttccaaatatgatcaaagatgatcgcagccccctcgaagaacacactaaacctcaccccctggccagttagcgtcaaccttgaaccatgacagccaagtatctcaatctgtaatgcaagggccactggttttaagctggcaaatactaccaaaccaaatagctctagcaaaatggcaagtccaaaagagatgaaaggagtcttccacagtcgaagaacagaatggaaaacttgagtcatgtaagctaagcatcgaaagaagtttacctctagtgagtagactgttggagagaattttctaccattacatctttaatctactatggattcgagttcccaagatagttctctatttctcattatggttctcatttgcctcaaaattcttaaccaccctatatgccgatttgatgctgaacttaccagtgggttccggaagccaaatccaggagtcctcagcgcgatggttagggagtgtaatgttgagtattattttggcatcctcgtggctaaaccaaagtctaaccatatcttccttacaataattgatgtggataaaattactcaccaagctcacccctactgaagcatctaaccgaggtagaggttggaggttgccattcgggacccagggatggaaccaaataaatgtagatcgactgttaccaatcttccgacaaaggcctttgaggagatggcttctggtatgcatgatggccttccaaaggatcgagtcagatgcattaatttctaaatcaaggaaattttggttcttcagatatttggcatccacaacttgactccataggctagtgttgtccaaaagaactttccaagcccacttcattaagaaagctatgtttgtggcttctgttgatcaaaatcccagacccccgcaaacctttaggcgacacaatttctcccaagtaatcgtgtgcatagatcttttcccatccaagtctctccaccaaaagtctctgagtgtcttatcaatcatgttcgcgatggagatggtaatgacatctgagaacgccacatagttagaaatagcagaacccacatacttgatgaggcaagctttctcggtgctcaaaaggaggttagccttccactcttggacctgtttcaagactctctccactagatggctggtgtcataagttcgtttgagggatctaaataatggtagacccaagtaggtggcattagtcggcatcttcttcatcgctagtaaataacctcctgagtaaatggtgccataagatgctcattttcatccaccgaaatacgtgaattaataacttctgtaccacgctagagttggtcatttgtcgggttggatgtttgaaaaatatctataaaataccgctccacttcaccaacaatctcttcttcaacacacaacttttgaccagtttccgtcataatctcagtaatagcatttttcttcttcctcactgacgctttgttatgaaagtatcttgtgtttctatcacttgccagaatccattccgatcttgatctctgcttccaataaagttcatctctactcataagatcatccaatttaagttctagagttttctcacctcatccattcgctcattgagagcattagcattcaaaagtttatctatctccatctgagtttccactacttgcttagacaacgacccaaatctttgcttattccaagttgacgggcgatttgcacagtattcaagagattcccgaagtcccaaagggtcggccacatctattgtacatctttgccaagcctccaacacgatggatccacattcatcttctttaagccaatgtgattcaaaacggaatcgccttttaactcgctcatgacttcgtacgacaacattctcaagttttgcaactataagacgatggtcagaacgaagaaaatcaccatggcacactcgaactgaaggatacaactaataccaagcttgattgcacacaaaccgatctaactgttcttagacaagtgaagtaccttgtcttttattcacccaagtgaaagatgacccttcataccccaagtcatctagcatacagtcatcgagaactttttgaaactttctcatcgccataacatcgcgatctgctccacccttctttccgcgcatagataaaaacctcactgaaatcccccctcacaaaaccatggtagattaaagaattgctttatacgcctaaggagtaaccaagactcttttcggaggtgagtttttaggttgttataaaatcccatgatcgccacaactcactccccgaacattgtacaagagcatcaatatgtccagtagagtagcttttaacagtaacatcccagtcatcattccacattaataagagcacccgctgctccccacacaatccacatgaaagctataagtaaaattgatatgtcttcgaataccttttgtcaaattaccgtaaagcttaatctcatataagaagacaaaacttggagaatacttgcgcacaatagtccgcaatgcatttactacatcggggtttcctataccccatgcattccagcataagatactcattggggctggcaagtctgctccgcagactgcaccattccatcatcaaccaccataggactaacaactggtggaatattttgttccactcttctctcttccactgtaccaacaacatcattttttctttccacaccgctaggagatcgattaccctcaatcgaatgtgtagcatcatgcttggaagattttcagctttctatgttttgacaaatcgaacaataaaataatttttcgtgaatttgaaatcaacatgtgccttgcacttgacacattctactagtatgtacacaaacgacaatcttagatagatcacacaaaatagcttttctactctatctttaaaatactttattaaaactctaatttttctattttacctcacatatttatattacattatactttatttatattttttttctatattatttaaatattatattttgcatatattttattaataaaaataaaagaaaatacacaaataaataaaaagaagaataaaaaatcaatcaaagatataaaaaagagaaagaaaaaatataa

SEQ ID NO: 15760 - DNA, 2995 bp, Cannabis sativa
atattggattccaaacaaaccatcacaagacaattacctttcttctctaagtgagctttgagctttcagcaatcagctttcttatgcatgaagcattgataaaagttgcacttccctttaaaaaaactcattcttatgaccagttgaagaagagcttgcttgtccatttcccttaggattggtgtctttcttcttatgagtatattagaccactatttatagtgtttaggatgatcacacctcacattcaatatttaggacactccatgaatgttatcaacacataaataggtaaaatagggcttatggacgtttgggagtaatgttgggattaaaccttatataattgaaattgtaaagaacaatgataaaagaatgaaagagcaagagaaaggtagagagatacagaatgatagagattgaaagacaaaaatctcttaatttaatgcatcaaaaaatgagaatcgaatttatacatgtttcgaatacaagggaataattgagctaaggtaacaactcataacaattctaacagattcagttagaaagctaagtaactactttgacaaacctaaccaactttactaactgaaaataacagagtcagttctcttgatactctccctcaaactcataaatgaagcatcttcaatttaaagtttgtctctgagaatcttgaagcgattgttggaaatggccttagtgaccctcagatagttggtcttaggcggcacatgcttgacttcaacatattattgcaacaccctttgtctgactttttggagtccacataaatgatgtgcgaggtacatagttcgattatgaactcgtttagtttcatcctattgactcgactcatcccaataaaggatctccgaaataggaatttcgtaatgaatctctctaattgtctatttatttttatttagcttatccatctaggttgggggtagggcccgacagttctagatctctttccatactttgtgtctgaagtacttcacttaatttcctccgtagtaccaaatacaaatcaagttctatatgcttagttcttgcatgaagaactggattttttagtgagcaaaaaagtgctccaattgtcacaccaaaaaactagaagtctaggaatagttatgtgaagttcagagaatagggagtgatgccatgtgatttcaacagcaacattggttaaggccctatattcagtttttgtgctagatcttgagatggtatgttgcttcttagaggaccaagcaaccaagtttgaaccaaaaaaaatgaaatttcctatgatagacctttggtcatcgagattcaaggcctaatcatcatcataaaaggaaaaaatttcatgatgtggaagttttctaagatgcaatccatataattctattgtcccactgtgatatctaatgatcctttttactgccatccaatgtacttgcaagggattttgcatgaactggtgtaccttgcttacactgaatgagatttcaagtcttgtgacagttaagtactgaagagatccaactatcgacctatatagatgtacatcctccactggatcactgccataagcaaaaaagtctaaggccacttgtcataggtgctgagttagattttgcccccttgcatctgtgtcttgcataacggatccctaatgtacttgccctgaggtaaatgtggtccttttgatgtatgtttaactttaacacctagggaagtaactcagttcttcaagatctttgagaaggaattgagtgtgtaaatttgaaataagttgtgtgacaatttttagattgcttccagttataagtatatcatccacatacactaaaattagagttgtggatttacatgaatgttgaacaaataaggattgatctgactatgctaatacaaaaccaaaggtgagaagagactgttagagcctttcaaaccaggctctgggtgtctgctttacctatatagagtcttgtttagtttgcagactaggttaggaacatagttgtcctcaaagccaagaagttgagtcatgtatatctcttcatggagaattccattaagaaaattattatttacatcaagttgtctaacttgctagccttgtgacagtgctagagtgagaacaactcgaatagtagctggtatgaccactagactaaaagtctcattaaaatccaaaccaagttgttggtgaaatcattttacaacaaaccttactatgtatttatttatgagtgattcacagtttcttatgctatttttttaaatcaaaatgtataagattcgatattaaattacactaataacaatatattactttttgtagtgcttgacacatttttccttacatttctctttttaatagtgatatagttttctaacctaagaaaattaaaataatatttcttgtcactaattacatgaattaatgttagaatatttttgttatcacattgttatttgtaaaaatttattacatgtcattactttattcattgtatatctgtatatgtagtagtgtatgagcctaaccatctacctctatgtttgggaaattgcacaataatttttttttgagttctgcactatgcattaaaagaaatgataataaattaattataaaagaaaaattaataattataatttatataatcttttttttttattattattaactgtatttatattattatttatatatagtcgaatcttgtgatttgtgtattccaagaagaacagaaccccccacgacatggagcattctgtacaatttttataattaatttcttcttacaattctaccattttttttgggtaacctttttaattctctctctcttcatatgtatatattctataccactttttacatataataatataaataaaatatgtatataattcaaaaatgtatgcgttcaatacacgcttcttcaggtacggtgcgttgtgttctgttcttccacatcttatattaaacgcacaa

SEQ ID NO: 15761 - DNA, 6260 bp, Cannabis sativa
aaaaaacagggactgaactcaagccaaaatctagaacacaacagtctccacaatccccggccatagcaagaccatggaaaatcctattggatatccaaacgcgatcaacatcaggcccatatttaagtgcaaatgtccgtcctccgcatcatttaatcctcgctgcctcccatttaaagctttgttgaaggccgaccgtcaatggcacaaaacgatttgcctttcattactgaatctccttcccatctctctctctctcatatgggtctagatatgagtgtattttcatattcctgtgatctattaccttaattatgtacaaacttttcttattatctttcaattaaaaaaaaaaaaagaaaaagaaaaaaaaggaagaacaagaagaaagaaacataaaatcattttattttgaaaaggaaagggttacgattatatcacatggcgggaaaaataaaagcgtaccgcgcaagctctttattccttttttatatgcgttttatttaatatatatataattaagggagccgaaacgggggcggaaaacctaaccgttgtctcttcattccaactctccgtcgtattcggtaatcgctatagcacactcgcctgattgattcccgagttaactcaatttctcgctatataaattcccacacaacccaatgagggttttaaggtctcggataatcgtttcaaccgaaaccacacccaaatccaaaacccaaaagactagacaacaaaaccacaacttggagccttctactccagcccagaacaaggagccctctgcgctttcttcctctcgctcccccaattctcacccaccttccgattcccctgcagtctcaatgggcccagaatcggattcggtgttgtcatctgggttaatgcggaggcatacccgacgactctcttccaaggtggtggagcccgatgaggcctcgggtcggaataggagtggtggtggctcgaaagaagatgaggaagaagcggttgatcacggggttttgggtatggatgtgaataatgaggggggttttacgttgattgatgagaattttagggttgttgaggatggaggtgaagatagaggaggcggtgagggttttggtgaagttgggttgggttcggatacgggaaattctgggaagagaaagttgggtattgatattaattctctgcctttgggttgtgaagaagacggtgaaggaagtaaaggggttttgaatttgcggtcaggaaagaaagttgggaagagaagagtagaaggagttgatgaagaaagtgaagttcaagatatgggtgattttggtaaagaaacaccagaaggaggagagaaacgaaagagtaagttggccgatcatggtgatttgtcgaattgtcttgatttaattgtgctggattcggaagaggaaacggagagtttagatgtgaatgtagttgagggtggcagtgttggaggaaataggaagggcaagagaaaaatgagttttggaagtgaagatgaaaatgtggaggaagctcctactgccattagtaatgatactcataataggagaaggagattctgcattaacaaaaaagggaagggaaagtggattgaatatacagtggacaatgaggtcttgtatggaccgcggaaggttgaaaagtttgagtctattttaatgctggccaatgcagttgcacttgttcaagaagaggataggattaggagttacagagaagatagagcaaatatgtacagggaacggttcagagaaatagccaaggaaaatgctactcgatttgcttattttaatcgcgaagaggaagaagaaatgcctgctaaagattttaatgaatcggatactgaagattggcctggtccgttttccactgccatgaagattattagagatcgagagagaacaagtctgcgaagatcttcttctgttgggagcaaacgtgctcaacttatatggacgcccaagaacagtaaaggtaaagaacatgagtgttttaggccccgggttcctacgcttaccgaattatctacaatgtgtcttgctgacaatgctgattcaatcacctctcttgaatttatcccggacgtgttgaagcaccggcttagtaagttgctaagtgattctcggaggatggatggtcaattttttagattgctagttcaagggtcgcctactgaggttcgtttatgggattgttcttggctaacagaggaagtgtttacagattctttggagaactttgatccgagcaatttagcagtatgttttctgttttgttatgaatatttcaatctaccaagttacttcgcttatacttaactgatcatgtgtccttacaaaaatcaaaagtaacaattgtcaatagtcatcacatggattaaatggcaatgtgtgtgagcctaactttttctcacacatattggctcagctcctctgccaccgaaggatcaacattgcactgattcatgtcttgttatatgattcttttgatcattaattcttctagttctgtcattcttgaagttgaacatgattgaatgaaatatgctttttatttaatcgtcattgtatgtttagtatatacagtatattgaaattaagcgttttgtagttgattctcttgcaaaagtcttatgatgagtttttacttttattttttacatggagccttaaaatagtctaaacttagaagatacttaaatttaatgagttttcccctaaaaaaggagtttgatctgttttggattgaaggcgatttagtatattgccatgtcttattctcaaatagtagcataataatgctatttttatacagaagcagggtacagttatttgaatgttagcacttgattgtaattcctactaatatctgttactcttgtgtttacctacattgttcttggtttgtttgacatgctgtatatttgttcttgcaaatacttgttcacgaaaatagtttcaagattctttggactacattttctagtatcatcagcaggatgttgaaaattaaagtctgttggtttgtttatttgtttgaattttttttaagctggatttttgtgtcttgaatcaggtgcttcaacttgatcagtgtggacgctgtctgccagattatattttggttgacaccttagccaagtcagcaaattatttgcctgcactagttactttatcaattcgtggggcatgccggcttacagatgttggactaaagtttcttatttcctctacaccggcacttagatctcttaatatcagccagtgctcccttctcacctcttctagtattgacactatagccatttcgttgggttcagttttgagggaattgtatcttgatgattgccagggcatagatgctatgcttatgctgccagcagtgaagaaccttgaacaattagaggttttatctttagcaggcatggaaagcgtttgcgatacatttatcatggaatttattagaagtcggggtgataatataaaagagctcattttaactaattgtgggtaagttgctttacatatttctttcatattgctcataattctcttcactttcatttaagttttcttgtttttggttatgatgttcttggtttggtgcagaaagttgacagattcttcagtgaagatcatttctgaaacatgctctgggttacttgcaatcgaccttgggaacgtgtgcaaactgacaagttcttcattagtctatcttgcaaatggttgtcagaacattcgaagattgagactctgtcgcaattctttcaggttgttagtaaatctaaataattatactggtttatatagaattctgtagctaattaacacttaagcgtgactaactgtgcatcattggatggctgactgggaaaccccagtcctgttgtatgtttcttaacattttaaagaattttgaggacctataagatttatccacttcgctcgcacattagtacttcaaggacaaattctggtgttcaatgtttaatgcatccattgaattgttgtatcatgtatgatgtatgaaagttggatttttaaatcttggatattatttcccagaacttgtctttcttttcctgcttacaagatcttatctcattgtaactaacttgtggacactgttgatcttctcttcctaactgactaataaaatatatttgttaaatgaaaacagtgataaaagtatagctgccttcctagaatcatctggactgtgtctggaggaactgtctttgaataacatcaggaaggtatttataatttttttctctctttctcttccaacgcatatacacatacatgcaagagttggctatgcatatatttatattgcatgaatcaaattcatggctgctcattactaaactttttggtttttgcttcaattttttttcaagttcttaaattaatctgcccttttacattttgcaaatatttgaaaagaaatcttgaaattcgctcaatccttgagtgcacttgtaggtcggctgccagacagccttatcgattggccgcttaagaaagctgaatagtctggatttgtcgtggtgccggaatttgtcagataatgaattgggtttcattgtggatagttgcctatctctgagggtgcttaaactctttggatgtactcaggtaagcctgtgaaacagaattacctgttatatgctcatggaccagttttctcttcccagattttctattcaacagattatgataattctagattaaatttattggttgggttatgttttcttttctatgtagattacaaatatttttctcgatggtcactcaaatccagatgtacagatcattggcttgaaaatgtctcctgtgcttgataatgtttgctgggcacatccatatgatgctccactgcgttatactagtgcaccttcatcttatctctaactggaggtatgatatcaatgacttggaaagatggaattcaactgaaaatagtttaatcggatgagcttatgggtaaatcttttggtttttttttgtttttaactcatagaataccctgcacaaatcgactccttttgcaaatagaatacaatttgaaagtgtccaaccttacattgtacaagaactcggaacatcagatgttttttgttggttctggtggaaatgggaagaatagcaaatttttggacaattcaccaatatcatgtttgacaaggatatttttttttacgtatctcttgttattgttatttggcactacagtaactacaagttctttctttctcataaacgaatgatttaaatttggtagatcatggctacaaataccaccaaccaaacagccttgacttagaggtaagggcttgaatgggggttcctttgaaagtcttaaatataaagtgtccatcaccatcatcatgtcactggttggagttgtttcttcttaggggtgcacaaaatgtagggtgacttattcaacccaagcagtgttgatcttattgcattactattttagactctacggacaaatgttaaaaccggatttgcatgggttggccaaggattgagaattattggtttgatccaacccataatatatgatatattacttatatataattattttaacaggtttttctcaaatattatgtttattaatgtaataataaatagttatgttaaaaatatattttttaattaatcttttcaaaattaaaattcattttttgtatacaaatatcaacatgcaataacccaatccttctattcttgtaaaatgtaaggttgaattgtacggttaaaaagataattacataaacaagtttctttaaatatatttttacggcatttatataaaataacaaaaaaattataagaaagtaacataaaaataatatataaataataataacaagagtatcacataaaaatatactaaaaaaattatattttataaaattttgtagtttttgtaatttctttttttaaaaattatccttgaaaatttgaatgactcaattcttcgaaattatagttgttgagtctggtgtacaaacaggttcacttgactcgtattaaataaaagggaaatttacaaaaatacaggaatttgagttaactattataaaaatactgtcacacggaatttttttcaaaaatactgtgtttttataaaacacaactgaaaaataccagtacaacaccaataaaaacttaacacagtatactgcagtttaaaacttataaaaaaaaatatagttaaaaagtaaa

SEQ ID NO: 15762 - DNA, 8446 bp, Cannabis sativa
tttagcatccaatccaatccaatccaattgtaattaaatttctaattttttgtaattggattggattggatcagttcggttcaattggattggattggatgatgcccacccctaactcccttaatataagtgcatcgatacaatttttatatgtttcaacattcagaaaaaaatttaatttatttttttcatattcgtttatattataattatttaagatattttacaaaattttgaaattttttgaataatttaccatatagaatgcagtgttcaattagtgtattttacacacgcataaaataaaataattacgcgtataacatattgcttgaattttatttttgacgtattaattttttttaaatttttacaaaatatcttaaatagctatagaatacataattatgaaaaaaaatttgactaaaataatatttcgaacatcaaaacaaataaaatggtacatcttttctaagagatacattgtagaatttaaaaaaaaaaattaaaaaaaccataaaaaatattcataaaaaaaaaaaaaaaaaaagaaaagaaaattccccttaactaattaggagtcacatatatttccatctgggcttttaggcggtcaagggcccaatatcagagtttcagtctcagcctcagcttcagcctcagcctcaccactattcactatctccttttcctctgtctggacaaaaccaaacttcataacaagaagagaagaccagagaagagaagagaagaaaatgaagatggtgatataattattattgggaaatgaattgagaacacatcaaggagtttactttcctctgattctcatctacgccatacttggctgatccatggctgccacaacaagcctaagcctgctcccccaaattactccttaccgttcccacaaattaagcaacgataaccgtctcaagctcaaatgcctccggccacgtcttcctccgcctctgaatcttaattctcctttatccttactttcttcctccatctccaggtacttcttcaccgctttcttatatatatacatatatatatatatattctaattgatgttgttatttgttattattagggtttctctttgttaattcgttttgttttctttttcactatacctcaggcatccaattcgagctgtctatggcggttcgggcttctttcccaagactaatggttgtagtaacactagtattaggcataagtctgtgttgagtgagcttcccctcgccaaagctgattctttgagaccacgtcattgcgtttcgtgctctctttgtcgaagccgacggggctattcacgtttcaaaacgtcaataccatctgtgttttctgataaatcttcgttttgcttatccaagcccaaacaatgcgatgccctggtaagtgttctactactaataaaaatagcctttatgagtttttttattagcaaaatatctttacaaaaaaatttattagcaaaataaacttgtatggtcatcaaacgaccatagatttacactgtcatgcaaaacacgatcatagatttacactatcatgcaaaacgaccatagatttgcaaattaagcgaggttattttgcaaatttagtattttatattgttattttggtaaatttcactactaatattcgtacagtaatcgcacttttattatgggttaatgtatcttctttctttgttttgctcgtacaggttccatgtgcaactgttggtccggatgagccacacgcagccagcactgccttgccagaaggtattattgagaaacaagacttggatttattgtatagtggagttggaggagatgacaaagaattggatgagttcttaacttgtcaacttccctctcatccaaaactctatcgagggcaattgaagaatggcatgcgttatcttattttacccaataaagttcctccgaacaggtaattttcaattcatttctcattttatttttaggaacactctgttattatgttgttcaatacgaattttagtgtggtttccttcactcaaacaacatttatatgcactatacattttcccacttcaaaattgttgggattttaggtttgaagcgcacatggaagttcacgtaggatcaatagatgaggaagatgacgagcaaggaatcgctcatatgatcgaacatgtagctttccttggaagtaaaaaacgtgagaaacttcttgggacaggggcacgatcaaatgcttacaccgattttcatcatacagtgtttcatatccattcaccaactagttcaaaggttcattattctctctttcgcttcactgtgtcttaatcttttctcgctaatcattctgtattagtccaattatttttcactgtttctgttgggtgttatttgaagagtttatttttgaacttgcacttgactatgcgtaatagtttattggaaaaaaaaaggtatattgataatagtgtggtgctttcaggattctgatggagatctacttccatatgtattggatgcgctaaatgaggtatgaccttttgggtttgcttcaataatagcattgacttgatctgtctttcagtcacaattttttcttcaaatttctttttcatgtgcttgcaacaagtttaaattgaaagatgtcattctaagctgacattattctttattttgtgttgtaatagatagctttccatccgaagttcctttcttctcgagtagaaaaagaaaggcgtgcgatactttcagaattacaaatgatgaatacaattgattatcgtgttgactgccaggtatgaactgaagatatcgttgtttggttatatcatattgcttattactgtctcaatcaatgtgtatttttccttcctttcaaacacagttactacaacatcttcattctgaaaacaagctgagcaaaaggtttccaattggattagaagatcagattaagaagtgggatgctgacaaaataaggaaattccatgaacgttggtacttccctggaaatgcaaccttgtacattgtcggggatattgacgacatctcaaaaacagttttccagatagaagtacgtttacacacacactatatatattataaatttaatgaatcctctttatgtattccaagtcagtgatctttcattttccagtttacatctagaatctgtatgctgactcgatttattgcttatttgcaggcagtctttggacaaactggcacagaatctgaagctgtctctccatcaagtcccagtgcttttggtgcaatggctagtttccttgttcccaagctctcagttggcctcggtggaagtttatctaatgaaagatcatctaattctgtagaacaatctaaaatcttcaaaaaggaaaggcacgcagttcgtcctcccgtaaagcataattggtcactccccggaagcagcacagatgagaagcttccacaaatttttcagcatgagctgattcaaaatttttccttcaatatgttttgcaaggtactgactactaaggttttgaggctacgcatctcttcctgagtatactacagggctttcagctgaatagcttagtcaaatagaatgctaagttaatactggttttctactcctcaaaaagttcctggaagttacttatgtattgagatgcttacatgagtgatatcattttcttgaaaacattgttgctctaagcaagtagaatgtttgtttaaggacacaatttagattgcctttctctttgctttgaattattagctgtgaaatttcttgcagattccagtgagtaaggttcaaacatatggtgacctaaggaatgttctgatgaagagaatatttctatctgctttgcattttcggattaatacgagatacaaggtgtgtttatagtgtcatatcaaatattctactgtacactcttcaaaattcttgactggttttttatcattagtacataatactccttagtatattggtttccccctttttgaacatgtgttaatcttaatatggagtcatttgattcttaagtcatcagtatttaggctttcagaagttcacttcaactgttttgtatatgcttaagtccttattttggagagtacttataaatttcctagcttgtactgttttttctttttcggctgttgaatagatgccttaaagttagctgctaatccattgtaatttttagagttcaaatccaccatttacctcaattgaattggaccatagtgactctggaagagaaggatgcactgttactacccttactgtaactgctgaaccaaagaattggcaaagtgcaataaaagttgctgttcaagaggtttgtcattttctaccttcatcacctataatattcacaagttcggtcttcctgttctcaatttgatgcatttctcccccttgcccgatgagcaaagaagctatttgtttaattgatggcaatggcacaaataatctggtgccatttacttggttttcttagcgaggctaattgtttttgagttgtttcaggttcgtcggcttaaagagtttggggttaccaagggtgaattgactcgctatatggatgcacttttgaaagacagtgaacatctggcagctatgattgataatgtgtcatctgtagataatttggattttattatggagagtgacgcgttgggccatacagtgatggaccaaaggcagggacatgagagtttggtaactgttgctggaacaattaaacttgaggaggtaataactttatgttatattcaaaaaaagaaaaaattaactttatgttatataaggcttgctctgtcattcagaatctgtgctgtgttcagcttgatgatgttctgtaagaaatttaactgtttaaattataatgttaaattaactggcagtcttgttaaggtagtgtgtctagtgtggttttataactttacggtgaagttttatttatctttgggtgtgttaagcagtgagcaaaatattaagcagttgtcttaagattatatgtattgatctttaattctcagttaccgtaatttttcattgacttgttatcttcgactatttttttatgtaggtaaattttattggggctaaggtgttggaatttgtctctgattatggaaaacctactgcacccattcctgctgcaatagttgcatgtgttccgagaaaagtgcatattgaaggaaagggtgaaaccgaattcacaatattccctagtgagattacagctgctataaaagcaggactgaaggagcctatcgaggctgaacccgaggtgttgtttatttccatgctattaactttaacctcttgattgcattgcatgccaacaattttcagttgaagatttttggtttgatataaatttgacttgtttattgcagcttgaggtgccaaaggagctactatcttcatcacaactacaggaattatggctggagcgtagcccatcctttatttccttaagttctgaaactaatgtctcaaaaattcatgacaaggaaacaggaattactcaatgccgtctctctaatggaattcccgtgaactacaaggtatgtgacatgatttattcagttgtaagaacttattatgaatatttattttccttataatcattggacgggttcttggttaatggatgatatataagtatatttatacatatatatatatatttatgtatgtatacttttatgagtagccttaaccaactcttggagttagcttcatatctatggcttccccccttctttattgatttttttaattgttctaaatggtgatgctgtttcgcattaaaccaactcatgtgatgctctattcaataaaacattcttccaaagaaatgtggtcatcgtccccaaattgttatttccttcacatgcagatttcaaaaagtgaagcccgtggaggtgtaatgcggcttatagttgggggtggacgagcagttgaaagttctgaatcaagaggagcagttgttgtgggtgttcgaactctcagtgaaggaggacgtgttggaaatttttcaagggagcaggtttgtaaccctgtattcattggcaaagctaatagcctaatcaattatacgaggttttcatcagggttccagtattttgcttgaggacaattttttcgttcattgtttttaccagaagaaaatttacaaaaattttgagagttaactgcatgatatgttttccctgatagcatgtacacattctcttctccaggttgaactattctgtgtaaatcacctgatcaattgctccttggaatccactgaggaatttattgctatggaatttcgttttactttgagagataatgggatgcgtgcagctttccaattgctccatatggtattggaggtaaacccatttgatctgtgtctactagttttcttttatatgtgataaagaacaatagtgtatctaccacaaacagagagaaaatagaggaaaagaaggagaaacttgattgaaattaggaaaacgagtccaggatattcgagagacctggtttctctccagagccaaggctcattccagccctaaacaacaacagtgtataattgattagggtattcgtgcccagccctaaacatctcatccctatttattcccttaaaactttccaaaccaaacatacatcaaaataaatcaaaacatagagcaagaaaccaccagctttccaaaaatatcccaccccaattcttctcactaattatggggtctcctagcatatgtgtagcagattgttggtctatcaatatgctttaagatgttttcttggttgctgctagtgctacaaaaggatccactcattagcacttctgtttccatgggctcctagcaaataacctttggaactgatactaattttaaaattttttctatgctttgctgttgcagcatagtgtctggctggatgatgcatttgacagagcaagacaattatatttgtcatattatcggtctattcccaagagcttggagcggtccactgcccacaaactcatgatagcaatgttggatggagatgaacgatttgttgagcctactccaaaatcattacaaaatttgaccttgcaatctgtaaaggatgcagtcatgaaccagtttgtaggaaataacatggaggtgtgtgattcttactgtatatattcttttatgaaattgtatataaatataacatttctggtcgactaattgatgaataattgtttttcaaggtaagtatagttggcgacttttctgaggaggatatagagtcttgtattcttgactacctcggtacagttagagctactggaaatctcacaagtaaccatgatgagtatgcccctgttgtttttcgtccttctccatctgatttgcagtctcagcaggtgggatgagaaactaatagattactgaagttttaaagcttgttttccattaaaatattattcatagttgtctctgtttattccatcaggtattcttgaaggacaccgatgagagagcatgtgcctatattgcaggtcctgcaccaaaccgctggggttttacagttgatggaaaagacctgttcgagtcaattagtagtatttctactggtgatggtgagttgttgcagcatcttatgtaaaactaatcatttgagtgatgtacagatattaatatggctagggtatatgcagttccacaaccagacactgaagaatcgcttactggggctgagggttttgaaaaggatttgcaaaggaaacttcgtgggcatccacttttctttggtatcactatggggcttctggctgagattattaactcgaggtagtttttcctgcacacaacttaataagcacctgaaaaaggctcaacttcatgtatcagatgcattcagtcatatgtagttctatatggtgtagtaacattcatgcacctttagttgaaagttaaattcataaatcaaatacattttgccatttgtaagctctataatattcttccgtgattttgcgcaggctgttcacaactgtacgcgattctcttggattgacgtatgacgtttcatttgaattaaacttattcgataggctgaatcttggatggtatgttatttccgtaacatctacaccaggcaaggtgaggagtgaatttcatcttgtataatttgtgtttttggcctcttttgaaccacttcacacagttttgactgaaaccaaccttcaggttcacaaagctgttgatgcatgtaagaatgttctcagaggtttgcacagcaacaagattactcaaagggagttggacagggttggtttcttcgttttttttttgtttgtgtgtataatatctatttatatatttggattgcacatgatctgagcttattttgatccttcttttgcaaactgcaggcaaaaagaacccttcttatgaggcat

SEQ ID NO: 15763 - DNA, 4130 bp, Cannabis sativa
ttttttttttttttgtaaatagagctgcattttagtaattgagtatggatatggataatttggattcacaaaagaactttcatggcaaagtatataacctatgtaaaagttgtagagacaatgttagctgggtggaagtaattaggaagatttttattctctattggccttttaaggattaatattcttttgcctaaaacttatttattgatgttggaggattgcaaagctgcaaaagtttccaatataagattaatcaaatggtcaattgtcttgagtgcctcttattctcttttatgctatatgaaattattctattttactttttgtcagacagataatcatttcatttttattagtgctttatgagtgtgtttttattttaaattgacattgtaaattcttgctcaaggttgctagtagaatgctttaccaagtactgtgtaataggggaggctatacgacatttccgtgcccttaagaacattgacgggggaacaatagttttacacaataaaggaaactttggagatcctctttctttgtatcttcgtgctttatgtagagaaggtattcacatacttatcttttttcttgtattcataattttaatctttgaagttttcctttctttaaagtattatgtttaaagaacgtgcaatcaaattggcataaaaatgggttgcaattttttgtttagaactagtatttgagaggcagttaagttacttttaacttaatatttctaattttattgtgtagatgcattgctcacagcaacatttaagctttcacacgtattaagtcagatgactaattaagctatttgatggacatttctttcttaaatctcttttattgtaatatttatcttttcatcgtgttttaccgggattccccctccccctcctttattttattttgttttagttcaggatggacctgttatggtattttacctatgttatgtatgtttcggttaaacatcaataaaatgtcttagaggaggtattgtttgaatacagggagaattgttgacctgctagaagctttagaagctatggccaaagataatcaaccaattccaccacgagccatgatcttgagcaaaaagtaccgcactctcgtaagctcatggattgaacctttacaagaagaagctgaacttggatatgagattgattatgtggccaggtgtgcatatttaaatattatatatatatatatatattgatacttgggaggggggtgggccaggtgtgcatatatagaatacttttgttgatgtaaaatttcatttgttgtttcttcaatttatttttttgttggcttcatggttattcaagtatgtcctaattcatctttaaaaaaaaagtatgtcttaattcacattttttttttgaaaaagagacagaggccattgtcttagactagccccgacccgatatatattaaagtccctcacttgtggcggaagaaaactatggttagaagagtcttagcataaaacatactaaaacacagcaaaaaacagggccggacccaataaaaacagtacttgttagtcctaaaagaaattacatcaaatttctccattctgtagtaaagtctaagaatgagaagtgatcaattcaataatactggatctaaaatattggatagattcgatccgatccaaaacatactaggtttaaaatactggataaactcaaattaaaccaatagagatacatgaaatacatctaatggacagaacaaatccaatccaacattcaatggatgttggattaattggatgattgaaattaattggatcggatcggatggtaaaatttaacatccaatatattaaatcgggtctggataggtctaaaacattggatttgatccaatgaacaccccttagtgaatttgttggattctgatgatcatattgcaatttttcttttccaagaataaagaaaactttagaggtatttgctaactctattgtaagttattttctcgaatttttgtggctgtgttgtgaatattctgcaacaaaataatcatctcgaaattatgacctggcattctgcttttaattttgacatgctgtataaataaccgttgtaatgcatttgagcatttgatgatgtgatatgatgaggagtcgcttacctgttttatattgaacagatacattgcagagggtgggcttactggtgagcgcaaacgatgggtgcctcggagaggaaaaactcctttggatcccgatgcagctggatttatatattcaaaccccatggaagcgtcattcaagcaaagatgtcttgaagatatgaaagtttatcatagaaagcttttgagagctttacggaatgaaggacctgcagctcttggtcatgtatctgaatcagattattttagagtacaggaaaggttaaggaaaattataaagggtcccgagcagaatgtcttaaagccaaaagctgctagtaagatggtagtgtctgaactaaaggaagagctagaagcacaaggtctgccaactgatggtactagaaacgttctttaccagcgtgtccaaaaagcaaggagaataaaccgctctcgtggtcggccactttgggttcctcctgtggaggaggaggaagaagaggtagatcattcattattttttccatttttgttttcttctgtttccttattttatcatacaatttttttagacatggccactggcttattgggggtgttttcaaatttggggatggctttctaggtgatttttttgacatgccaatcttttgttgggtaacttgtgagtagcaatgctaatttttttttttggcttgcaccgtatgtttcatatttaattggcagttacattcaaatctaatttatcttgaaggttgatgaagagctggatgaactaatctcacgaattaagctgcatgaaggcgatacagagttttggaagcgccggttccttggagaaggtcttaatggtgataatggaaattccgtaaacacgggtaaatcagatattgaaattgtgttggatgaagttgacgctgtggaagataccataaatgagttagaagatgatgaggctgatgctgatgatgaggctgatgctgatgctgatgctgatgatgaggacgacgaggaagatgaggaagaggaggaggaggtagaaggagccgacgcagtagaacaaactgagggccaagatgcagacagagttaaggaaaagcgagttgaagccaagaaacctcttcaaatgattggggtgcagttgttgaaggattctgatctaacaacaacatctaaaaagtcaaggagaagagcctctcgatttgccgatgtatggaaattagtggtttttcagattattatcccattatcttaacttgtcatagttgaacataggctccgtccaattctacttgcttttctcacataagaaagtttcttgtccaaaaataattgcataagaaagcctagatgttaacattttagttatgtatggttatttattgaagagtttggcatgttatctatctaactcttggggtaaattttaacatcttccaatatatgtctcgtttacaaatggatgcaggatgacgatgatgatgactggtttcccgaagatgtatatgaggcatttaaggaattgaggaataggaaggtgtttgatgtagatgatatgtatacaatagcagatgtttggggatggacatgggagaaagaactgaagaaaatacctcctcggagatggtcacaggaatgggaagttgagttggcaattaaaattatgctgaaggtaagtttctaacatgctgtgctccctgcattctttactatttattcttgtatgtaacttagtataaaaatttgatatatgagaactcaagaagatatgccctactttttttgattggatgaatttgtgggacttccaagactccactgatgattctaactaaatataagttcttttttttctgaaaaagagaaaagatccttttgtcttatacacgatcctccccgttatatattaaaagcctcccttgtggtggaagaaaaccatggttacaattaataacaaaacagaaattctaaggcaagagtactcccccact

SEQ ID NO: 15764 - DNA, 6241 bp, Cannabis sativa
tatgagcaaaaatccaaattagccaacaatacaaaacacattttttttaatcttatactttgttggaagaataataaaaacttttatttcaaaaaaacaaataataaaaacttagccaaaagttgaatacaaataatcttatgtgatattattatattggtgggatatgtaagagagttgaaaattttatattttttcaaagagtaagaacttttagaaattagaacagtaattgctgatatacttcacaatactccccatttatattccaagagaaagaacaaaaaaaaaacagaaacaaatactttttgtgattctatttctacttggtcgtacacaaaatgcaagaactgaataaccatgttagttaagcataattagtcattttacttgttaattcaactattgaacccaagtttctagcttgaattcataatatagttttttttttattggaataaatagttataatatagttcgttagaagaaatacatatttttgttctatttaataatataaaaagataaaataaaataaaattgacaagcttgggtggatggatacattattcctttccctttttcctatatattgggtaagcaatggtggaaagaaatgatcatagtgagagtgaaaaaccttcctggaggcattctgttctgatatcttgcatctgacgttgaagcagagttgggttgcttgtaacaatggcgtccacacgttcaaataacattttttgcatggaacttacatcatcaaccgtccatgcatacaccttcttatttctcctgtcacaagctcatacatgaatttattaataaactcctccatgctaattgattaccctagcaaatgcaactgaatctaacagagtaaatttagtacccgtgcacaattctgacaagctttttatcaatcaatgggtgatacacacccacaacatcagcatctttcatcctcaacaaattggttctaagtccagtagatggttcaatcatcacaatgtagcctacctgcaagaatttaacaattcataaatgctcaaacacaaattcagaagctaaacgttgaaattttttccgtacatatttatggttctggcattctatctgtacatatttaactggttctagccacgatcatactcgtttatgttgggtttacttgatggctgaaaaatctgatgttgaaaaattatttaaagaattttttcagatgattgaaactcaatttaaaacaaaaaatgacattcttcacactgataatgggacggactgaatatttcaatcatgttttgggtaattttttaaagacaaaggcataatacatcaatctacttgtattgacacccctcaacaaaacagaattgttgaaaggaaaaataagcattttacttgaagttgctcgctctttaatatttttatgtgcatgttcctaaatacttttgtatttaattaatagaatgcctactcatgttctaaactatagcacactcctagattgttttaaaaaggaatttcgggtatcacacatgtattctaatttgcctttaaagattttaggctgcattgtatttgttcatattcctaataatactcagtccaaactggatccaagggctgtaaagtgtgtttttatagggtatgcttctaataaaaagggtacaaatgctatgatcctcaaaccagaaaaatttatgttagtatggatgtttctttttatgagaaacgatcttattttcaaaaaaaattctcttcaatgggagaatgaaatgcaagaggaagataattttttgaattttgcatctaatccgttgcctaacttaattgtttctaatcaagagcagccttaattaacacagataatgtggacaatcatagaactgtagtgccaagtattactgtatctgaaacagggggagaaacactacaaactaatcctgaactccgggtttacactcggaaaatgtttcctcataaaaatcagcagcagcaaccaaaccatattagcactgatcaatctcaacccatgggagcgggacctcaaaaatccacaggtgattctaatccttcatgttctattcctatatcttcttctagtcaagagaattctgatattgatattcctatagctattcgaaagggaactcgtacatgcacaaaatatccctaagctaaacatatctcatacacaaaaatttcctccaatcataaagcatttcttcaaaaatctcaaacttgtttattccaagaaatattctggaggctcttgatgaacctaattggaaatcagcagtgatagaagagatgaatgctcttgggagaagtggtacttgggaaattgttaatttgcctaaaggaaagaagatagtagggtgtagatggatttttacagtaaattacaaggctgatggtagtatagaaaggtataaagcaagattagtggcgaaggggtatactcaaacacatgggactgaatatcaagagaattgtgtccctgttgctaaggtaaactccattagaatcttgttatctctagctgtaaattttaattggccgctttaccaatcagatgtaaaaaatgccttttctaaatggagaccttgaagaagtttttatgaatctatcaccaggatttgaaggaaaaaatgggttcaaaaacagtttgtaagttaaagaaatccttatacgggtgcaaacagtcggctagagcttggttcaagaggtttggaaaagctgtaaaaatttgtggttatatatactatgttctacaaacatagaaaagagggcaagatagttatcttaattgtctatgttgatgacataattttggcaggaaatgacggtcaagaattggaagaactaaatgcaaagcttgcagctgaatttttgctgatcaaagatttggggacagtcaaatactttcttgggatggagtttacaaggtccaaagaaggtgttttggtaaaccaacgtaaatatgttattgatatgctttatgagacgggaatgaccggttgtaaaccagctgagtctcctattgaacccaacttaaagcttaatttgtctaaagaagaagacgtcttaaacaaagaaaagtaccaaagactagttgaacggtaaatctacttgtcacatactcagccagatatagcatttgccataagcatggtaagtcaattcatgcactcacctggacaagtgcactttgatgctatttatagaattctcaagtacttaaaaggaaaaccggggaaaggcttattattcagcaatcatggccatttacaattggaagcttatacagatgcagattggcctggaagttcagttgattgacgttcaacaaaatgtcgtagtaaaaaacaaaatgttgtagcaagaagcagttgcccatggcgtgtgtgaagttttatggattaaaagtttcttatcctttacctatgaaagtgtattgtgataaaaagaaagctgctatttctattgctcacaatccagtgctccatgactaaacaaaccacgtagaagtggacaaacatttcattaaggaaaacttgaatttggactagtatgcatgccatacattcctacaacaatacaaaaagctgatatacttaaaaaggatcttccaacaagacaatttgaaaaactgatgggcaagtggacaagctggatatgaaagacatttttaaaccagctcgaggagggtgttggaaaataggaaataaaatcataaatataaattattaatttatatttatgtgaaatatattgtatagggaaacagatatttacttttcttttctatgtgatttattctctgattcttaggcttacttttgacctacaatatcttgtaattattagcagatttgtacagattctttctattcttgtaccttgcctatttaaaggctattttcctatcaataatatatatcgaatacctttttccacagaattattattgagaataataaattgtagatttgtcattaccatagtatctggtgactgttggataacatctcttgctagtttgtcacttttagcccatacaacacaatttttacaccttgtcctcccaacctgaaatgataattcatttgaaaattcaaccaatgaatcttaaaatactaaggttttaggcacaagttattcttctagagtacagaatcaaatatgtttcgagctgatcatatatggttgaaacatactttttctggtcacagaaatacaagagttggggactagcaagggcaacgtcttgaacaacaagcaattacacagatcaattacatcaagaaagtcgatttccattaagaatattgagcacaagaacaaagttcatgaaagcattaaaaccattagcttaagggtaagaactacccaaaaataattatttcagttttcaggtactcttgtcattgattttcataataatacttcacggcagcaacaactaaagctggctttggatggcaattgcatttgcattcaaacacaggggtaggagtaaactcaaccttatggcatatgtaagttgtaatttatgtgttactgatgagtacatattttatctactcattaccttttacactttgaaaggttgtatttttcttcagtttttgtatggatttgatgtgttctttgtagttcagtgtttaattgttgattctatagtgaatttggagcataatggacataatcgagtgatatgtcaaaactgaagaatgaaacgtgatgaaaaattgacaaaatgccaaactagtgttccagagtccagacgatatatcacctggaatggggctacatgtcgcctgtatctgatgtgaaaaatcccaaaacatcacaaaaatccacctttcaaaactctaggggagtactaggtgatatgtcgcctggtgtacgaactttaaatttaaacccaatttcaaattgatttcaaagattatctttagaggattacaaataggggttttgcgattcatttttggacaactacaaagcatatgaaactcagagaacacaagggaaacagaaatttaagcaattgaccatcataaatagtttttcttcttctacttttctgttttagtctttttttttaacaaaaaaaaaaaagagaaaaatgacacttgtcttggactccccccaacaaaaaaaaaagcctacagcaaccaaagcagagcacacaaccaaagttttaaaaagcttacaatagagtttagttttgatgggattattttagttttgaatgatgaatacagatattgataacttaatgttggtgattatgaactatatattctgtctagagtgttgatggaattattttaaatttatgaaataaagttttgatattatttaaattaggttcttctaatttgttcatgctttcttattattaatgttttctttttaatacttcatcatcattagatttaattacagattatacttgagagagaatattaatttgaatctagaattcatgacatagactcattacaagcgtgtacaaatcattgctaagacacttgccaccagaatttgaggtgtgttgggagagacaatctcagatcggccttcgttgaaggtcgatagattctacactcggtataaatggcgaatgaggttgttgaagattacaagttttgtggcaaaagtggatttgttttcaagattgattttgagaaagcatatgatcgagtcgaatgggattttttggacttggtgttgagtaaagagggttttggggacttatggcagaaatggattagagggtatatctcaacaactacattctctattttcatttatgggagaaaagagtaccaggggactcagagaaggagattcactatcgcagttccttttccaatggtggcagatgttcttgggaggatggtggatgttaaaatatattagctatattaaattattaattgtatttattagtttcctattgagtctctctaacttagttagtttcctatttttactctttaattttttatataaatacacattattctattgaataaaatacacaattcattcaccatatcttacatggtatcagaactgattttaggattgggaattcgaaattcgaaattagggttcatcacaaattggggttttcaattaggattcatcacaaagttgggtttttcaattagggtctttttcggaaaccatctttttcggaaaccatcacaaagttgggtttttcaat

SEQ ID NO: 15765 - DNA, 18076 bp, Cannabis sativa
tatgagaatctgtatgcatcacgcttaatttttttgaaaaaaaaaaaaagcacacatgatgaaaatgattggatatttctaatctcttaaaaggagtccaccaatacatttgatttggtattcgagagaattttttagtttaattttttatatgattgtttatagttatttaagatatctagcaaaattttgagagatttgaaaaaatttaacatgttgaaaacagtgttcgaataaagagtggtcatagaattgttttgtgtccaccaagtaaaaaattaaatttaaaaagaaaggcaggttctttgtgtagtacatagggatcttaaacgtgaattgattatatggtccatatgaaatgaataacaatgtaaatatatattggaaagtgaattgttcttgtaggtctacaaaagaatataacttctctttttgttgagaaaaagaatatatgtctataaataaacttaggaataatcctagatgggtcacccttttcaatggaaattctcttcattaagccttgttgttacttattattagcctttcaatacgaaaaacttgcttctatcatttgagtgaggagattatagctttcactatgtgtattgtgtcccctgcaaaattccaaataagaaaggaattgcttcttaatgaggccaactctatcaaaacataaaagaaatactaaacccaaaaagaaaaaattacctaactgcagggatttgtatatgcataattgtatatatagggactttggttgttcttattacttccctccttttctacttcaatttagaaagctaaaaaaaaaggacttgaagaaaacatgtatatagcaaaagttgaagctttcctttgtgtctttttcacttttatttcatcctactatagcacttttactattataaacaattgtccttttacaatatggcctggtacattagctggttcaggtacaccccaattgctaacaaccggttttcgacttgactctggccaaaccattagaattccttcaattcccggatggtcagggagaatatggggaagaactggctgcacatttgatgcaacaggagctggaaaatgccaaaccggtgattgtggtggcacgcttgaatgtgaaggcagaggtgcaaatccacctacatctctctttgagataacacttggtcatggcgatgataaagatttctatgatgttagcattgtcgacggctacaatcttcccattgttgcctctccagtgggagctttcggtgtctgtaatgccactggatgcgcttctgatatcaatactggtaaagggttttcataacttgactaactaactcttcttattcatcaaggtcgttctagctaaagaaaattgagcctgcacttaggtcccatctagtctaagggttcagaaataagtattttcattttaaaactataagtagtaaagtttttagtagtttttataaaaggctttataattttttttttcttaagacccatccaatcttagggccaaccctatttgttataattgaaaattaaaatagggttgtttttgttttgaaccgatatgacataggttgtccgaaagagcttcaagtggttggaggagaaggtggagatggtgggagtggtgtgataggatgtaagagtgcatgtgaagcttttggattggacaagtattgctgcagtggtcagtttgctaatccaaccacatgtaagccttctttctattcaaccatattcaaaaacgcttgcccaagagcctatagctatgcttttgatgatggcaccagtacttttacttgcaaagcttatgagtactccattctcttctgtcctaaagataatgggtaatgcttcttttcttcaatctctttatttttcaaaagaataactcaatttccttttttctgtaaaaagtaaaaattctactaaattattcttgttgttgacgtttaatcatgtcgtgaagggtgagaaaaccaagcaatggattgacacctccaacaacaccaggaggtgaatttgcaccaccatcgataccaaatagcggtttggcaccaccaacgataccagataccgatttggcacaaccaccaccagccacaccaataggtggactggcaccaccaaccataccggtgcaagagccatcaataccagggagtgagcttgcaccaccaccgccagccataccagtaggtggattggcaccaccaatcataccagttcaagagccatcaataccgatacaacagccatcgatgccagtatatggccacagcgatcaagcagcagtacggatggtctcttcttctaacacactcttgccacttccaaccctgctgccaatcgttcttctgatcctcaagctaatctcatgaacacttctaactgctctgaagtcttgagtcctcgagagctactaaagcaatgagccaagaggaagaactttgttctaaaatctaatttgaagagatgcatgcagatcatagctcattagatcccatcaattggcttttgttatgttctcaaaatgtacattgtgatattgttaccaaatataaatcttacaaaggaaaagtagccaaatatttctacaactatttcagaaacaacataattataagggtaatatgatatttcagtattattaaaattaaatttttcaaggtatatcgatcccattatttcgccataaattctaaccaacatgttcataaaaacctacaactagtgtcatctaattgaacataatacaaattctattgattgttagttatggcagaactaaaatgaataataaaaatataagtttatcctcacttcttggccttgcccttggctttcttggaagctggagctttcctttttactttcttttgcggttgtgccttccctcccgcagctctaccccgctttcgtgcaacgccctgtcatcaagatacatgcaccatattatatttgctaaatgataagctaatattactttaaaggttggatccataccgatgctttctcagcttttccttttgactttccattagttttctcttcaccatcttcaccgagctcagtttgttgagctttcggaaccttttcaccctcttcatccgaatcaaatgagaaaccatccagtgttcctactcaggagaagagaaaaaaccgaatagatttaaggccatattagattcatgactcagcccaacagtagaaaaaagttcccctaccttcaaccatagtttcggattcaaagacgtttgattgtggttttaactgaatgaagtcattcatgatggcttctatctgatcaaagaacagtaattcagtcagttttgtttataatctccagctcttacaaaattaggaatcgaaacttgaagtggtacctctcttgaagatatgtaaaaagtggacaagagtaaaacaataagagtgagttacctatcaattaccatacaaatccagcaatgaatacaattcaagagagaaataaggaagtactaacctttgcctctgattgtccaaagctaacctgaagaacatggatcatcattattatataggagttcgatactaaatttaatgtcaaatatttattatatagctgagattcgtacatgacaatacgaggacattattatgtccaatgtgatgaattttaatagaggaaactgatgacttactacacaaaatgttctggaaggaactattgttgttttgtatatggttcctgaaacagtaatcaacacagagcattaatgcaaatagctgggtgtacaaaaatgcaaaacaattacttacaacagatataagaccaaacacaaaaacaggggtaggatgaaaaggcacaaagaaccatgaaagtaaggtaaccaaagtaaaaataagtaaacaaaataaaggagccgaggaatttcatagtgagtgttttcttttttcatcgataaatcttgaatttaacaactgaaaaaataaaagaagaaagtaaagatattgctcgacagttggtaaggcgctaaggtaataggtatcatcagataatatcattcacttatctaacccactaatcatcgttgacacgagaaataatttaatttgaagaaaacatacctttcaaatccaagtacatctcaggatcaccagatgcagcatctgaaatgacaactcgtccaacagcacctatgtcaccagccaaatctatggaatccccttcacactctacaagtgcctgcacagccacaagaagcaaagtttaggttaattaattgttaggccttaggataaataaaaagatacattggtcattgtaatggggagtattgagatagtatgtatgtgagagtttcagaggggttttgggtagagaattaatttttaaagtgagcattagctcttggcagagagctgggtctctcgaacacccagcaaccttgttctctttatcttttatatcaaaatatatcagctactattttcctcttttgctactgtttagcactattattctacccttttgctactgttcttaattaattgctaggaaattcctatcaagtgtgtgtctatcattaatcaactcatttttcattttcattacggtttgaggtgtggcaatttacacatttgaacgtctttaataactctttttcataattttgttcgaaatatggaaccaatctcacagcagataacatggtaaacattaagtagcaatcttagagaccataaaagaaaagaccatgacaaataattttaactgtaccctacctttgttcgttggactttctcggagagtatcaaaggaaatcttccagaagatacctgaaaatcatagaatagctaaggcaatacataggcaaaagatacatgaacaactttattcttattatcttagtattcttactcgagattcaacttgtttttcaggttccccttcctctttcatttccacatcatcacttgctacatgtgagaaagcaacggaataaaaagcaaaaaactcatattcgaagatagtgaaaaaaaaaatagtacaattaaattaacacttttgtctttttaaagttactttctaagagagtagaccaagaagaaaaaatccttgacattgttatgttctttcagatttaagtggttttggtaatttggtatttcaaaataattgcaaattaaagcaactaatataccacctattagtaccttctttcttcaaactactctttttcttttcttttattgttgtaaggccatccacttgcagctctttttttggcgatttatcttttgaagccttcttagagggagagtcactgctactgccaaggaccgccttcttccctctgcctatacattgagaaattttctcatcatcagaatcttgcttatcattttccgctgtaggactgttttgaggagatgactcggaatctgaagacagtgtccaaactgaggatttcaactcctggttcacatgaaattttatttttatgtcatcaacaacatagagaagatgaccgtaaatataacaaataaggatctcaataaacaaatttaaattacataagtacacagaactttacatcatcagtttccttcttgggaactttcccagcaaccttaccacctgcacaatttacaaataagtggtatttaaagttttgagtatttagctccatagaaattagcatctacttccctttctagcttaaaacatatcacaaaacaaactcataaaacttttagtttaagtcagaagaacaatgtaagctcaatttctcttctttttttattcacctgttcttttcttggctgttttattcttctctaaagatttaccatcttctaacttttgcccttttttcggagtccttaaccttgatctcgaagatttaccaccactttcaccaagaatttttccaagattctcattgtcatctaaggtttctgaagacttacccaaagtcagttcttcactatcagatccatcatcctttgaaggactaccagcaggggaagaaaccacagaatccgatgataattcaaaggttgtctcagtaggaggctagttaacaaaaacaattttttagcaaatgattgatgattgatctaataaaaacacaatcaaattcatagcaacttagataaacataacaatgtaataattcttcaaaaaataccttaaaacaccgcagccaatcaggtgaattctccctggatccgctcatgttgatcttaatccttcctctaattcagcaaaattcttccttcattgaacaataaaccctaaaaaaaaccaaaattacggtccaaaattccactcctaaatcactagaaagtaatccacaaaatattccagaaattgaactgaaatcaaagctgataaactattcgcaaatgttataattacatgaatctgttgctatcgaaagctagtaatcgataaaaattcatgccctagctaactgaaaagaaaataatgcagaagcataaagaaatagataagcggaagtgtaatgcacagtaagtgttcgaagaattgaaaaagagaaagaaaagcttaccagagaaggaaatcactgagtcgactcggaagagctattgagtttatggaatcggaaggttttttttcctaatatatttatatatgaatttgcgccaaaaataagaaataaaataaaggcgggactgtgtctaacactgaaccaaaccattatatatgtttagttgtttgtttgtttgaattggactattctggattgggataaacgcgattctaatttcaatgttcactaaactaaatcatatcatttaattgattaaggaattttgttattgagcaccactaatatttaggggtgacaaattaagttatgatttgcgggtttgtcacaaatagactcgagatcttacaggttcgacatgacacaaaattattcaagttcttttgaataattttatattgcatcacttaaaattattgatcttttatttgtttcggcattaaaaaaaactttttggtctaattgtaaaatttttaaaaaaaaattgtaattgtaattatttgaatcttattttcaatataataaaatattcaatttttttaaaaatttatttatgattttaaatagctatataaagaaaatgaattaaaaaggacttttctattagaacaaataaataaactaatttgtctatttttttaaaatatatttttgagatgagatttaatttactttaatttacatatccgtacgaagttagggatgtgtctctcattttgtaaaaattcttctaaaaaatgttgtaaaaatacttcatttttaaaatattacaaattaaatgctttataaatgaaattgaaacttaatagttgtaacaaaacaatgtttttcatttactagttagaagagatagttttctttggtataattatttattataattttaccttaatcgttttctctttgtgttagtttaatatattgtgttaattgtgttcttcattgtcattgttatacttttgtggttttatgctaagttatatttttataagttatggaaattggagaattcgcaagattgaaagatcattgaatctcaaagatagttttcttcttctttcaattactagattgaaattttactcttccaaattaatttattttaataaatatatatatatatataaatatttgtgtgttttgtaagttgttaatcaattattccaaaaagtatgatgcctaatgttggaattggaggaaaggtttgttgagccccttacattcatttgaacaaaatttgtagattcatgtgatgatagctttggtatttttattttgtagactttaattgtataacattgaatcatgttttgtcttaacataaatgtttatggatttctattatttgatattttaaatttgctatccaattcttttgaatattcttattatgggtcctctcatgagttagactagaattggcaaaacaggtcagacacgataaacaacttgaaacttgcacaagagttagcgggtttgaatttactataagatggggttgtattcggattgacttatctaacccgttcaataaacaggtcatgttcggattaacacgactaacacaaaacaaacctgctaatgacctatttaaaattattttgctattttaacaagtcaaaaatgagttataaatttattaaatatgtcataaacgtgttattggttgaaatgtttaaacaaaatatgcttataaacaagttacacggaggccgtgtcaggtcaatcatttataacggatcatgttcgggtgtcattttctgacacgattattaaacagattgtgttcaaattgagcatatacctgttatacatagacctcgacacgacacgactacgaattgccactcctaagttaggggtgcgtaaattcaagatgcattcaaaacttgtatggataaatttgctctatctattgaaataaataaataattaaaaaaaaaaacttgattttaatatgtttttttttttattacaatggttatattgtatttctgcaactaacagagtcgtttcaaaagattgagaacaagtttatagtaaagataccaataattatatgagtaatggtatatgctaaactttaatgcataattcatatcttcaaaattgagtatgtataatgtattacatacaactgctgagcttataatgaagcccaaagctaagcataccttattaaaaaggcaacaaaagccaatacaaataactcttccaagaatttcttattgcataatacaccataccataaattaaaatggtcaggaaaattccctcaaatcatgagaactactattacactagttcagttctttagatgatgagaactcatcaatataagttactcaaaaaccaataattgatcttgatccaatagaatacaggagctgcaaaaatgtgtgctttttattacatctagctagtgtggttttggaacatacccatcaacagcaaagttccgagtagcgctaggaatagctaaccggactccatctagttcgggttttgcaattacttgacagcccagacgagacctgcaagaatatcgaatcgaaacatgaattttaatcttgcccgaatgacattggaagatgtataaatagtgtgcaagtttgtggtcttacgtttcggtaagtccaaaagctagatccaacatgtcattctcctcatcagttgggtcttctaatttattgtagtactccatatcctacacttagattcaattattattcatcacaaccagaaaatgtttacaaagcagagttttctttttactgcaaatgtcacaaaaacttaccataacaatcacatgacatgttgagcatgcaagtgaggcttcacaagctcctgttataaattttgttgcagaatattagatttcgtaaatcagagaacttgatattacttcataaagccacaaagatataccatcccatgatatatgatgaaacagatcaataaaagaatcaagatactgaggctgaaaacaattactatggacatgttttatggtcgcataatgtaaaagagccatttgagttattttgtaatatcttgtcttgcatttcgagggttttagctttgtctgagtgactttttgagccactttgtattagtttctacaaatcatacaagtttgatgtttcgtttctaaaaaaaatgttacagaattatgaaggttggaaaatataaaattgcattatactatacttaataagcatcagaaagttcatgccttcaagttcaatgtcattttcatgagcagcttctagcatagacattccaactggaactttaatgagcttctcatcaccatccttatcaacaaatgtcacagaaatcctgaacatagacagaaaagaaaatctgtgagaaggctgcaaatctcaatttaaagaaaaaattaaaacaacaatgctaatttgtgagctagttattaaactggtagaactactgaaaaataagaacacagaatacatacactaaactagtaaactgcaatatccagacatgtcatcgaataaaataatttagtacaaataaagggaaaatctaatgacctacattcttttacttacaacatttcttttaattaagaactcatgtcctgccataaacttggctataagaaaaccaaagagacttactcttcctccggctcactcccttcctccgaaggggcgctatttactgaagaaaaaagacgatgcttttgaaagattgctccccttgaaaccttagcttctgactggtcaagttctttaaaacgtcaattaatagtaaacattataaaaatagaaaataatgggaagctataatctctccataaattgaagtgaagcttaaataacatagtttgaggcagtatagtacacaatatcaatttaatagcaaattattcaaagattgcattactataaagcaccctaggggtgcccaacaccctagtatttaaattcaaaggtatgggaaccgatattcattaggaccaatagcaataaaaaggtgttggacaatacacttagagagctctttagcatttcaccaaattactgctttcattctctgatatattcccaaaaatcttgtcattacaaacattttgctctatcaaaccatgtggagtgaatcttcatcaaattacttgcacaaatgctagcaaaagtaatgaaacttcccccttaaaccctaattaatttttttttccacaattgatttttttttcttcccttttcaaacaaaatttcataaacctattccagaaaccacaaaataggatcttggatctcaacatagttagggcaatcagataaaaagagaagggagcaaaaccactaaaatcaataagatcatgtatacatacatttacatatataaagttatacaatttctaaataagaaaagcagaaaactaaccagtgtttgcaagtaatggctagaaggtctgtgtgtatatccagcactagttagggttctagattttcctgacataaccaaaatatacacagaatcaaatttttgtctctaaaattcaacatgataactaaattaagtgttcaaattcaaactatacatagaaagtaagattgaaagcataattgttaatatagcattacctctacaaagctctttaaccatccaaacaccaactcttgaaagtttagaaatgaacataatcgtataacctttcactaccaaaatgaagatcgtatagatatataaatatagcattgataagaataataaaaatttcaacaaaagtggagatggaatttaagggattaccggaaaacggcggagccctcggaggaggaagacggtagacggcggttggagattcggagagagggagtgaggcacggctcgatgggagaggagaggagtatgtgatacctaaatttaacaaccatttaattttttatttaattttatacgttaatgatacttaaattttgcaataataatttatgacataaataaatttttgatactaataatatttaagttataattttaaaatttctagaggaactattaagtaaattatagtaatttctgattttaattttaatttttttatttaaataataatttaaagcaataagaaaatgacactaatttaatatttaacggccaaatacttatagagttaaatttaaatatttataccgcaaattactcttttcataatttccgtgaataattaccattggaatgctattccaatactttaaaatgcaaccaaacattccattctatttcattacctctaaccaaacgccacctaattaattctaataaaaacactataacactctttaaaaatattgtaattataattttacacattattatttaatatattatttgctttaattataaatattatattatttttaaaaaaagatagaatcaatgtcatataatggcattaacacaatattctatgatatgatctatttatctctaatggtatagtatttttatgttttgccaaacatcttctaaaatttaactattagagatgctttttcatattttacttagttattattatttattactgtaaaaacatttaaaattatgtatttttgtatttttttttttttattaaaataatccctaaacataatagggtgtggcaaattccaatttcccaccaaattattaaatgccaaaataaataaataaataaataaaagcttcaatatagtatgaattggcacgtgcctaaccatagacacatgtagcaatgggtagtgactaggcccatatcgtagcccaaactattagggttttaggctattcctactaagaataaaattatactcgtaaccaaacaaacacacccaaatcttcttcttacactttttcgttatcttcaaaaccaaaactttcaaactcaagacgccatttgagaaagaagaagatttttgattttgattcgatggagcaagggaagcaaggagtcatggtggctaaattgtctcctaatcagaacccaatagagcaattacaagttcggtataagcttttggagactcagttcaaaacttggttgactaagcaatctttgcctgttgaagctgccatcgtcactatcactagcgccgctcaaggtgctgccatcggtgcttttatgggtactttaaccaacgatggtggctctccttttcctactcctcctcaggctaaccttaaccctcaagccatggcttcacttaaacaagctcaggtgaaattctgctctctttcgtttttgtttttagaaatggtatttttggtgattttgatcgaaattatgtgagagtttggtgctttattgtggtttgtggcgttatttgtctctgtaactgaactgtataaatacccatttggaaattatgtgaaatagtaattggatagaggaaaggggttctagaaatggaagatagggttttagttattaatctgatcatttacataattttagtatattcatggttctgtggtttgtagcttaaaaggtttaggaaattagatagaaaaatgaaactggaacctcttcaattaatcaaaagatatgtagaaccctagagtaacagttaggatgcttccttatgctaaagaacaccacgaataggcgatattcactgggccaagagcacccgctagagtaagagcttccacagctggttggccaaaatgaggacaatatatatctatgtctgcttacaaagcgcaaagagcgaagagttattgaggtattctaattaaccggcagacttaaaccttgttcctacatgaaccgatcaatttgatcaagcactcgccatctattttcattgttcaactctttgacaacatgaaaatcaacaccaactaaaggtcaaaagatatgaagaatcctagaataacagtgtggatgcttccttatgctaaagttcaccaatggtgtcggcaccacctatatcgctattggtgtaatctaatatagaattcatatatttttatctaataactgttaaacatttgtgaggcccatctcgtaaggtgtcaccttgtggcaccactggtgcctaatagtaatatttcatttttttttccttttttgctttcatgggtttgaattcctaattataatttggtattgtaaattgacagaccttgtttttcattttactgatcaaattttatatttgctgaatgcttgagtaaaaaatattctgaacttgaaattttgagttgggtaagattgattatgtgctttgatctttcatttaacgcgaggaaaaggttgtatgctattaacaatgtgtcaacaacaacaaagatgtatttgatgatatgcatcaagtttttaatgttagtgattttttttttttttggtgtatggtgacaaatgatttactttgattgcaggctctttctggaggcccgtttgtacaagctcgcaactttgctgtaatgactggtgtaaatgctggcatatcatgtgtcatgaaaagattgaggggaaaggaggatgttcagtccaggttagattctcttcaaacactcttcatataatgtccaccattttcttttcatggaaactccaatccgtggtgtatttagcactggtttatatgcccatctgtactggaattaccttgacgtgttgtcaatggccaggggaatttcttacattgtgaaattaccataatttgggcgaacctcttagcaggattgcttacatgtttacactttactaacacttttaatgataattctgttgataaattgtttgttttgtcacacacttatgatttgtttttttttattgaactttccactgatattctaaacaataaaactctcaacaacttttttcattttttgctttttgatagtaaattcatacaaggttatttcaatcactttattgtgttctattttgtcatttgtaagtagtattatttgaagcatgtttattgcaataatttcgttagcttggagttccaatttaagtttcaaattctttttaacattttgtagccggaagctcctagcatagatagagaattgatttgttgccttgatatatcttggagatattttgtttcaattctaagggtggaaaaatgaacttttcttcatgatattagacaaagactgaagattcaaccgagttttctggtagtgctatttgggctagatgggtattacagtcaagtaggattgggcataccttttagaaaccatactgttaccattgtaattattttcaactaaaggcacttgagttctctttggcaagtgtctaagtaattgcaccgaagaggcaaatgaaatcaaagagtattcagtggtttttggaggcaaatattttagctgttaagatataagtttcttaaagttagcttctctttgatattttatagttttctttccttactcatgctgagactattggcattctattgcagtatggtagcagcgtttggttccggagctatgttttcattggtaagtggcatgggcggtccaaatcagatagccaatgcagctacttcagggcttttctttgcacttgttcaaggtggacttttccaggtaaaagcttcagaatggtagagtttagcattttatgagtagaagaaatgcccagatggccaaacttctcataatttcttttgaatatcgtctgacaatttcaatttccatcatataattatcacaccggccaaacttttcacttcaaaaacacctccctgctttgtcgctatgcagttggggcaaaagttttctcaaccgccagtggaagatacttactattccaaaacgagaagcatgttgagtaacctcggtctccagaattacgagaagaatttcaagaaagggttattatcagacaccacgttacctcttctcactgataggtagaagtctttcgataactttcatcgaaacaaaacataagataaaaacccacatacaaaaagagctaatggcatatcattttgtgttttcagcgcacttagagatgtgaagatcccaccaggaccacgactactcattctcgatcacattcaaaggtagtagaaaacagaacatgtctaaatacatacatacatacatgattttttctttatcttatgaagttaatcaaaaatggtttcagggacccggaattcaagggaaaacgtggaaaatagactgtggcgatagccttgtcgggagctgtagttttagctgccattgaagtcaatttgttttcaccagttttaatagcagaagcagatagtgaggtgaggatgagtaattaggaggtgatatgtttttgaaatgaaaagagataatgtgggattgattgttttgttttgtgctgaaaaaattgattcactaaatttgttgggagtaaaatttgattagcaataattcttatgtgtttctctccctcttatgaaaaagtccacttcaaacactacactacacattagagatcatagattgagaagaaaaaaatatatttcatagaaacagggaataaaaatttaagagtatacttactaggcactagggactttgcaatacatataatagttattaaattaaattatatataacctactatttatcaaaattaaagtctaaggattatgtaaaataatattaaaaaattattagtaaattgtaaaataatttatattttgaatgtaagtttgtgctacattagaatttcaagaaatgtaaagatttaacctaactagtaatatatttgaatacttcttgaatttttaatgttaaatttttttcttcaattattgaaattgttagatttaaggacttttgtccaattttagtaaggaaagtttaatatttattaaagtttagggagtatgatttggtacgtcaaagtttgaggggcataattgaatagatatcaaagtttggaaaacataatttagtacatggataattaccgaattagtaaaattgaatgaaattgggcaaaaaattttaaatctaacaatttcaataattgagggagaatttttaatgtgatatatgtcaaaatttaaggtaaaaattataattagtctatttgaaaattttacacttcatatttgattttaaaacagtataagatataaggtaattggttaatcacttttaaggtaattagttctattcattgattaatccattttaaggtaattagttctgttctttctatattttcttaaatttctttcctttttatttttttttaaagaaaatacatttttgaacggattgtatgataatctataaaatttataatttccttaatttaatttaacgaaaatatttatttatttatttatattttatatgtattatttatctctcttacaaatttactctaataaaatttatttacccaatcagctataatactataatataaaattttaacaaatcacaaataaatttatatgtaatctattaatatcaccactacatattatataaatttacatgctcaagtttcttgatgttagattgtttttgtttttatgatttgttcataagaaaaaaaaaatgaaaatgtatattcactaatcggaatgagtcatttgtgtgtgttgtatttgaaaagaaactatcaagtttttaatttggttcaataaaatttatttttaagagattatgatgtttgtcttttgattataattcaaaaataatttatgaatttattttctatttgaataataaaaaatcactaatattcacatgtaaattacatgaccaaaaaaaagtatagtataacttttcttgtttgtagttattaggtaatataagtgtaaccaaaagtaaattttgcagtcaattgcatgcatttttctaatatattttaaaccaacaaaaaaaatagtgtgagtgcatttttatttaaattattgaaatggaattagtgtgagtacttttgtaaagggatgaaactcattttatcatttatgttgtaaagagaaatgtgaaggtagattagccgttatcatattattattagtataatttaatattaaagtcttacatgttttagtttaataaatagcgtaaaaaaatctataaccacacacatgtgacattttgatggtgtaaaaatggtcctaatctaggaaagatcacattacccaaacccccttttcacaaagatttcaacaacacaagaaagaatagcttacacacaaagacactacttgcttggcttggctctttcactatcacattcttattttctcactttctattttctaatctaaaatggtaaaagacacaaacaaacaaacaaaccacactcatatatgttccactatattacaaaatatatctctaaccataacccaaaagcaaacaattatggtagggcaagggcaccacactaaagttgtgacgctcaaaatggttgttttcttgctctttttgtagtggtcatgactcatgatgatagctttggtggtgggaccaatttctttttcaaactcaatctcctcctaccattt

SEQ ID NO: 15766 - DNA, 4819 bp, Cannabis sativa
acaaagaataataaaatatttttgtcaattaaatatgccaaaaatagaattaacagtattatatattattattaaatattattactaaaataagtaaaatacataatacacgatatgaatataattttagtcatataatattttctttattctttctttctctttctctctatctctcattctttcttataacagctgtcataagcaagtttttctttctcttagttggggatactgctagcctggctgtgcaatgctccttgctggcgcaagaggattttgtcccatggatctttgatgggttatctttgttccgggcatggttctcaaaggtccagaatgtgtttaggatgaagttgtctcactactataaaaatagctttttgcttcgatttttaaggggcatataaaaaatttacgtcggttagagtaaccggcattatagccatagatgcaaatgctgttattttgttcttaacttctaaaccgacacaaaaaaaaatttgcttcgtttcataaccgaaacaattagtaatattgcaatgacgcaaattgattttttttttttttaaaaaaaatgaactagatcgatcacacccagcaccatcaagatttagatttggatctaacaaaaaatatgaactagtgctgtaacatgtttacgacatgtcttattcatgtataagtataaaatttgagccatttgtactaatacgcacccaaaaactgaaaccctagcatgagatgtcaacttgggcactaagcgcccagaatatcaacttggacgctagttactcgggttgacttataagagatcatttcaactctttttcagttctcaagatttggacttggattcttcttaactttatggatccgaatacttaaggaaggtgagttgaaagcagcttagcaggatccaaacacccatttctaaagttcccaaagtaaactttggcgcagtaactccatgaatatattttcttcttgccacgtgttaaatgttgatatccacacatcagggctagtttttaggtaaatatagttaaatcaatttaattattctactcataattaaaagattataccaaataacgatttagtcgaaagtaccatttttccctcaagaataattttccataaattttaatgctctcttaataattattcctcaaattaaacatttccatttatattgtggtatagaggtgatatggggaccataaacctatatttcgatgctctaataaactctagattattattgaactcatcaataaaataatatggcttattaattccattattactccactataaatatagaattgtactttttgataatgtaaaattatattgacaaaattatttttagtagtccattgatataatcagtaactagtttgtcttccaatttattagttcataactagagctgatcaaaataactattattttcttctacttatctcttgaattccttgagtaccattaatttattgtgaacaattaatctataacttcaataatagatttggatacaactacagtcactcctcgaattaacaatttaagggagctaatattcgatcctttcagaaagtttggattcctcttattgtataacttgtttccaaccattcatgttatcaagctcttaaaacagaagttgtaagaatcattttctttaagaaactttaacgagtgaagcaaacaacttaatgaatacaaacaagagttcatgaatagtcaggatttaatctgatctactgatgatcatcattgtgatatgaataactctttaatgatgaataactctttaatgataaataacatgttgataaaatatgttaattgtgcatttactaaatgtctattcacatatgtgatcccaataaaaatcacatgccactaaattatagtacttagtaaacctacttagtaattctatattaaaaattccatacctttaatacacacaaatttattctagctattcatataaattatatctctataattaatatatattttttttataataatttgtatttcatatattctctaatatattatccactaaatatttactttaagggcgtaaaccctaacaccaacaacaacaaaacaataaaaaatgcaccaaccccattacaatatgcaaattatttataaatcaactccaaaatataaaacataaaaaaaaaaaatacttttattaatcaaatattaatcactctacccaaaccaaaacaataaacaaaatacatatacaacaaaaacaacaaaatattaaaaagataaaacaacttaacatcaactcatctttaaccttatgattgctataatagaaagaaaaataaaaacatagaataggtagaggagatgagaaattatggcgatataaaaaagaatatatttctttttatcttatttggaaagagagaaggaaaaaaaaattaaatgtgtaattataatttaatacttttatataaattatttttgatggaaataattttaactaattttgtaaggattaaaatgaaattaattaagattttttcaaaaaatagtattggattaaattgagtgtgactagtaaaaaaattgtaataaaaagaagaagttattctaaatcttaaaaatagaacaaattgtatgatagtgagaaaaataggtaagagtgttaaaaaagaaaaaaaaatcctaaaaacaaataaagtgtttgaaagagtgagggagtgagaatagaaagagtaaaaaaaaagtgagcaactttgacaaaaataaagaaaaaagaagaaaagtctgacaaagagaacggaaagaaaaaagtcatgctcatgtattagaaaaaggaagaaacaaaaaaaaaaatagtaaaaaaaaacttaaagtatagactatacaaatataaaaaatacaataaatgacactataaatgtagagttaaaatctccaataataataaaaaaaaagtaagtaaaagtaaaaaatttgtgtgttttgttattgatacttatataaatattattattaatattatgatatgattacaaaattattaacatgatgacaatatacagtggtgtttagttggttgagaaggattgaacatctccttcatcactaagcttctagctcgatttatagtcataaagcatagatacaagtgttcttcaagctcatcaagctgctcattaatatttgactcatttttcttaaggtgtcgcaccacttcattgctaactttcagccaatcttcttctcctcgatcaacccaaaatttcacagctccccttaagtgctccaactcatcattgagcctagccacgagccgactaattatgtcaaagtctcgatttagtatgtaggtcccttttgcggctgcatcgagctgcgctgtcaccctagccagcttccttgatgaagccaactctattgaagctgaaatcaaggttggaatggctacaactaatgagagtgcatgtgtcacaacaatcacactcaatgaagccgtcaaagccacgaggacaacagccgagccgtgttttagtttgttcatgagttgaagcttggctcgagctttgtctcggcttacttcgagcctatgaagtaatccagaacaacctttttgaacaattctaactcggcttggagatgagataggagaagtgaatgggttgattgagcaagaaaactgagtgagttggtttgagattatatgacttatttctcctcctttaactgattggattgaggttttaaaataacggtatttgccacgtgtcttctgaatgtcgtttaatagagtgccacataggatggaggcattggcagtttgggtgaaatattcagagagtagtgcatggattttgggccggttatgggccaaggataagatgtgtgtgactgtgggctgatctggatccaaaagatgttcaatgaataaacgataggatgggagccgagccgagctggtggactcggctggaatagcagtggcgtaatcagcatttgatattgcaatgacacgtgtccaaaagtcaatataggattcggtgcggaaggcattcgcatattcttcccgaacatcaatattggtaataggattattgagagatgtattggctgtcatattcatacacacaaaattatattaattgatgcttttacaagtaaactctttctatataatatggaaatttcgttttttttcttcttcttcaacaccaaaaaaaaataataaaagaaaatagcaaaattaaacttacaataatattgcttttcaaaaaaaaaaaaaaaaaaaacttacaataatatccacgttattttgaatattttttttttttattttcaaatattccaaaaataaatatatctaaaaattattaaataatattatattattaaattttaatataataataataataataataataataatattgttagacaatttttattggcatatttttttactccaataataaacatcaataaaaaaataaaaatatacttaaaatattctttaaaatatttttttttattctaatgatattggctaggatttgggatgggaccaatgttcgacccttacaaattaagacttttattagtctcgatttaaaataaaatgtcctaataaaaatgattgagtaattctacgatggattcatttgaaaagaatgtactgatgcactatttacttgtttcagcattcagacaaaaaatttagtctaattcttttttatatattcatatacgttatttaagatatcctacaaaattttaaaaatttgaaataatttacaat

SEQ ID NO: 15767 - DNA, 8104 bp, Cannabis sativa
aattttgcgggttgtcttaaataactataacgtacacgaccatgagaaaaaatttgactaaaaaattatttcgggtgctaaaataaacaaggatgtatcaatatatccattttaaaagagtgcattgtagaattttcccatttattatatcttaagaggtattcttattaagcagtatataattaagggcaaaacttgataagataaaaaattcaggaataaaattactaattattttatataaaacttatgatgtgtatccattattatttattgatgatacatataagtcctataaagacacaactggcatgagacaagacaacaatatggtagagtttgaatatttgaatcttgccctttacaactaaaatttaaaatggggaacacataacacaataagcacaaggctatcgggctacaaaaatgacaaatgcccaccaaaattacagaaaaaaggacaacatttcattcccacttctattttcccttctccaactaattattgatctattttctgaaaattggtattccatttttcatttttacttttcttgtttttatcattttggacaaatttccagtccctattaaaagtaattcatctagtactaatactataataaataataaatgataaaaaaagggggcaagcaagtagtcaaagtagttcattcacagtggcccctttggtgtctggttcctccaacagttgcttaagcaatgagaataggtcatgcacgtgacaaaccacccttttataatatcttatcctttcgtattgcccacttctgacttctattactaaaaactattaatcaacttaaactttatttaagtttatcatcctcatcatattagaaaacatctttaaatagatccatagaatctattttatctttcttttcaatgttaattttccttatctgaatatgtcacgaaagaagaaaagaaagaaaaaaacaacgacaatcagttttattccataaaaaataagattgatttttggtgctttcatcagaagcaaaccaaagaaaattcattattaagcgaataataatgttctgagaaaaaaaaggaattgggaaagaaaataataaacaaaacgatatttttgaaaaaaaagaacgttacaacaaaaagaaaaaagacttttttaactaatcggatattaaaatcaatttgttataaaaacctttaattaatggaagttgtaattttatacctaaactaaactgaaactcacatatttaactgaatttgacctcatctaatctaaatctaatataagacagcgacttcgtttcgtttcttcaagcgtgttatttacagttaaaataaccttaattactattttttttaaaattaaaatatttacgtgtgtgcacgcgcgtagggatacaaatcccgaaaatgacaacgtggcgtctataaagagtagcgtgcaattcacgtgcgcaggagtcaattaaatttcaacttaattcaatacgttgaaagaaatcgaaaaacaaaaacaaaattaaaataaaggaaagaagagaaagagaggagaatgatgagctggtaaagaatgctcaggcaactaaaacccaccctcgaaagaaaaaaaaaccaaccttggatccaaaaagttcattttcagttttttttttattattttattttttatattttataattttagtttaattttctaaaattttctcttactttctggcttcccaaccaaaaagctaagcaatgcctctgtatagcttattatatttaacttcctcgtagcagcttcattttcctaccctatctatctcaaacccttactttcccggaaagtgactggagagaacaactgagaaaaggaaagggggaaagagaaagagaaagagaaagagaaagagaggcttacctgcattttggtttatctgtcttcttgaggttttaagacaatgggagctcgttgctctaagctctcggtatgctttttcccttgtcaaattaaattcaaatcacatctcaacgacacgtttgatacgggtgagtgtttaaatatttatatatgtattattaaggttgtttttctgtcactttctcgggaaatttttactttttctaattattctgggtgcatttaatgaagattctgctttttgtgtgtggatattatagagagtggaagcaagaacgatgacttgttgcctgggttctgcgagtttagcttcgaccagctcagaactgcaacttcgggattttcgtcggaaaacatcgtctccgagcacggagagaaggctcccaatgttgtttacaaaggcaaggttgaggatgacttttttattgctgtgaagcgtttcaataggtcggcttggcccgatgctcgccaatttatggttcgtgttctattaactttgattcttatggagaaagaatgtccgttttttgatgattgtttggctagttttgttgatccatcgtgtttgttttcggtgttttcaggaggaagctagggcggtggggcagctgcgcagtgagcgcttggcaaatttgatcgggtgttgctgtgaaggcgatgagagactccttgttgccgagttcatgcctaatgagactctttctaagcatcttttccattgtaaggtgtctcctccttttgtcttttgtctttttcttcttctttctctccgccttcgagttgatcttgcattcaaatttgatggtgcaaggtatttgttgatgggagaacatatcaaatttaaaaatatagtcgattggtatataatttaagatatttttgctctaatcaaattatgcctgctcccttaggaattttgtttaggatctacaaaaagggaaatgaatggctgtttttctctttatttgaaggttttatttatgcatcagaggcatatcattgattttaaagtttatctattttgaattataggggatgctcagcctatgaaatgggcaatgagagtacgggtggctttgtatcttgcacaggccttagaatattgcagcagcaaaggacgagcactatatcatgatcttaatgcttatagagtcttgtttgatcaggtactcttcccatttagattatatcatggtttatctgctcggaattgtgttgtggctatgcttgtctctggtaagctattcctatttctaaaaccccgaacttgacaggattgtaatccaagactctcctgctttggtcttatgaagaatagcagagatggcaagagctatagtaccaaccttgctttcacccctcctgaatacttgaggacaggtagcaatcatactcacggaaaggaatctataaccttataatttaacttaagtttacttatgcggatttctgtggttcgtaattgatattgtacagtttggacaaccagaacaatgactttccaaccacatttataaatttttcacagaatctttcaatatcttgcacagaattgctcaaatgggagtaataattagttattgtttttcccctggcaggaagagtgacttcagaaagtgtggtttacagctttggaactctgctacttgatttgctaagtggaaaacacattccgcccagccatgtaagctttttttactttacaaagctatatttaagaaggatggtgacacattaacatccagataaattttttgacctaccatagcaagttatatcttttaagtgttgctgctattatgtctactacaaagaatttagtgagataaatttctgggaaaaaaaatgtttcctacttggattttggttatgatgcaaattatggtcatattatcaaaataaatttaagctaatgaggtatatctaatttcttaatttccttccttacaggcacttgacttaatacgtggtaaaaatatttctatgctgatggattcatgcttagaaggtcacttttcaaatgatgatggaactgaagtagtgcggttagctacacggtgtttgcaatatgagcctcgtgacaggccaaatgccaagtctcttgtggttgctctcactcctcttcaaaaagaaacggaggtatgctcaatttcttttcctgaaagtgatttgcttgctttgtttacaagagaaactctattagtgcaccaagttatgctgtctaattccttttatacatagcaggttctatcacatattttgatgggtattcctcatcgagatgcacctccaaaggagctcccattgtcaccacttggtgaagcttgttcaagattagatcttacagccatacatgaaatattggagaaggttggatacaaagacgatgaaggaattgccaatgaggttagctttgttcagattttactacctgtagaacaatgtatactccaagtgaccagggaaatcttaattataagatccaataaacctgagctgacataatccttaatggcattaaaattagaattgaacatataagtttaaaagtaatcattccattttttgatcagttatatgtgatttcctttgtttttgcagctttcattccaaatgtggacaaatcaaatacaagagacactaaatgctaagaaacgtggagattcagcatttcgatctaaggactatgcgactgcaatagattcttacacaaaggtaagttattgttttggtgtaacaagcattgcgtcccttctcaaatgtggcattggaagattataagttttatatcattcaagtttcaacagaaaagaaagtataattatactttattttatggatatttgacaaaactcaccacaaaatatacatgcatagaagcattgataccttatgatataaaatgtgggtcccttaaattatggatcactaagggtgaactgctgtgtttttatgcagttcattgatggtgggacaatgatttctccgacggcctttgctaggcgttgcttgtgttacttgatgaatgacatgtcacaagaagctctgggagatgctatgcaagcacaagtaataaatccagaatggccgactgccttctatcttcaggctgcggccttgaagagcctgggaatggaaaatgatgcagaagaaactctaaaggatggtacaggcttggaagccagaagaaatagagactaaaagtgtatagtttttttttctttttttcctttcttaaacttgtatgtagcttttgttcattctctccttgaatttggagattcaaatgtaactacggttatgttggccttggtgtagttttcatttgatttaagaagcttctctactttgtcgatgcagtcgtgttatatccttttatttccacgcgcttagcattcaactcaaatattgatgttcatcagattttcccaaaattaccatatgatctaaaacgtagaactttaaaaccgatcaagccttacatctctcgtatattttattttttaaggtcggtgagtattataattcgtcatcgaatcaggccatgatccattcacgattttcaacactaaatttaatcattcaagatgagaactgcaataatacaatatcagatcttatacacgagtaatttatagaattgataaatataagaatttgacctaggtttaaggaagttcgaagcactaaatttagcgtagcttcagttcggttttggacccaacataagaatatgttaagagcccctgataatgtaaaacttttcaatcaattctaatcaaaataactcaattatattattaaagtaacacaaactagaatagaaacggccaccaattcttctcaaatcatctgagcaatgtttatggctaaagtggtgatttatgaaaggaaaattcttcataataaatgataagctgtaaaatggcagcaaaagttaaaaactgccaccagttcttatacattaaaataaataaaccattacagtgagcaatcacaattttcactgtcatcaggcaccaactcaaggcttgtatctacgaacaaaaatcagagtagacaagtttttcacattcccggtcgacctgaaccaagcagctggccaactaaattagtcacctgaggaagaaaaaaggattgttctgatcaaaattcattataatttgcccttcattaccctaaaaaaggtcaatcaaagcgctaacatgatctaaatagatgaacccagcaaactttaaaagggggcttctcgagaatggtacaaaaaaaaggaaagcagggaacatcaaacatacttggaggaaaaaaaaaagttatcacttttaagctttagaaggggaagtacaggaattaggtcaaaagatcttgcagaactcgagagataattataacaacaaaataaaatgaaagaaaataaccaaacaaaacaatgaggtgtatagcaaaggagatgtttcgcaatgactgtttttctaattctgactttcaaatattacagtactaagagcatacacaatacttacatgccaatattttgagacacaacgatcaatgcaactgttttcacccatatttagctctgattccttgtacctaaaaccataaagaaatgtatcacgaacacctttcagttcaaaatcacagtatagtgaagaattctttttatgggcttatataaaagaagtattgaaaacaacaacaacaacaataataagtaaaacaaatacgatagaaagtttcacctactttttctcgacacatttgttaaaacacgtgtgtgtaagcctgaaagcagaagaaatataaatgaataattgatagtatgtcaggaactttgtaattactgaagcaattaaatttgtgtacgtggtaaacaaagcagcacatttctttttataagtaaaataaagcaacaatctactacaaataatcaatttatcaaaaacagtcagaaaatgcatttacatatatgttgaaccggaaattttaagagttcaaaataattttaaactaaaaataaaattagtgattagaccttaaataggaaactgaggcaagcatgtgtagaatggagtaacaaggatttgaaaaaggaaattatgcataaagacgttaaatattccacactgaaaacttaattgacaatttgccttaagttctttcattacaatgagggggccagaaccagctctcaaaggcaccaagccctacagatagtctcaatctcaggtgaccaaaaaaataaaatagtagtgcaaaagggtgcaacattcacccagcttagtatgaccacacccaaacataccatgccacttaaaattgggaatcaaactgcaaaaccatcaaattaatgatgatacccctaaacataccatcccactcaaaattgagtcaaactgcaaaaacatcaaatttatgataccaaacataccatcccactaaaaattgggaatcaaaatgctaaaccatcaaatttatgacaccagaggcaagtaaaatatcattgcttcagagcagtggtgtaaacatggaagtcaattacctagctgacgcaatttaaggcccggagcaaaagtttgaaaggaaaagctataggcttaccatccttataaaaggttataagtatataattttcaaagcacacacagtcaatgaaataaaaacgtactatcaattgttaaccaaataagaaaaaggttcgacttcccccattatgataatataataattgtgctggtgaggcttgcaatgcaaaaaaaaaacttacttgttaaataactccactctgtattccatttctttctctgccatactaaagatctgtaaatataccaatacaataactaaaattaacatttatcaaacaagaaagaatgagaaaataataacttaaaattgaggtaacaatttaagtaacactcacaattttgtaaaaataacttttatgaaaatttttattagcaaaaagaaataaccatgaattacactgtccttcatgtccgaccataaacaactattatggttacaaaacgaccatagatttacactgtgtgactgtgagtaaattaagcgaggttattatgtaaattttaatatttgaaatggttattttggcaaatttctcccttcataccaccacttaaatttcattacccaaaaaatttagacccaacgtcagtaaacttcgatattcaactc

SEQ ID NO: 15768 - DNA, 14850 bp, Cannabis sativa
  modified_base (2135)..(2149): a, c, t, g, unknown or other
  modified_base (3920)..(3921): a, c, t, g, unknown or other
aaaaaaaaaaaaattaacattatggctccgaagaagaagaagacggtatcagttaagaaagtggtacgagaggtagaaactattcaagttgctattgaagaaactcaaaacgacactgttttagacagtaaagctttcaacactacttcttctactacaacaactacaactagtagcactgttatccctatacaacaagaacaggtcctaaacgacaccgttttgaacaaaaaacaatctgatgctgatcaacagcccgtggcagacccaattaaggacaaggtgaggcttttgcttatgctatttttttttttttttattaagtataaaaaaattaaaaattaaaattaatcaggtagaataaaataggtgactgtctctcttaaataaatacatggggtttttttattttatattttaaagcatttttttttacatttttcaacatttgtatattatattattttaatgttttattcattttgaatgaaattttgagtttggtttttgtttaggctcgttttatactaaataaataaaaaattaattatctagaaaaaaaaaaaaataagtatagttacatttgtattattatattgttttaatattttattcggctccactcaaacgaaatcatcaacagcaaaaacaaaacgacagcgttttggcaaagaacaagaggaagaagaatagaaaacaacaagatcaggtaattaaaaacgacaccgttttgaaaaataaaaggcaacaaaaacaaaacgacagcgttttggagacgaggagcaagaagaagattaagaagagaaggaaaaatagtaatagtagggaagagtacaagaggtatgtatttctggttttgaagcaagttcatcctggtatgagaatctcaacgaaagccatgagtgtaatgaatagtatgatgaatgatgtgtttgagaggttagcacaagaatcagccaaattggttacttataatcgtaagatgacactctcttctagggagattcaagctgctgttggacttgttttccctggtcaacttggtcaacatgccatggctgagggtgctaaggcccttgcctcttatttctcttcaaacactacttaattttattatatatatatatgtgttgtttggtttccactgtcgacttttatcgaacactttgggtaattgttgtcttttgtttttactagataatgtcgttttgtcgaacagtttggcttattattgtaattgttgtcgtttttactgggtaatgtcgttttttggaaatgatgtcgttttttcgaacagttggtttcatattgtaattgctgtcgtttttactagataatatcgttttttcgaaatgatgtagttttgtcgaacagtttggcttcatattgaaattgttgtcgtttttactagataatgtcgttttttggaaatgatgtcgttttatcgaacagtttaccttcatgttgtaattattgtcgttttactagataatgtcgttttatcgagggtgctatggccctttgcttaatgcatatatctaacatcttgtttagtgatatattttcgtctttatatttcagagtggacttttatcgaacagttttgctttgtattgtaattgttgtcgtttttcaagctaatgtcgttttgttaaaacattgtcgttttaccgagggtgcgaaggccttatatatatggaacaatttgggtttactaactatgttgggcgatggtcgtatgtcattaaatgtcgttttcgatgatattagggaggattacacaactttttttaatttttttttctaattttgcttaaaactatttatgtttatataaacacaagaaagatagttgttgactacacagaccacactctaccaacaaacaaacaaaccttttttacttgaaagagtgatcgcataaatctcgttgttaaattgatgaagatgatgatgaagaagacgttgatgttatagaaacctatattttttttttttattttattttaattggaaaattaaagagagaagtgggataaagtagtgtttagtaaaataattttaattaattttttgtttttaaatttgagaaaacagtattttataaaattattttaattttttaattgagaatnnnnnnnnnnnnnnnaaaaaaaataaataaataaattttcttccagtattgatgctgaacctaacttagatttaacttaaataaaatttaaaaataaatttcgtaaaattaattacagaatacaacgcagttaaaatatttatttttatattataattatttaaaatataatataaaattttaaaaaagttaacacagttataacatttatttctatatggtaaattattgtaaaggttgcattgatccacttctttaaagggtgcattctattttcaccaaacacacattataatgagtgtcgttttaacaacctactgtcgttttatgaaaagagatgtcgtttttcgatgatatttagacagatagtttgttgactacagagtcacaaactttattaccaacaaacaaacctttctacttgaagatgatgacgatgatgaagaaaagaggttgatgttatacaaaaattttatttcaaaataaaaaattaaagagagagagagaagtggataaacactaaagaactcacttgaccaaaattcaatcaaaatttctcaatgcttaaaaataaacaccaaaccattaataatcgaaagctatacccagtaaacgacgatgcacctttcgtcaccgaatcacaaccaccagcgccaccgccaccgccgcctcatttggtaaccatggattcatcgatggtactggtgatcctcgttctctccacagctttagtctcagtcatcttcttctgcttctatctctgccgacctaaccccgtcccctcctcctccaccgacacaactaacgtttcttctcggaaaggagtggatccagcggcggtgccggtcagctcttacggtggcgttgccaaggagaataatcggaatgtggagtgtgcgatatgtttgggtgagtttggggaaaacgacgacgttaaagtgatgccgttttgtaggcacgtgtttcatccttgttgtattgacacgtggcttgcttcgcacgtgacttgtcctgtttgtaggtcaactagagttttggatgaggttggagggggagaagaatggaggtaatttgttttgtttctttctttgttttgaattggaaaaagtaaataatagttatcgagtttggaacgacggcgtttcgttgtgtttttttgttttgagtttgtgaattgtgagtttgtgtatgtgtttagctggaaggaagaaaatttcattatgctagccacgtgtacatataattgtgacaaggattgttcacctactaagtactaactagtttatcatcactaatatggtattatttattttaagtaaaggataatcataaacaattatggcaaataatattaatataaaaaacggatcattttgatttttgaatctgtgtttttgttaaaaattactgatcagataacaaaatagctcttatatttttcaaaattgtaagagatagtaaactggtgcagtaagatttggtcaattatgattttctgataaataaattgaagaattaaggagcaacaatcatcattagtagccgataatactataatatataaaaataggtttctttctccacttaataatattcttattggggtcaaaaaaagaagacaaagttgttgaaatcatacactctttatgtatattatatatttaataagaggagagatcatcagaaatcatatccaagaggaaaccaaatcgaaaaaaactatgtgaagtgaagtgaagtgaagtgtagaaagaaacaaagctacgttgttgttgttgttgttgtnnttgttgttgttgttgatgttgttaatctcaaagtcttcccttttcttttcttttccttttgtgtataatattaatgagagtaatcaattttttatagtatggaataagcacgaatcacctcaactaccggtgctcggcacattggacacttgcctttactctcaaccagctcgttagcacatttcgaacatgtacacatgtgcccacatctgcacccataaaaaaaacacacacacacattatatataaataattatctaaaataaatatacatatatatataaatgaagaaaagggttctgagaatcttctaccaacctgtacaataaagagtcaatattggtattagaacatatacagcacattccttttctaacatgatcccatttggtgtcatccatggccaaaccactctcatcctcacacaacactgctgcaaatggttttatatgatattatggtccttttccaataattgtatgtactttaatctttaaattcttatctaaatttgttaatgtgtaccttgtgaagcagctggcctattcagggcagcagagacttcttgtctaattgaacgttgcaactcgagttgcatgtccatgcaagtttccatcattctctgtaaattattcatcctttgttgtagcctggccatgtcgatcctcatgtcattgatgatttcccactcctataaataataacaaaaagaaattagtgacaattaaaacacttgacataaatattaatagaattaagtgttgaagatacttagagacatacacatacaattccatatcgttgatgcatttcatgctgtgtaaaggtatcgcggtgtggcctctggtcccacattgggggaggaggaggaggaattggacgagtggatggagccacaggaggaggcggtctcacaacagtagcatcctcctgagcctcactctgatttgcccttgcttgatcgagatcttgttcaacggatgcaggagatggtgatgaaccatccagctcccagtcaacagcggcatggctttgcctttccacatatgattgtattaactgatcaagactctcgcgaaagccactgtgaagaagattagatactcttctcctgaaaatgaaaacattgaatccatataaataaataacacccactaatattaatgcagaagaatgggcgagattcttttcatacctgcctagtagttccctgagttcaatgctataaacattatcatcatcggggaaataatatgtctcaacctgcctggctggaacagtttcactatctgatggctcttctagccaactatgcgcagtttcttggaaatcaccttcctcgtgccactcttcaggaacctcttccaaatgactattttgtacgtcttcatttccctgagaccatccaaattcagttgtttgttgctgacttccttcgatattttcaccggggttgtcagtccattcatcatattcaccatcaacttgctcccaatctccctcctcatttgctagagattgatcctgccactgctctacctcagaagcagattcttccccgatcgtatgagcaactgtgttatcttctaaatcatctgcaggaccagatagatgagggtagtcatttgactcccttctcgactcagattcatcattggctgaataactggcttccagaatattcctacgttcttcaacaccaatatgcaatgtatcactggcccattcattagtagcattttcctgtgagtcaacatctgtgtttagttcagtgtcatctctcctgtcaataaattcagcattggttgaccatcgccattctcttaccagattgtctggaacttgttcatgccattcttctattatgtgatcgtttgattcttgtgaatctatatcttcaacggcattgcctctcaactcactctgaccatccaatattccatggccgtcgtgttcttgatcttcactcccttcataattaagttctgattgttcgcaaatatcacctctgacttcaaataagttattttcttgaggttccccatttcgagttgaactggtgtcctcattagatgtatcagaaagactgctgcttgcttgagcacaaacagaattatccagtctagagaacccttccctacgttaaaagaaacggatccaaaatgttaagagcaaaaactaacaaactaaataataatgagtcctacgaaatatataaaacatcttattaaaaattgatagacaccacaaaaaaattatcgtctgcaatagtaaagggctatacacaaagacatacaacagacagacatgtaggtataaatttaaaagaatcagtgagaaagtactgtgtttacaaaagataaaataaagaaagtactgtgtttacaatgtaggtataaatttaaaagaatcagtgagaaatgtaaataacagataataatgtactcgctaaacaaataatcatgttctgttcttcattataagttcctgataaatcttctgttatctgataagttattgagctctgaattagaaaatacctcagaccagagactgtatgtctttgcctcaataagcctaattcactttcagctacagaagagggcctctcattctcaaccaaacttccattacgcaagaaccaacctcttagtaatgactgagaaaaaaaaagagtagcattgaatcatcagcaaaaatggaaaagtgttaacacctcaaactaaataatgaattcaatatttgagcacaactcaaccacaccattatgatatcaaatatgattgtagttacagttacaatattatatataattatgatctacttgttcttatagaaataaatttctagcatggcaacagacctgaatgcggttgcggtgaggaaaatttgttacagctctgtggtccaacaatacttgaagctccattttcctctccctctcagccttctttaccatgtcaagaagagcctgcctaccacacaatttacgtattcccctccgaacttgttgatgtcggccttcattctggttaacaaccaacccatcacggacttgttctatctgagtaccagattcagcaggttgattttctctgctgccagcacgagtacctctcaactgactgttcgtttgtacccactcccttataactctcaccctttcctgttcattttcaccaagccactgggcccttggactgttactgatctgagaaacatttgatacacattccccagcaccactattcatccatcctcggaaaacttgtctcaccctaaccctttcaacctctccaaaatcagaagaatgctcactgttataattactcaaaacctcatgatcattctcacccaaactggcaacctctgagtcaccaatacgatcgcttccatggctttcagaactatctgttctcgaaagatctgcaataaatccatcacccctttgttggaacaatctatccctgaacctctcctgggctcgactcaccacatgctcatcctcaagctctctccacatttgtaaaattgaggatgcccgggtgcttaccctcccctcttcatcacttatttgacttggtgctcgagtctgagagtccctaaggaaagacgaatcaagcacagaaacattgtgtagaccagcaatagccatattcaaatcccaaacttataaattaagtctttcaacccatgagtataaaatgcataaaaaggcgcatttatctactggaataacaatttgatgattccttatcaaaaaaatcagatcatcaatcataagtaatcaacattagctttgctcataatcatcatctctatcaccataaccaccatcaaaaccaatcagagcataaccatacagacacaaaaaaatgatattgtcactgctttcagcatgaagtaacaagtacaccaaaaagtgaccaatcacaaattgattactttgaaaagctttctgcattaaaaataaaaaacaacaaaacaaaataaaaaatggtcagttactcaatcttttcctccatttccaaattaacaagtccataaacatatataatataaaaatacacaaacatcccaatacaatacctgacaaaagcttaaaattcgattttgtcaataccctaaatcagtttagactcctcaaccactcagtctggttccctaaaaacataccaaacaataagaagaagaaatcaatagcagatttccagcacacgaaatctcaaaaacaaaaagctccaacaaacagagccaaacacatgattttgaaatagtcaacagaatcaacatttccaaatcaaacaacatccgaaataggatgttcacaagtccatccttcaccattttccgaacaccttttcccaaaaaaccaaacactaaatccgcattgtaaccaaaataataaaaaaaaatatataaatatgaacaaaaatccagaaaaaaaaaaaagagcaaagagagaacacaaaattcagagaaaacgtaaaaacaaggttaataaatatgagaagattgaaactcaccagatttgaaagtaaaggaaacgaaaccctaggtagctctggaagaaagtaacagaaagagagagaaagagagcgagagacttatgaagagagagaaagaataagaattgaattgaattgatttgaagtttcagaatgaagagagagaaagtgtagtagtgagagggaagagccagaattttacgaaacaataataataataatgagtgataaaacgtcatcgttttggagttggaacccatacaaattttacgtaattttaacgtcagaggaaaaaaatttggcaagtggacctaccacttattgccatgtgtcacacgtcttttttggcctttttggcaaatttcacgaaacctctccccagtcccgctctctttaataataattttaatttttaagattttttttttttttttttacaatgaactttaagaaatctttattgaaatacactatttaccaattatttttatttattttagtatttaaaatatttttttaatagttatgtgtgttataataattttaaatattctataaaattataagaaatttttttaaaaaaattagaacgctgaaaacaaaattcaaacaaaatgtgttgcacgcgtgactattttattttacacccgtgtaaaataaacggtttgaatattgtttttcatattataaattattttaaatttgttaaattttataagatatgttaaataatcataacaaacacgaatataaaaaaaaaaaaatagattaagaaatttttttagatgccgaaacaagtagaaggtgcatcagtgtattttttttaaggggacacatagtagaagcatctatttttatttattattattagaaaactcttagatgtacccttgttaagatttttttgtaatattttgaaaattttaccttaaaaatagtgtttaaaaaatttattatacacgtaactttttattttatacgtatgaaataaactatttgatcattactcaataaattatgaattattccaaaggatactagcatcctaacaaaatatatacgtagattttagttacaatatatatatataacaaaagatatatttatttagatcaagataaattttgattccccagtaaactcattgtatgggttacaatgatctaaaattatttattatccacgtggaggaaatagacaataatttctcagaaaagccaaacggcgccgtttttaatggcatttttgtgtttggctgttgggtaaagtaagctacgacgtcgttttgggtttgtaagtttgtttgtttgtaaatggcggagtgaatcgcggtaaaatcacacgtgtaaatttgtcaattggtcagaaatataataattatgcaattaagtggggtaataataattaatattatgaaatgggtcaatgggtttaatattagaataattgactttatttttatttatttttttgttaaatttgttatattttattttaatatcaattgttacgtatgcaatgagttttattggtataaagtcacaatttaatggaataagatggtaagtttaacttatataagttacgtatatacatgtggccaactatgtataattgtagtataaaaatcattatcaaaaaattagtgtaattacttgaattataagcacataagaaattgacacttaaagaaaatagaacatgtatatttattatattataataaataataaatatgatgtaactactaacaactattctgtcacaataatattagacatttaaaattggagaggtcagtattgaacaaggtgggacttggttcatttaatttaaataaataaatatatataatatttatttatttatttatctcctctttatattaaaagaaaaaaatatttattataaaattccccctaattttatttaagaaactttatttgaaatgagtggttttgaagttagataaaattaattgaattaaataataactaatgtggggatgaaattaaatttttaaaattaataaaattaggtttgatagatattcaatgtagaaaggtgacatgcatctcaaaaaggaatgcatatatattttttaactaatatatattataaaaataataattaagccaacttttggtttggttaaatttagctttaatgaaatctaagaatggattggaaaatggaatatatatatatatatataaattaagaataatataagagatgaaatgaagtgagttgtatatataattagtcaattaataagctttttaagaaagtgattatgatttattatttgcatattataacaaaaagatgaacttgtaataattattagtacattaatctaatgatcaatcaactttgtttacttactttttaataatacttaaaggttagattgggatgtccccttaatactaaagcaactagacaacattgtttttctcaaaaaaataaaataaaataaataaataattcttcttttacttcttctttttcaactaccactatctatccatctatttatatttatatcttctataaataaataaatagaaaaattaattggtaccacaacatctatatatatatatactacatatatttatatatatcttttatttttattttggaagttttatagacaatattattacttatgtttgaataaagttacacaattatgatcacgagatgaatagtgagcttatattaaacacttttgatctcctttaaaaaatatatatattaatttttattttatttattttttgatcaaattcattcatgattcatgaatcacacttgaatagtaagaacttaaatttagaatcatggatccacattgtgaatataatatgtattcaagcaatttaattgatacttaaattaatgaatttttttccattgaaaagtttatagtatctatgatacaatccaatataaaaaaaaattgtctatgataataatatataagtttatcaattgacaaaatatttaatattttattttaatatacaaattaaatgtgcctccccaaaagtaacaaaaaaacgtaagattaaccgtgaagtgtaaagataaataaaaacactacaagtattaaccatgtgaagaaaaaaaattgtcatgccaaaattgataaaagtcaaaattacatcattgtgttggattagaggtggtacacgatcattttgacttgttaagaattatgggatttcatctcaaaactaattagtgatgagtagagtagctcaagttcttatatatctctcaatactaccctaccatttatactatgtgagacaatgttcacaatattttccttcaagatagtagttattttttgctcaccaatcttaactgtatcaaaatggacatgatcactatctgtatagctgtgaatcagatagaatcgtacatgcgccgaggagatatggatctaacactaaattaagaatcataaggttgcagcattctgatagtaattaaattttccttgatgtatggttcttgactctgttataggcgaattgtctttaaatgaattattcattcctttcattaaaaaaaaaagtttgataaaatttgttagtatatattggaaattctttgatattattatctattttattttattttaaaatataattctaaatctaatgattttaacttataaaagtcaactatacatgatatatacacacctatactctatttattttttctagaagaacaatatacaaattaaaaaacactattttgcaataacatgacaagatcatatataagagattaatcaattgaataataattaaataagttgaccttctaacattccaaaactaattaattaaatcattataacatttaatcatatcatgtgtatatacatggttatacttatacccacgaccttagaagttacaaggttattaatacactcaacaacatgaattcatcaaacaattaatcatatattagtatgccttttttcaaatctaattaataattttgattttgtcatcaaatagtctttaaaatgtcaaaatgtttgaattttaactttgacttttaaataaatatgtagttgttacttgttagttggattactacatgtaattaagtgtggcttgaaaaaaaattgatcaagagcaaataaatatagagaatattaattaaggacaaagatgagtattagaaattttattacaataaaaatagaaaagaattaatatattacaataatattgtaatataaaagcctatctactcgagatacaaataagtaatacaaatacaaaatataactcactttattaaaagtctactccaatagtgtgataaattataatgcaaaaatctcacatttaaatcaaaagtaatccaaattttgcatcacaatatagcattatgcaaaatttgcatcacaataaatgttatgcttttatatatttatcattatgtcatttttaatatttaattattaaattttagctaacatactcctttgcattaaatgactgacattattcttattattattttattattaaattttacatttaactttgcattattattattatatatttttttattaaattattaagtaagcattaaataacatattaaattttgcatcaaaatttacaattatgtattggagtataatagcaaaaattaatgtaaaaatatcacaaaattactttttgtacaaaatataacttaacttttatatctttaatacaatgagcagaaattaaataaatgttacaacaatatatactacaatatatacataaaaggtgaaagaataatatgtatatatagaaacactcacgtactcacaaccagaagcctaaattctcactaaagacctcagtgttagcaacattacaaccaaacaaaagataagaggtatgagctaacttatatgccactttattaactgatcgtttaacaaaaacaatctctctacattggagtataattttaacagacttatagtcaagaataacagttcaaaaggataaaatcccaataaaggattactcaaagtatgaacaactttcagcctgtgttattattataataaatttatataaatatgtatatgattataaaagcaataattatggacataattagatattaatggtgggaattaatatagaagagggagttgactgagcgagtctcactcatatttgttttgccaaacaactcatgagtgacattcttttatattatattaataattaataataattaattaagagaaatccgatattaattgagtttataatatatgcaaataaaaataaaagcccaattataccatatattattttgatgtgtatccaaacaaaaccagacaatctagggtcctccattgttggaggttgaagatcacatacatgctggcttgattggattatatatatgtcatttcatgtaaaattattattatttcaatcaaaaacaacaacaacaaaataaatgtataaatatataaatatttatagaatgaaaatgaaaaaaacatcacatggtggagttggacaaaaagtgcatataacattcatataagttttccgtacacatatatatttatatttatatgaaaagaaaaacaaaaaaaaaaaaagagaaaagaaaagaaaaagaaaaaaaccatatgccaacattttgttcttcttttagggctttaacttggttgttttttttttcttcatgaaatttaagctttctcttcttttatgtgacattgttacaaacaagttgcctatagatgggtcctaatatgcttaaatcatatcgatcattataattattaatttccttctatatatatattgctaaagtcgttttctcaatttcaaatcaaaccctataattaattataactttacacatatatattattttttctttcttatatatatgtacatattttttttagagtacgtatagtactactacgtacacttgtcctatagctagaaaatcatgcatgcatgcatgacaagctactagctatatatatatctaaataatgtttggaaaatatatatacaaagccatataattaatctcattattaagttaaaattaaatatttgaatattgaatagttttttgttgaatattgaatagttattctgatcacgcaagacatcaatagtatttttattgaatagttgaggaatttcttgtcctttattgatgaatttggtgttgctgtaatacttttgtgcatgataataagttgatttctgatgatatagttagtacttaggctcatacttttgagctgaaattcccgaagtttaatttatttgtgatgttgttatttgcatggaaaggaggcggtttggtatggggaggttgtggcggttttaat

SEQ ID NO: 15769 - DNA, 6857 bp, Cannabis sativa
aatttaataaaatttaataaaattcttaattattaatattattttattttttaaaataaatatattattaaatattattataatatgtataaagttgtaattatatacaagttgtcctataataagagtatatgtcttacaataataaccataagatctaaaatcattggtaaaaaaagtttcctaccggtagagaacttttgctaggtcctaccatagtattaccctataaatatatattgtggagctaagtaaaaattaagtttagtttccaagtaaagaaattggccacacaatactcgtcttcattttgtcaaaaagctttatttatcgatttaaatacttttcacatgtggtaaaagttagaagtgtagacaattacacaaacaacctctttgtaaaatatttatcccaaaattattaatttaccaataagatttgtttttcctttcattcaaagtatctaatcttttataaaattagaagagaaagatcaaagtaatttttttttgttttaacatttagtgattgtatagtatttttttgtaacaataacttaacccatgacttggaacaaatttcattaatttgattttgaccaatatagtatacttaatctgtgtatagctcaatataatggttatagtggaattcctaaaaaaaaaagtagctatagaccatctttcctatagtggaataaaataatatttactaaattactattgccacaattactattaataacattatttaatattatttgcgccaacaaccaataaaactagtcatttactagtttgcaaacctcattatttctgtaagtttatattgatagtttttaatttgatttttgattttcaaatagataaaaatgttaaaattgtgctattaattttcaaaaatataaaagataatgatacagctatagagtgtttaattagagatacataataagctttcttcacaagatgtagattaactttcacatagtacaatatagatgtttaggttattttttacggtttagcggtagaggatctttactttgttaataaaaatagatctttgagtaggattaacataaaaaaataaataagaaaaaacagttagagatgatcttcttatcaatttgaattagtactctgaaatgattcatcaatttattaaattaaacaaataataataaagtagtagtagcatacatatccatagtatcctaactggaatatatatataaatttttttcaaaaaaaaaaaactatagaaagttgagttgatgtgaggagaaaaaaaaaagtgaattagaatatacatgaacatttgtttttttaatttaaaagtagaaaaatgaaatggtttagaagggcaggagtggagatttttgattggggaatggtaagaattaggaaatggagcttgggagacaaagaattgggtgtggaattttgtaggactttatgaattggtcatctcttgtctctcctttttcccactcacccccccaccaaaagtagggaaaaggatatgtattgccatttatttatttattaatttggagaggtttcatttttctcactcacatatttatatatatttatataatatattccacaaaatctaagactatttagactaaacgtgcaagcttttgtctgttagtttagtttaatttgtatataagtggatgaaatattttattccactaaacctaatttttcattagagaatggttgttttgaataaagccaaatgcatattataagactttaagttattgtcttgtcctgcagcccaccttttttctttcctatagtccttcacttgttcctttgaattttgcaaccccttgtctatttagtgtctaataattaatgtcttctctcttttgatcacaacttctttttgtttgattccactaaactatacccttaattggcattgtatatttatattgcaattcccccaaaaaaaaagagagagataatgaaactaaaatgtctatattttgatggccaaaaatatccatattttgatatagtgggtgcatatgttggaatttgaccattccatttattttctactaaatagttaatgttctacataggaggattgagcaattatattgtttataattattattaagtattagtagcatcactacaacttgatattaataaattatattaataaaaatataacatatttaagtaaaaaaattagacacttagataacttttaattttttttattaatatttaacgatgagaacaaatttaaatattaaaattgtaattttattatctatttaaaaattacacgatttaatagtatcatgtataggatcgtcactcactctcaaaattaatgaataaatatattttgtaaatactttatttatatatagttatttaatgaaaatatcaattattgaaatatatacattccatttttcttaaaaaaaaaaaaaaaatcatataggcaatcaataaaatagtttaaaagtggcataagacattaatttatggtgcttagttctccttacaaagatttcgagttgaaatcttccttaaaaataattttagaattttgctattttattactttgtttcttttaatatttcttattattcttatgaacccaaaaaagaaatttaggcaagtgctaactttgttgtagtttgtgtataataataaataagttattatttaaatcattattactgtgaattgaacctttcgaaatttgggtagtaattagctaaaacgataacataaaataatgtttaggttttgtgttaatattacgtacatgtggtaagttaataaagacaacttgcgattacactaaaactgtataaaaatggtctactctaattgtttgtcacaatcacattgttttataatgttattacacttttgaaatcaaacaaaaagtcaactaaaataacaacccaaaaagtcaaaatttgacacttaggctacttgagactaaatatatatgggattgcgtaagtgaagaatttgtgtgctctaataccaaatttaacattaagagagaccttaattgtcttttgagatatatgcatgggatgatgggtaatttattaacttagtcacttttagactattagattattcaaagttcaaactacacatagttgagtctagctacttcactatataaatatatatatatataaatatttatataaatatatataaaaacatctcatttcatataattcaattttcaaagggtaaacatttcatgcatttttaacattatatttacatcttacctattatataaatgtctatttaactttaatttattatatttttaaccaaatattctcaaataaaaaaaattaactttaacagattttttaattactaagtgtatgtttgttattataattaattaaaaaactatttttttaaaaaaaaaaaaaaattattttttgaaaacaattaagcttgtttgtcattgtttttttaaaaacagttttcagaaaacaaaattacaaaaaacaaaattttgaaaacaacaaaatctgttttaaaaaccaattcacttttgattaatattgtttttagaaaatactaaccaaacgcaacttataatttgaaaaacttcaaaaactttttttttttctcatttctaaaaatatttttttaaaaacaaaaaataaaatacaatacaaaatatgctctaatagttgcatcttatcctctcatgaagaggcaactatcactgcaatgcacccatttacattaaacaaaaattgttattatcaaaacaacaaagttaatttcatagcaagttattcttcatgataattatcatcataacaacacaatatataacaatgtgaaaataaaaattaaattcatttagtaagaatttgaattttaaaatgaaaataagaaattatattcatttagtaagaatttgaactttaaaatgttcacacacctagatatactttaatttaatatttctaaaattatgattacaaaaaagaatagaaaaaacaaatgacaatctcatctccaatttgaagtattataatttgaagcgttcaaagaaaaaaaataaaatttagtttattttatttgtatcatgcttacattatataattaaaaatagactctatagggaaaaaaaatataaattgaagggaagaaaaaaccaaaatcatactgttgaaaaaattgtatgtataaatagacaaaaatagcaaaaaagaaagactcgttacactctattaactcatatacatgtatatatataaaccaagactgaagaaaaaaataggcaacagaaagagataggcatctgcgattaattacttattagcagcaccgtgaagaatttcatgaagagtactaagaaaccataataatagtgaaacacacaaatacacaatgtataaaagtttaaaatatcttttgagttaggactttctaattgcagcattttgggtttgggttaaaattttctgaacacttttttttttcacaatttttctaaacaatctttttttttatttaagcgtttatatattacatcaacataacctggaactcgaacccaggacctccaatacacacgcaccccctatagcctcaagtggtttttctaaacaatcttaaacatgatctaaaaagacattcaaaaagaaaaaaaaaaatattgtctcgaaaaaatatttagtaaaagacagaaaatgcatgtttttttatttctaaaaataaataatttcatggtattttttatttatttatttttaataataattttttgtttacatttttataatgatagttttgaaactaaattctcccactacttccactaggaaaaattgtgaggaaaatattataatttttttattttttaatacttaaatatattttttttttggtgtgctaaaaatacaaatttgacgtaattcaactaaaaaatgtaatctggtttttttaataaatttgccatagtatatatgaatggatgcatattttatgtgaatgattaattattttgtgggaggatgtaaatgttatattttaattaaaattaatctttttttgttaaaaaagtacataaaaatttgtattattaagacacaataaaaaatattaataaatagacatttatataataagttggagatatataagagttatccataatcaagaagttgatagacaagaattgtaaactaacttctctactcttaatcgttattgttaaaagaacataactttaatgaattataattgccccattatgtaacgtgatgacaaatattcaaagaaatgactttagtttgagaaatttacgcttagtgacaaaattttgaaataaatgtcacaattaacactatttatttaattatagcatataccgttagatttttttaaatttgtttggacacgtgtatacgtacccaatttattttgccattacatgtattattttgtttttctgatcactctttctcttcttatattattagattgatacactagttttttctttctttttttttttttttcttgaatatctatctacctctttccttttattcttaatttttatctaactcatattatacttgcaatattttcttttccttataataattccttttcaaatgatgggacatttatcatgtatatttttttttttttatcttttaatagttttaaatatcttttatattagaaaaatagttttgaaaatattttccaactacattggtaatggtttggtcatatgagttgtatcattataatgtactcttcaatgaagtcattttaatatgtgatagcatattttttttagcataaggatataatcaaaataaaaaatggccttttagtttcttttgatttaattaaccaaaacaaaaaaattaagtttaaacaaaataaaatataccaatcaattttattaattattagaaaaattattttgtcatttaatatttgaaagttactaaaatgtatgctttgagacaatattgataaatttctaaaatatacttagttaacaatcaaactaaaacaaaatttaatataacaataaattttattggttaataaaagttaagttactagaatcttattttttatataagagaagcatataatatattaaaatttaatacaataaccaagattgtaaattatttcataatttttattattttatatttaaaagttaccaaataatatatttagaacaagtctgcttatatcttttttaaaaaaacttataaagttaccaaatagtattttaaatattacagaattagttacattataaaaattattatacagtatttaataactttactaataagagatatctgattaatacttattatttatcgtatcttattaaatttttgaatagaaaggcaagaaaatgttactaaaaaaataatgtaaaagaaacaataagatagcatattgttacttaaataaattttttataatgtaattaatctttatgatgtttaagatattatttagcttgttaaaaaaaatattatttagtttctttaaataactaaaaattatatgaaataatataattgtaaagtaacacttattaaaaaaaaatagtgtatcttagtagcttattttcttatagcatatagtatataaaagaaactaaaaagtttaatgaaataatatatagagatattcatatttataaagggaagaaatataagacattaataaaacaattggtttgtatattatcttgtcttttgtgttttgttaaaaaaaaaaaacaattagttggctaggctgtagagaaagagaaatgaaaaaaaaaaaaa

SEQ ID NO: 15770 - DNA, 3599 bp, Cannabis sativa
  modified_base (970)..(972): a, c, t, g, unknown or other
  modified_base (3552)..(3572): a, c, t, g, unknown or other
tcaattacttccaattacacagttacaatgtaattacatggtcagacaaatatgccaaaatgtgtaattacctctaattgcacacaaatccaattacattgtggctttccaaacccaatctaattgtaatgagtcttgcattaggtgtgggtttaaacctgaatcaatattcccattagcttcttttcatgtgttatgtttctttatgaatgagttccaagagagttcaaatattatttatttgtaaggaataatatttgttaatgggataaattttccctctttcgtgagtaggatttcgctagaagagatctcacggtattaaaaacaggacctcgcaatattaaggaaaaccaacattatcaagattttataaaatttaagacatcatgcaaaatttgaaaaaattcgaaaaaatttaacacgctaaaaataaaatttaaaatacatacatacatgacatacatgactattaaaaaatatagactaaattttttttctcaatatcaaaacagataaaaaatacaccggtgcatttttaaaagcatgcattgtaaaatgataccctctaataattattcaaacaaaagaaataagttaaaatttttatttatttttatagatatatattttatgatgaacttattttatacttttaaccataaaaaaaaatgtggtcataaaatatagcctagtaatttcacacattttcacaaagaggatgtcaagttccaatctttccttcctcaatattaaaaaaaaactataaacaaaacaaaatttgtttctaatttaagttacaaaaaatatatacattataaaaaatcttacttttagtcacaataaaatctcgtgactaaaaataaaagagttgtagctaattaattataaatcaatatttttatgttgtgactaaaaaattcatgactaaatgtattcgtcacaaaaattacaatttattgtgactaannntatttttagtcacaatacttgttgtgactaaaaataaattagtagcgacaacttatatctaattactatactttagtcacaagtaattttttggtgtgactaaaagtcacatttaggcacaaaaaatttaccttatgactaaaaaattgtcactaaaaataactgttttttgtagtgatatttttaattttacaaaaaaaaaatataaattaatattagaaattcattcaaagtgtaacagaacagaatgactctacactcacatacacccgctaaatgtgtgcattgcatcatcataacattaaacaacattcattcattcattcaactcacatttttcatttttcaattttttttttttttttttttaagttttagggtcaaatggttgatgcccagatagagatttgaagcaattttcactccattaaggtctgtactcgtttattcttttcatttttatttttatttatttaattctcttataggcaatttgtgttttgattttcttaatgggtatttgaatgcttagtagaataatagtatatttcatttcaaattggatgaaatgatgatcattctaatatgcatattaaattttattcattcctattcaaatggatctttggataagtttttgtgagaaatgaagaataggaatagcaatagaattagaattgaaatttaatacttaccaaaatagttgaaaaattatttcattgaaatgatattctaatactttaaaatgcaaccaaacaaaagaatggaatgaaattaatcgatttccattccattctattacctacaaccaaacacagccttattgttaaagattacatcttttgaggcttgtcatttttttgtgtggattaggaatcttattaatctacttttattagtgaaaaaagttgttatatgtaaatcattagagaaaatatattgttaacaaagaatttctaatgttgcatcaactatgtttcgggtaatcaattcttgaacgaataattctgtcgttgcagtatgttagaaccccgaaagagttcgaaaacaatggctgaagttgataaattctgcaatgcacttggtgggaagaaaccaattcatagtattttgattgcaaacaatggtatggcagctgtgaaatttattcgtagtgtgaggacatgggcgtatgaaacgtttggctcggaaaaggcaatcaagttggttgccatggctacaccagaggacatgagaatcaatgctgaacatattagaattgctgatcagtttgtggaagttcctggtggaactaacaataataactatgccaatgtacaactcattgtagaggtttgtaagctctaccaaccaaccttcattgatttcttaaactcgaaaagaaaattttcattggtttaatgtttacacagatggcagagataaaacatgtagatgcagtttggccgggttggggtcatgcctccgagaatcctgacttaccagatgctctggatgcgaaagggattatctttctcgggccatctgcaacatctattgcagcattaggtgataagattggttcatcattaattgctcaagcagtagaagtgcctactcttccatggagtggttctcatgtaaaattccatcaaaacagtaatttggttacaattcctgatgaagtatatcgagaagcgtgtgtttctacaaccgaagaagctgttgcaagttgtcaagttgttggttaccctgcaatgatcaaagcatcatggggtggtggcggtaaaggcataagaaaggtttgttgtttccatttcaatatgcaattattcgaaaacttgttgctttggctgaaattgtttacaaaatttgtgtttaggttcacaatgatgatgaagtcagggcattgtttaagcaagttcagggagaagttcccggctcgccaatattcataatgaaggttgcatctcaggttagaaaaacaatccttactttttcgatatgaaatgattataataacaactgcagcagttttgatctgtgttaagcaaaatctacaatccacttcacaatttgagaatagagtcgacatctagaagtccagttattgtgtgatcaatatggaaatgttgcagcattgcatagccgtgattgtagctttcaacgacgacatcaaaaggtaagctcttatctcaaatgttaaaaggcatttaggcatttacgccccctctttcgccttaacatgttcatctttgttatgtagattattgaggaaggtccaataacagtagctcctatagagacagtgaagaaattggagcaggcggctcgaaggttggctaaatctgttaactatgttggagtagctactgttgagtatctgtatagtatgagtaccggagagtactatttccttgagctcaaccctcgtttacaggtatgcttgtttgagtgttagtaaggattttgtttgagtataatttgtgtattagtctcattagtataattgattatgattaaggaaacagttatggagttaattggtaggcgtttggttgggaggaatgaaaatgtaggaatgggaatgggaataggaannnnnnnnnnnnnnnnnnnnntttaaaatgcataaaaaaaaaattgat

SEQ ID NO: 15771 - DNA, 3252 bp, Cannabis sativa
  modified_base (74)..(80): a, c, t, g, unknown or other
agtgggagggtttcaaggaacccatcttgttatgacttggaagacactggtgataaaaattcattgttagtttnnnnnnntaatggatagtcagaataaggaacaaagaagcaaagccaaaacaactatggttaaaaccattcatatggagtaaccaaaaattttctattacaaggactagaaggaaaattttgataataagtctattcaatttacttaacaaaacttttcgatcctaatatcaaaggtttgagattatcaaaacctgtggcaatcttccaccacaccacgtaagcaatttcttccatcttttgattcatcgaagcatatgtattcaatttgaaaaaccttctgagcttgctgcttattatgagatagcatttgattcttcagcaaataatccttttgagccaacctctattctatagtgttagttgcatgcttatatcctataccaaacaatttattactcttacagccccaaatagctcataaagtacccagaaacatacctaaatcatctttgctaagaaattacttaaaggcactaaagagaaattctctcacatcacaaagcttattagtattatagaactgtttgtaaggtgaaactctcaaaatgtgttcagctttggaacaatataggtgtgttacagtttcattagaattactcaaagactaagaataaattctctagagtaaaggtttgaagttgtaggcaaagtgtaaaagaatgttctcaaaatattttggggaggatattcaaagtccatagtgtagtccattatttcctaataaaattttagagtagcaatatcagcaaaatgataagctgttctaagagtgaaacatcctgagggatgaagatttcaaatgagggaatcctccttatcctcactgccaatatgaaccttaaggatttgagatataatataatcattgtttactaatactctagaatcctaaatcatttatgaattagtcaactttgtcagaaggtggaatacaattatccttgcaagaaatgtggctagtattagggatccaataatcattcaaagtttggatagaatgtgcattactaactttgtaaataagacccttaagtagattctaccccagcacaaatttggccaagtaaaggaaagagaataacttttcgaagcatccaaaaaggagttgtatttaaaataatctagctttcaacacaaaagtaagtaaggaattaaggattggtaaacacctttctggtcgttttaacaagcataacttagttaaaatagataagaaaactaaacccaaggcgctcaacaaatttagaattgcaaaaataggaccaactttttccaataaatttcagagttattctccatagatgctaacaaaaatttttccatcattttttcaattttacgaaaagtaaaaataggaagtctaaaacaggacacggcatatgaaggaatgatctgaattaccgctttaagaagaacctcattatgagccctagaaaaaagcttttggttgcactcattgatgtgagagctaacattatcaacaaaagaaaaaaataaaactaagcttcttagaacactcaaaacactgaggaacaccaagatatttactaacaaaaggcttacagtatctaaacctaaagtactacagaaatagcttgaaatcaaggaggaagtattaggacaaaataacatagaggattttgctaaattaaccaattaactagtagcaaaattatataagcgaagaataaagcaagacaagactgttgggtagcaatagtaaaatggaagctatcatcagcaaaaggaagataagaaatagaaggatcattacgagcaatagagacacctttaagttgagaagcttgctcctgaagcttaatgttagcagaaagacgctcagaacggagcaataaagtataaaaagacaaatggtcaccctaccttatacttctagaaggaactatagactaaataatatgaccattaatgaaattttacatcacatatgcctaataattaaaaaagctaacctgtttggatttattacaccttgctgccactttttttactgttggaaattatcactactttgtatgcttgttgtggaagatttagaactgcaggaacagttggctacatgctggtttctcttcttctcctgctcaggtactccgtgaggtaacagactacatcgaccaataccaaagctgcaacaaaaaagtttccactattagagcctcaagatgtttcgtcgatgtccaatggaagtgcaccatctgctcccacttacaacctacaactttcagtggatgccgctcaagatacacaactcaacaaaatggattttggcatgtccattcaaacaaacaaaggggaggtactttcaaatttcggaatgccatggcgtggaattaacacatctttgttaatggaagcacaagccttacacttttctctttcttggtgtcatgctcattccttttatccggatagtattgtttcggattgcaaggttttagtggattatatttgtaataatgatactcacaatctgcatctcaatacttttgttactgaaattaatagctcgctatcttcttttcgtaaagcttttattagctatatccaaagaggggcaaatgaagctgcccattgcttagataggaaagcttcaggcctagatcaggaagctttgtggaagagttgctctttacaattgtaacttgtatcatgtactattatgctcttcttttaatggatacagactttttctcaaaaataaaaaaaaaattaaaaaggtgacaaaagaacaaatcacatcaaatatagatttttttttcttataaagttccaatttattttatgaaattttttatgatgtattttttaatttttacatttttattgtattttttttccctcatatttataatgtttagttttttataccatttgtgatattttttcttgttctagcaactagtttcttaatatttataagtgtgtaataataattgtttatatatttcttattgttttgtaacataggtgtatacttagtacacacaattactagattcaaggatgttctgattaagagcttaagaaaaactagaactgctaacttatgtttggaagtttgatagctagtcttaagtgattaggggaggaccatcctatggtcattaagataagaaagtgtttgtttcaataaatactatttttctaagaaaat

SEQ ID NO: 15772 - DNA, 13023 bp, Cannabis sativa
tgccccttaaactttgatatatatatactagatcataccccttgaactttcatccatgttagaattttttcactaaaattagacaaaagtctttaaattttgctaattagtgattcttttttttttttgtgtgtgcattttgtattctgccactcaacccaattttgataatttgcttgtaaaatttggggtagtgtcatgaatgtcataaaaagagtgatctaatctgcaacttaactcaaattttattcagtaaatttgtttgttttattttcggtagcaactatttcaacaatagttattaatgaaataagatgataaatcttattaaattttgtaaaaggaaaagaaatatataattttgtattcattttttgttttgatgaaagagattatatatgtaatcattgtttgagatggattatattcacatatttatataatagaataggggattcaataatatgtttctctcaattacaattataccaaggttagttagaaaatctaaagtaaccgttgtatagctaatcatgggaaaaatgattggacaacaaaatgcaagtggtgataatcacactgttttccactaattaattattaggaatttttaatatatatatatagaataattattaggagttaagtggcaaaaatccactactagcgcctaggttatctcttataattattactttactatacatctcctaatatatttaatacgaacacattttaatcaattcttttaagattaaagaattaatatattcacactagtaactttcactactatagttggacgatgttagatctagccatataaaaagtagaagagaatcttgatgatgatggtgactatgatgaagccaccaatttttgtttaagacaattataatctttgttttagtatgtttttattttaattattgtatttaataaatagttagaataatttaaaattatatcataaatattgtatagcttttaattttacttaatttgttcatttgaatttttaaacagagtttaaaattaaattaaacattaaacttaaaaaaattataaataaatattttccttatgttatggacaagaaatgtttatcatttattaaatcataatacttttgttggcgcatttttttgcaacgataggataactttcaccgacactatttttgagtctaaaaaaaatacttttttcagcgcatgcattatatcgttggtgaaggcatacgtacccattcctagtgtagaaacgggctggcaaaagtctctttcacaagctctgcttccatttttgttctgtactcgatccttatctttttcagtcacttcatttgtcaagaattataactaattctgtcaacgccttctatttatcataagtaaaaacactttctcgaggcactgatgcaaatatgactttatgttagtgtaaaaataggtcgacaaaagtctaatttcttgtagtgtctattaaatttctaattatatctaagccttttttatgagaatattatatattgagttaatgtatatcagttattccaaattctatcgaaagaatgatgatctcggcaaatgtcacataatactacttgcatggcttgagctaaaatagatttctactgcaattgtttaatcatattttccagatgagcattaaggacaataatatcgttttactcatgaattcatatccatcctactcttttactagtgttacatccaatgggccattgatagttattcatagattttgagagaaaagaatagagagtcatgatcacatcaaacctcacaaacccattgatttttagagagagcactaggcgcaagaataggcagggaaataagttgtgtgagatcattttgaaaatagtgtttattcaatctaatttgtactattttgcttatataagttatatatatatatatacattcaatttatacaaagtgcatctttcatattttgaatccaactcaacaagcaaaatatagctcaaatctaatcaacaataaagtggatttcaattgattgttttgaattagttattcttttaatattaaattattatttgatgttaaataaaatatatgcttttttcacatctcagaattgtttatatatgttaaaaacaaaatattctttttaattatctaacgataggtgattgagaaggaggggacgatggacttgagaggagcggctaccttatgtttattttgagttcaaagaaagttttagtttcaggtggaactccatcctagagtgcggctagctatcctgagaactagacctggagtggacgtgataattattcgggaactcctatcgagactcgactatcattccacaagactccttttaggactgacaaccatgagtgaacaactttccaaaaataacgtttgctgacacctttttcatttagaggaactataccacaatattgtatattttttttttaattttttattatattttagtaatatatcaaaatataaatgttgacttatgtatttatatatttaacttcatgtgtttatctttttttttattaaaaaaaaataattaaaaataatcaacatgtaaaaattgtaaatattttgtttatttttattatataacataaatataatagtgtaatttttaaatatttataaaattatatagaattatgttattatattttttttttatatattgtataatatagtaaatttgctatataaaagtgaaaattgccaaaacaaaatttctatgttttttttttttgggcattaattacaggaagaagactttgattttcgatcaacacatatatagcacaatacccactattttcttgctactaaaaattaagattgagtggagttctgtttggttggtggtgttgggaaactacaccatcttccatgagtgcagatacatgaacatatgttacataaacacagcaaattcttgaaactgatgcttaacctaaagcgaaagtataaaatcagatttacaatacggtttcgttgtagatctcctgtcaattcaaaggttgagcatatatttctgcatcaactcaaataggagtgttgtatttttcgtataattcggccgcctgcagcattgtattagaatttcttctagtagattattatgcctttgttattattaaatcaaaagcatgacacgagccatcttaattatgccatagaaacatatagaactaattgaaatagagcattattctactgcttctatttaaagagtgcgttgattctcccagttttcaaccaaactttagcagttgaaatgattagacaagattccgactgcccttgaagcctcgattagtcaaaataaaacaatataatacacttgagacacacatttcgtaaaaaggaaaatgatcttttgacaaaataagaaaagagcacaaataccagtatcctattcttaaagcagtgagttaaaatattttggtgccaaaggcaatcaaagatttgaatagaggcaacaacttaacttattcattccattagtatctgtctagtttagattaatggtatatctctacgaatccacatttttcaaatcttctgttttaagaataaccgaaagattaggccatcaaattttatttatttttacttcttaaacaatactttaataaatgtatataatagaatctagttcccctcaaagcccacctacaaattcccaactatgttcaatttccaagtgtatcataatgattcactttcagtcgacttcatatctttacatggtcaactaactttttttccaaatgatattgttttctagtagtatagtgcacttgttaaaaccattttgtagtagaactaacacagttcattgattgtactattagtcattatcagtcacgaagaaagtatatagtgcatgccactaactacggttcacacttagaagcctacattcctattactaaagcttttggtcagctaagattgtaattttaagaataaagtaataagttaccggcaatctgagcacattaataagcatctgcaaattagggaatttattatgttacgttagcccctgggaattctccaattaaaactctaggcaaataaattagtttacaaagagtcaaaaaaatttgttttgttcagcacattcgttgtagagtgtacatggagattgaaaccaagaaaaagaaggaacaagatagaagagccagagacatcgtaaccgggcaacgtacgaataagattgtgtgacatacctactgcacccatctgtatgggttgtcagcctttgtcttcttcactatctgcagatacttcacctgtatgagaagttcaacttcttatatgttcttatatgcttacctgcagccgtgaagcattgtacatgggtatggtaaacgtcatgctatatacatgtcatgttgaaataaagcaattaattaccatgcgattcttgggaaaatgtcagttttgcacgtagtgtatgtttggatccaccaacaatctacaaggtaaaacctttgtttctatattcatgaatttaagcaatcctcaaccatgcaactaagcacagtgagaacgattgtagataataactatatgtaaacaacaagaatgcctttttttaaaccccactgaagtctcttatttgcttccttgaaatcagttgtgtttccaactcaaaacttaccctcgaattatttcgaataagcagatgagataataatgaaaaaggcaaaaatatagaatgaagtctcctttcccactgaatccaaaatgcaacctaagaagcttacgaggtgtttggtattgttttctgttttcaattttcaaaattgttttcaaaaatcggaacagaaaagaatttttgtagttttcaaaatacaaaatgtgtgtggctattgctttctaaaaactatttttaaatcttttctattgaaaataataaaatatttcaatataccacagctcgacacaaaccaaaccctaccccaatcccgacaaggactctggatgtcagccttgatctcgatccctaacttggctccagaccctaacttgaccacagactatgaccccagcccgactcgcaacccaactcacaccctgaccccgaccccgacctaaacttggaccctaacttgtccctcgctcagacctgaccctagacctagctcgaaccttggccccgatcctaaacttggactcggacccagacccaagacctgagccccgacccatgaactcgggtatgtggacaaaatgtaaaaaaaaaatgtcagacaaaaaaaaattgatttttagaaaaattgtttaattctcaaaaaattatttttttttaaaaatgaaaacagtttttaagttatgaagccaaacatcatcttaatttctagtgtaattctttcatcgtgttgattgtgaatttagccaactaacgcggagtctgactatgactagattttgctcatgactgtcatgtgaggaatgataataaatgtaaaagaaacaagcatttatagaagtttgaccccttttattaagtaatagcctactgcccttctgttgtatttactcttgagataataccacgcagattacaggctgaaaccttataatttctaactatgactctcttttgtgttacaataatgagaatgtgtgctacagataggaagtatgaagaaaatttacaaaatgatgagaagaagaaagagttgaatgcattagtgcttctaagctcttaagtgcatgtgtagaatgaatgaaaagagagaggtctctttcacgtagggctaagaccctttgtataattttagagtttacaagttattgtacataacgaatagaaaatatccctaggaaatagggaagttacattctggtgaagctttcctattttcgtgggtagtctaagtcgttttaaagttgtaggggcaattgaaagtattttagaaggcccatgaaaaaactaatgcctgtttaggttgtcatatataagttgcgagttggtcggccaaccttatttggaagctgcccgacttgtctttactacacctctagtcgaccaactaatggtccggccagggtctttaaaccttactttcagcttatgttatctctgtcttgagacctcgaggcttggcagtgagggagttgttcggcattatgccggctggttcatggcgattccctccatgtgtctgatggtctcgatgatgtggagatgccacgtcactatggcaaaaattgggataacattttcctctagtccctattcgaacatttgtctgaatatggagtttacactctgtccggtcttgtgatgcttttgtcgtgcatctatgaatggtcacactttggtctcttcaattgattagttattacgttagttgcgattaatgacaattttatgccaatcaatgtgggaaattatatgacgagtgcacactatcccatgtttaaacctttggtcttctttctcccatgcatgcctatattggtgaaattaactccccattaagttttcagggggaaattaattctttagaaactatataagctagtgtctcaccgaaaaagtccaagctaccttcgcgccgttcttcagtcggtaagttttgaaccccccatttttaggtttctgccatggatgagtttctaagcttttgaacttttttattctcatgttatggagtagttttcatccgttgtagtttgttcaatagctttaggatgtacaaggcatggcttgttgataaaaaagagtgaatcttgcactttattttgatactttgaacttcagggtttgaagatcacgaagaacttagatttaattttgaaaaggacaattttgatccgttaggactctttcctggtactttgggtttgactgattatttgaatccgtttggaaaccctgttcgattcttattaaactaattttaagctggttggttgttagcctgtcagttttaggctgctcagttaatgatgttttgtcttaggttgtccgatgaatacccttaggttttgacctgttaacccgcttttttgttcaagtcttttatactctttggttgttcacctccctttgccttttgcatagatgaaaacgcacgactattggtgaggtgacatctggatcgatgaggacttacttagccttttgtatgaagatcaacgcttagtttggacagcaggttcctccttcgtgagctcaccaggcagctcttcaagtgactttgaagtgagtagtggtttccaagaacctaaaatccatcatcacaactattctgaatgaatagatggcaaaacttatggacatttcacttaggaatcgagccgggggtggagacatttccatctcaagttgtggacttacatcgtccagcagggtgtgcttgacatttttcatgttggataggcatcttctatacccagaggttgctgtgaccatccctcggtactctgagcaatatccaatcattgctaggactaagaagacatactgccaggtacctccaatcgatcctcatatagccacttatggcaagaggaagagcccaccatgttgagcaggctgaatagcttgaagccagccaagctaaagagcctatggccggtcagaaagaggattcagaagccgaataggcttagcctacaatgaggcccaagactactcgaaggcatcctaaggattgtgatgtgatctaaggtaaacccttgggttcttacgtcgaggctgaaaggcctctcaatagcaggggtcaagcctcataggttggggttgatcacattaaggacgagaaaaccgtgtcgcggattctttaatatggagaaggggagagatggaaatctcattgatctacactatcggctgccaagcttaatagcattatcaagaggggacttgtcagtcaagtccaatgtatcaggcccgctccaggccatcttccttaccatccttaactgaactggatagcatggtctggtccccacgctgagcaaggggcagttctttctttgcacccatactttaaggatatagctaactttttcaagttgtgtccaactcagattacaccaaaaggtatagaataccttttaacactattcaacttgtatgttgaacaaggttggccgcaaccttttcctttcgaagtaaactattactttgaactaaaatctagtccaaaccagaataggattggatactttaatttgacccagcaaggctaccagtggttgggggacaccagtgatgcagccatgtcaaaaatcatacgacaaaagttattccatggcttatgacataaaaggtgtccactagttcttccatagagtccccacttatagccagtcggtccccaaactgaagttaagggtagagccaaccacatcctatctcttcctactacttgttgcaacatttatagactagcatgtgaggagaactttaggaagtacggcctaacccttctggtgaggatgttgaggctttgaacaatccttctaaggatccaagcaatgctcttggttagaagaagaaaactaagaaaaataggtttgcggctgaaaaataggcaatgctcggacgaagactaggaaggaccgagcccttcggaggcatcttgcatgaggtggcactattggtgatgccccagttctgattaagcctagggatatgggttagtgggacctgctcggcctgtgccagcagacaaaggcaaaggcaaggttgttgtaagtgaggacaactctaatgattcttcttttgaagacgaaggcccactggacaatcctccctaggtagattatcccgaggtaattgatggtagtaattcttttacatttacttgatttttgtgtttataacttgtatactgaccttattgcttttcttttacaaacatggcttctaggatttaggaccttctgaagaggaaattgggcagcccttcacctggtcagtcaaagcccaaggttttttggatagaggctacatcagatgtgactcaggccactttgcctccacctctgatcaactagcccgtgattcaagatccttcacccaaggcaatacctcctcctcctcccaaggcaccgggtaggctcttctaacaagtctgacaaggcgaaggaggttgcctagaaatacatggttaagtgtcttttttatgttgatgaatagctcgatgagctagatgttgactctctgaactatttgacggccatcaccttgaaaaatgtggcatttgtaagttcttttaatactttcttggatctttactcatgcacggtgcaaccttattaattttgttttttcttgatttcaggctctcttgaagcttttacatacccatgctaaggttaaggctctccaatagactttaggtagaagattgagaaaaaagacactgagcttgccaagaaagatacccaacttaaggagtagggtgtcgagcttaaggcacactgagctcgaaaaggagaaagttgatctagagtcgacaaagaaagagttgagggaggtgaaggaccaataagaaggtatgggctagctgcttgctcaccgcaattaggaggtgactaacctaacagtggaaaatgccaagttgaaggagttagatcttgcggagaaaacctgcaaggaaaagcaaaaagaacttgatgctctgcaggctcatcagactctcaaggatcaatatacagacttgtccattgagacgttttatgagtgctacataaacaatcccaagggcaacttcacgtatatggatactcatcttcgcaagagcctaattgctcaaggcaaggagttgtttgtatccaggctagtccaggatagcactctagaggcctctgccaaccagaatgaaagaattggccaagcctcaactgaggtgtttaccagccaaacaaaagacaacaggcaggtttctactgaagcatttgtcagccagggtgcaaatgaggcaccttctgcgtaggtttttgctgaggttgcaggttcagttgagcctatcttggaggcccaagttgataatgctcccacccaagagtccaagacccaatttttgtgagtttgaatccatctacacctcttactcttcctaacgatatctgatgtctttactttttcatgcttttactttgcactttttaatttgtaaacacatcaaatacgcctttagagactaatagactgacttgtggactaaggttaattaacacctgaaccacgtaaaaatcttcatctctttattttctacattttattatttctttagttcttaaatattaagtttctaaaaatctcaataaataaatgtattgtgttctaaatacaaaatagaagcttaaatgcatattatccatattgaaatatgaatttagtttatcaaaaaatcacaaaattacaagcctaaatcataaatggaaggtcaaaattctaattttttatatttttcgaaaatccccaaatttcttgaacacgaaccttaaatcctcaaagaatcaatcaaagatgactctaataccacttgttgtaattctttatcactcataaagtatatagtatcaagattaatttcacatataaaaatattacatattattagaagtgtgtataatcatatatccaaagcccttgatgattcaaagaggagaaaaaaaatgaatagcggaagcgtaccttaattctttgatagagataattaatttagtgatgatcttataggtagaatagatctttggatgatattttaagaatacaagacttattaggattctctctagttctctctcttgatggggaagatgagaatagagttgttcttgtttcttgaagatcactaccaatatataatcacatagttaggttattaattttaagtaattttaatttggtcccttaataaattaaaaatatcgcttaaggtatctacacatttagctcatgatactttaatacctaaaattaaaaattactaaaatgatcaatttatttaggttaaacttcaaataacaatataccaatatatataaacatatattaaaaattttaatccaacatataattggagcatcaataataaaactaattctctattttagctaaaaaaaattatatttactcatcattactttattttattttcacccatttctaaaatcaattcctccatattattttgggagacaaattttatcatagaaacaattcctacaaagtttgcatttattatccttagtactctcacaaggaaattccttcaaagtctgtttattgttaatatatccttttattttaaagaaattagttattttaaaaaagaaaatcacaattttctaccactattaggtgaaaaaaaaaatgcaactattataaacaataggccatatcctatccgtatgtttgggacggttttgaataaaatatccgttgatacgtttacaaagagccaaagccggatatgactatgagtgtgagatcgattggaaaagaaaccacctaattataacattaaacaaatattaatttatatatttatatatttcaatcaataattgcaacgaatttatcagggtgttgggtagctcagtgggttgggtatggttgggttactttgatcatctcgagaaagcgaatctttgttcatatcataataaatttacttacgatccattccttccagtcccaactatgaattcaacttacggatcgaaactgcggagctgcagaattggcggttaaggtttcagatcaagctaagctctaatactggcgacaaactcagctcggctggcttgattgggttcaggtgagctacgtttcgaccaacccatcggtgcaaagtttattctctgcgtgtgtgtgtgtatgtgtgtcgatttgtgattggatggatatgtttcaaaaaaataactggaggaatctcgagcatctttgataatttcgctgagttgggatgaattcggatgtggattagccaacgtttaggatctgttttttctgggttttaatttctttcgcgggaacataactgggagaattctaagtcaaaggtagctcaactagattggacacgagaaattcactaactcgttaaaggtaactttttgctctttccttttcaataataataataataaaattgtttatttaattttttagtctgtaaattattgaaagtagtgtttgagatgagagccagagaatgtttttatcatatatcgactattcaatttcagttgtgaattatcaaagtgggatttaattattattattattattatttgctagaagtggggtttaatttgttgtacgaaattgattccaaaaacatctacattttactattagcttaaaacgaaaaaaagaaaaaaaaaatctgatctttatagtctaaatccaagtatggtaattgtattgtttgcttatttatttataattaatgtatttcatttctctaggaataggaatggcaactcctgtagagcctgcaaatgggattagaaccccaggaaagcattactactccatgtggcaaaccttgtttgaacttgatacaaagtatgtgcccatcaagccaattggtcgtggagcttatggcattgtttgctcatctgttaatagggaaaccaatgagaaggttgcaattaagaaaatacacaatgtcttcgacaaccgaatcgatgctctgagaactttgagagagttgaagcttcggcacgaaaatgtgattgctctgaaagatgtcatggtgcctatccataggaaaagtttcaaggatgtctacttggtgtatgaactcatggatacagatctgcaccagattattaaatcttctcaatcacttagtaatgaccactgccagtatttcctttttcaggtatgctttgaccactgcaagcaagccttttgtatttaatagaattgcactggtagaatattggttccagttgcatggtagacaagattaataatttctgagattggtttttc

SEQ ID NO: 15773 - DNA, 12002 bp, Cannabis sativa
tacaagtgacagtctacagtctactgtggcacttaactgtgatttttggacgggggtactgagcgaaacggaatgggagtttaagtagttttacccaaaaaaattgatttttgtggttaagtattaaaaaaattaaaattcgggtagtttaaccgctaaaatccctaaatataaacttataagtgattttggtcttatacagtggttattagcatccccaataaaataaaatagacaaacttccgaaatccaatatatccaagtaatgaatgttgtgtaaaaaaacagagtaatgaatgtatttcatcaagaagaataaactgaaatacattatattcatgggaattttctgagaatatatatagaactgcatagaatagatatataagggctaaagtgcctctcaaatacatataacatttccttcataagctcaagatacaagacttagagctacttttaaaatcaagtagattttcacttcaaaaagaaggttaaaaacactagtattagtacctatccctgaatggagttaccttgatgactaaaccagggtaaatatcatcaagatcatgaatatgaggattctcttcaacaatataaggatcaccacacctttcactgattgtttgcagcgtttcgccttcgcgaacaacataaatttcatcacaaatcttgtgattgttgatgtgttttggtggcgcgatttcgctctcccttgattcgcagcagctcataaccaacaaaactgctaataacaaagcacagtacaatgaaactctatcagccattgcagtagaagatgaaccaaaaaccatgataaaatatgtatttttctgttttatgattatgactaggtttagaggagttatatataagagaagggtttgttttctttcttggtggttggaactaagacaacaagtcttggcaagaaagaattgaaatggttatcttctcaagtctaagtgtagtaggtgactgtccaaaaaaactagtagggaggaaagagtgagttagtttaactgcttttatgaaatgtgattaagttttaagcctttggtttctttatatatttggtattgatatatggtccacggtcattaatgtgttcttacagtatcttcacgtatttgtacaaattaaatcctttgacaaccatgcaattaatttataaaatcgacaaaggagtcattgacaggttggggtgtgattgatattaatgttacatatataagtcaatgaaatatgtcaaccctatatgctctagttaatgtaccaatattatgtttgtctaggaaatttaggtaaaaatctagatgagaaagaaatgtaccaatcctatattattggctaacatttcagttgctttctttctactcattcctattcatagggaaggtctattggctcagattaaagatggtgagtcttgaaaatagtacctgcaattaggtaactactgctcattatgaatttattaacaatgacaattgagctagtcattcttttcagcccaagaaattgagaaggaaaaaatgaaaacaaaacagattaatagtcagttttaagattacgttcatatctttaaatgaaaagaacaagaatctcaaattatttctcatcaaaaataggggaaaaaatgaataagaatctcaaattacgtagagggtgcaaatgaattttttttaattaccacgcaaacattagcatcaattcattatagaaaagttttttacaagctgaataaacaaggggaagaaaggattcacagtgagctcttggcatcgagcatcgatccggttgtcccccggaaaaagaggaaagaagacaggaatattagtaaaggtaacccaatcttcattttagctttagcatcttctgtaatttgaagctaaattcccaaggttttcatggattgaataatgtattcttaatatagctgaccacctcatctacattcactgtccaagcaacagagatgggagagtagcctgtccaagggttgcttgtattccatctgtataccatgcaagagtaaaaattaaaaatggaaatgagaaaaaaaaaccaacaacaatcataaaatttattgtggaaaaaagatactaaggaatatggtgctcttactttttaagtccttgatccattaaagtatggcctgtacataagccctgcgtttcaacccgcacaacaccttccttgtatgtaaagaggtcgggtcgaactagtgcaacaaaactaaccgggtcatgaagaaaaatacctgaaaacagtttaaataaatttaaaagttgatggaaaataataaagctacaaacagggcagttgaagcatctataaaacatgacagggagtaccatagacaccatccgacttcacatgccagtctctgtagaatttggtcatggtgcttagaatttgagcatgctttccttttgattgctttaagttaaggaggtcatcatctgaaaccaacaaatttgttattaaattctataatgaaatggaatggaaacaattttcattccattcctttgtttgattgcgctttaaagtattagaatgccattttaatagaatggcttttttactattttggtggaatgactatttcattttgaaatagaaggaaagactatttcaatgtaacatgagaaaaatttaataatttttttattaatttttttttatgcattttaaattttattccatttcattcctattcacatcctgttcctatgttttcattcatcccaaccaaatatcgcctaaatgatactatttcagaactcaaatattagtgagaaactgatctgcaaatgtcacctgtaaacttgacttgagttgtaatgtttattccaacgacaacgatatttgccccagaagtaaacacaatatctgcagcctctgggtctccataaatctgcaaattagacagatcctgttatttacagttggttgacacttgtaaagtgaaaatttacttgagatttgatcgtaaattgttaacagataaatatggagttcataatcaattgtattaattaagaaaatgttactactaggggaaaaagaaactaaatttaccacgaaacagaaagataaggaaaaaaatttagcagcaataaaccaaaacaaggtttccattataaccaaaaattattccattttagcaaacaagatatgttgcagaatgtttgattagttttgcctgtttcctgtttcgtgatgacaaacaaaggcaatgtaatgcttacatttgcttcagcagcaggatttacatttcccaaagcaaagaaagcaccaccaagaatcactagtctcttcacattctttgcaaaggaagaatctcgtttgattgcctaatcaagataaacataactgtaattaattacaatgttcagttgtaaagtctacaaaaagaaaacaaaggatactaaaacttaccaaagctatgtttgtcaggggtcccaatgcaaggactgatacttcaccaggatattcagagaccttgtcaactaagaattcagaagcatgcttttcaattttcttcgcttttggagaaggtaggaacatgtttcccataccatcagagccatggataaaatcagctacacgtggttctcctccctattccaaaataaacaagttcaagcataatgagataaataaggctcctcagactaattgatctaataaagtaaaaacataaaagtaataaataagaaaaagtgcaaatagggtataattggttaattgtggtgaagatgtatttcgttataaataaggaattaaagttagaataaatcacctttagaggctcaggactgccctccgccacaggcaaatctgggcatcctgcaatctcacactatccttttgaacatcaaaacattaatcgatcacaaatttataccaaaaagagagtccatgaagagaatcaaagctgcacatacaagaatttaaaatcaactaaaacgatcacctaccagaagcaatgcattccgtgtggcatcttttgtcgtaacattaccaaaaactgtagtcatgcccaaaatttccagtcctggagtttgaaacgccattaagatggccatgctatcatctgtgaataaacaaaaacccaccaaattatctcaatgtgttaaaaataagtaacaaatgcataaacaaacaaaatctttctacaagagggcggactatctagcaacattagccatcagaagataaaacaaatgtttccccctttttatttgtctctgaatgttaaaaccgcagaaaaggatccaaatcaaaatcttttgattgttagtaaaattatgtaaataacacaagacaagaccaactgagcaaatgggtttaacaagtcacatatataaaagaaaagtcttcataaataaaccattatttaagtcctttatttttcttcaagaaaatgaccttttttggttctagtttagacagtaaggaagtttgctttctgggattaaaaataacaaaaccaaaataaaatttcacaaaagaagcaaaagtcatgaaactttttcggaccaaagaacaaatcgcgaaaatttatatttatttatcttaaataaatcctttacgaagaaagagccatgtctttttcaagtcacaatttaatggagaatgagaatctcttttacagacccactcgtataaagggaaacattttcagaccaaaacataaacctcgaacaacttcaaaaatgtgtaatgaagaaaataaacggaaaacaaacacataaaaagtgatttaaacacattgcacagttccaaattcaccaaaaaaaaaaaacaaaattacagagtcaaaataagaaagtgaaccaaacccagcctaattcaatcattcttcgccttgtttaaacaaaatcatcatccacaaactcaaaagtgcttttccttttcccgtattaagaatctcatcaacaacaaaagcaaaacatagagagagagagagagagagatgtgaactcaccgattccgggatcagtatcgataatgagcttctcaagcttcgagtgggaacccaaaactccgttgtggcaattcatggcgagatacaacacacaatctcttagagctctccgcacaacacaatctgaatcgattaatcaaatcctaataaatatatatatgcatgtgacgttactatatagatagagaacgaatatttatatacatatatatatataattgtatatgaattgagattatgagtagattagggttttgtcgtgatcgatggggtgacgctgagctgagctgcactctaaatgaaaatatatacaaatggtttatagagtcttaaggtaggtatgtgtacgaagaggacgaagttttgttcagatttaatatcaaccaatgagaaactgccacgtcgtgcatataaaaaagtattatgtttttttttaattatttattaaaaaatattatttggatattcccggagatcgctatgaaagagatgattcacagcctaactactctgattggatgaccaaattattccaattttatttaatttatttatttttccataacgtgttactctttatttataattttaataacgtttttcgaaatgaaatataaaaataaaatgaatatttgtgagtttgtaacgttgtacatggtttctatttttagcttttgtaaagaaaaaaaaaaaagtgagagaaacactttttcgcttcttttgcttaggtcaaaaaaaggcaacaaataagtacaaatattgtaaagaaagtccctacaacttgagacatcatacatttatggttaccaattttgaataaaaacattgatgaagaagctagggggcctaatttttatttttcttcttttaattttaaattttaaaatatatattatatgaaacttttttataatttttattgataaaagaaaatgtttgcctgtttgcgtctagaatttccatttaataaaaaaatgacttacttgtgccatgttgatgattttaacgtataaaacacatgtgattacctattaattcatgtgtaaaaataaagcttaaaaaaatcatgtatcgtgttgaaacttatattattaaaaacatgcattggattacactaaaattattattattattttataagaattaatttattattattgttaacctcaaatttggtgtccctatctgttacagctaatgcttgcttttacatttggtgcaagcctggtcatgttcaacatggttgaattttggacatcaaacttgaaattcatataatggtccactgatgaaagagaaagattgtactgcagtggggatgaaataatttttttttatcccggaatgttaaatgaggcaaggacgaagacagcactctccatcttaagaaagattcgtttaatatttgaaataaacttctaatatagttttatattttttcattttcacttcaaaaaaattttcttttatatttttttacataattcacataaaaaaaaccatacaacaatcaaattcctacgaaatctacataacaattcacaaaaaaattaccagaacaattcaaactgtaaattataaaaaataataatatatggggtaattacctttttattgatacttttttctaatgtattaatattttttttattttgaataataattagtatatttaatgataaataatttttaatattttaatttttatgtagatcttttttttttattgaattaattatgtaatttactaatagcaatcaactaaaataatagtttacaattcaatcagacatctccccaatttgaagacaaccaagattagaattagaaaaataaatcaaataattagccatctaatttccaattcgtttgacaaaaaactaaaaataaaatcaaataaaaagtttgcaacatcacaattaactttaagaacaatattcaatttcatatagtgcttagaaggcacaataataaaaactgttgtaacaagttcattcaacctcgtagcttgaccactcaactattatgcaaggcacgtaactacactactaacaactccttccttcaattgtataaaacttgttattcccaatcactaacgataatttgatggtgaaccatcaaagaacaaaaaataaccaacaataaaaaaaaaacaaaaaaaaaactatatcacacattcaaaattaaaacactaaaaatcatatcatagaaacaagacaaacactcaaaatcatatttaaaaaataagagtaaaacactcaaaagtcaaaaccatgttacagagacaagactaatcgcagtagcagaaattgaattgcaatagcaaaacacaactccgactgagatgcacatatactcaggaaaggctgacagaccttgccggagaaataatataacctcctataactacaaatttaagaacaagaaaccctataaaaaaaaaaaataaataaattaaaactttcgttaattctcttatataattaaaatttaaatttaaactttaattttcatggcaagaatgaaaattaaaattcttaataggaacgagagaggcactcacgtgcatcattacaaaacagataagtaaaatttataaaatactaaagacaaaattttaaagaaaccaattgatttttgtgaagagaaacatataatggaggcatggtctattcatagtcttttttaaattcattgactaaaactgttacataatttggcacaattaattaaagtaacataccttgaaaacttaagttgttggtttggcacatgatacactgccaaatgttttggtgtcccatcggatcatgtattttttttttcagatttatataacaattgcatgtgcacacacgtgtaatgcataattctctacgacagaaaatttgcaataacatcatgaacgaacaatcccacaaaagagcatgtatgatgataattgacaaagagtgggaaataaaaataaataaaagcactgcttttaaagaatgaacaaaaatggtcgtcatttctttcttctgtttttctttatacacaacttaagtaacaacattttagtttgcccatttccagcagacacaaactgaaaaaatgataataagatttaccaagttgtcccaccatttacatcacagttaggggataagcaccagaaagtttgtgcaagcaaaatggatcagtaagtgaagttatcatatggcaaatacatagttgtgtatggatatggaccaaggcagacttcaaaaaaccaaaatttgactcccatcatcaagtcagaacttcattctgcagaacttggtcacagatgttccacaagtttttcgtgaaaaaattgcatgtaaatttggcgtacctttgttagcttaaaattactcgaaagaagacgaactgatcaatgcctttggtgtaactatattttgacatttggggagcctatgacattggcaggggtttttgtcaaacttcctttggcgtttccagtggcttgtccagggccatgtctggtgtttgttgtctcggttgatactatggatttctttatctgcagaattgtatacaaatggttgttttagaaacaatgattctacgcataaaacataatagagaatatgcatataaatatacacctctactagcaacttactgctgcaaggcgttccttgtgagtatcattaacaagctgcaaaaccattatcaataagatcatcgtcaaaagccaaaattctggcacgatatagcacagtcaagtacatgacaattcttacgggttttctgtagcttttaatttcatcaccagcaaacccaggcagagttatgctccaatttcgttctgcatcaaaccaaatgagaatatattttgagcttcaaaggtccataattgagaaagaacaactatgtctttcccaacaaaactaaccaagatgtataagtatatcctttgcttccaacgttgttgactttcgatgcttggccagtgaacaaccaaatgttgtaatctaccaaacaaggaaaaaatattattgagactagaaaacctatcacatacataaccaacttgaaaatggaaatatcatgaaggagataaactagggaaggtaaaaaaaactacatagcaaagtaaacaatgagaaaaagaaaataataacaataatatttctctacaaacaaacccaaatctaggtagctattaaaattatacataaaacaagacaaataaataaaaatttagtttgattacttacagactcaacaaaatcatcggcaatatccataagaatgtcttcaacttcaggatccaatttttcagaaggatcaatctgtccaataaataggagacatttaaattggggttaaacgaagaaaaacttaaatcaaagaagatcattatagaaaaagaaaagaaaaaactattggttaaagtaataaagtgggttcataaagaattaaggaatttagcactgcagctctgtctaaccccttttaaggcaaaatcagagagtattatttgtccaaaaagaaacaatataaaaacataatgaaatgtaaaaccattttcaacaaatataaagggtagagctaaatcacaatcatggtggcacaaatgttaccccaaatgcaaattagatttcttctaacattatttttggcaattaacattgctacataacaaatttaaattcagaaggatttaatactagcatccaccaatttcaaagtaatctagcaaagggctgctataactcacctggttgacgagctcatggatgcttcttttgctaagaattctattacaagtttcgtcagtatctgtagtggctattttactctgaagcccaggttgaactgtgctaggttgtagacttgcaggagtagaggacttctggtttgctaaactctgaacccttgtaacctgctgctgatggggtaaaactggttgaacccttgattgtggaacttgttgcccaaaatgttcatgtgcctgctgtgatgaagaaggttgctgctgctgctgctgtggctgttgttgctgcaaaggcgacatatgctgttgctgggaagtcaaaggcagagaatgatgtgattgctgttgaacatgcgatctctgctgcagagattgtgctgtcaccggctgcctaaaagatggggatggaagaggaggctttccttgtggtccagatgccaaccatggctgattaggggactgcataccttgggacgtagttggtgaaggtgaacttggagataccgctgatgagactcttagaaggccaggcccttgataattctaatccagataaaccacattaacaaacaaactagtataacaggaataggaactcataataatcaggtatctcctgtaaattaaagaagcaaattgcaaaggaaatatgcaagcaagtactagtttcaattataaccaagttcaacgcagaaggaagatatattcctaattgcaccattccaatatatttgattttaatcaataaaaaagtaagtaatatgttattccagcactaattttggcatcttgcagtaaacagcagttgtaatacttattagttaaaaaaaaaattgcagtcatttctccataaatgatgaaaatgtaagtttatctatcaatacagaaaaaagaaggattttttctctgctacgaaaagtgaaatgctcatatccacatgccttatagagggttctgaacgtggaacaacctactagaacttctaaaataatttttttgttctaccattaaattttccttccaaaccttaaccacgaaaagttcatcacttacttcatctaatgactaataaagcagaggtattgactatttaaatgaaaatgaactgtaaaaagaaatgatactaacttgagacgaaggaagctgattactgggagtagatactggccttagcgaagactgtaaaggtcgctgttgatggtgtgccggaatcccaactgggcgcatttgagaactagaattgatcgatcccaacatccccattccctgcacaccttgcatggaaggtctcacctacatttacaaagacacttattgttcaagaattgaaatggaaatatggccatttaaacatagaaattaaagcacagcctgtaatccttgtatagctgctgatcacaaaagttgagcaagaaacctcaaattttggttcttttagttacaacgacatttaaaaccttgaatgaaaatttgttgttttaaaggatcataaatgaagtgcccactatagtacctgcgaagcactggaatttgaggagggttcgggcaaattgaccccactgcgacccaagccaccaaaatgcccatacgtagacgaaaaaggagcaggctgcgatggcgaagtggtcggacgatgtgccggaacgccaatagcaatgccacctctgggcgtcggcgcagcagaggtcgacggcaacgtgggagtcgatgaagaaggaggcccagccgaaacagcaaccgaaggagaagaagaaggaggctgaaaatgggactgttgccaagctcgaaccaatgtggccggaggacggttaggaagaagagcaccgggaagggactgagaatgctgcagctgtgactggtgagactgaaattgggtttggggcttagggttaaggtttaggctgggattggggtttgggttagagtttgtggagggcgtcgcgggagtagagatcgacggagctgtcgtggacgatggaggtggtgcttggggcggaggttgtggaatctgaggagggggttgtgcttgtaatggtggtacggtaggtgggttggcggcaccggtggcggaggtgggtggtggcgtgggatttggttcatccatttggataaaacggagaagaagtgaccctctcagttttggatgctacagacttcgtcgtcccctaaatttataatattagggatttattttttttatttgtgaatataataactaatttattgctcaaatcctatttttttttttttttt

SEQ ID NO: 15774 - DNA, 6042 bp, Cannabis sativa
cttctctccacaacatcaacctcttgcagctgaaaaatggatctttctttcccgatctgatctaatctatcctcaatctctttcatctttttagcaatattgtgatgaaagtaaagatgtttaggactcaaacaagataaagaagattgtacctttcgaatccatgaatggtcttgtggaagaccctcctccaatcgaaaggcctcagcttcacagtcatccaaaacatcctccaactcaagagaaacatcctccaacttttgcagccaatccttgatagcacgattagttgattgtctctcctcagcatcttcaagcacagcagaaatggttgagagcatgctacgcatcttctccatctctttctccacacccaaaacagatccaacttggttttggatgagtgagctgagattgtcaaggacaacagtgagaacagcttcagccatgattcgtgatgatcagttgagaaaaagcagatgacaaaaatcaagcaaagcaagcaaattgtgatgagacagacttgtgaggaaggaagcaaaagactttgctttgagatatttgtatcttggaccttacgtacgtaatctaatccacacaaattaatagataagatttattctccttcacatatttctattttattatacttttttatcaatcatgcatgctctactgtatatatactattattataatactgatatagaagaattgatattgactactgaatacaattttgtatttttgtaattttgtttaatgatgatgaattggaaattatttaaatgtataattatttattggaaattaaaacgaaattgtttgtgaaatttgttggaaagttgaaacacatttatttactgtaaaattacaagtcaagtcttccactaggacaatagttgcttatgctgccaagcatggtaaaatatgacattattagtataaatcaatatcagatctaacacattttaatttaataaataatatgaaaaaatctctaataaaccagaagcaacacattatatcagcataatattggccaccataagatatctaattgtaattttaaatattatcaattaaattcaactaacaaaacttcaaacctatcattttattatttatttattttatgattatttacaattttaattaattattttttaattttgaattttattatttttttaattttttaattttttatatacatattaattcttaattaattttattttctactcatttaacaataattataaataaaaaagtacagaatatttaagttttttaataatataataatgatcaatacaaccaacaatataatataataataatctaagaggtaaggctttcttaaatcaaacacaatgactagttaaattttttgtaaatgataattttttttatgtataatttaagctttcaaattaatttaataatttagttttttttttcttaaacaataatttaaatttattcaatattgtattaattttttttattgatatgtaatgatttttatactaaaaaaatttaaaatttgtaataattgtagtaataaaagttaatggaatgttatagtgaacaacagaataatacatgcaataataataatcaaatattaaaaagtaatatagttatataatcaagtttttcaaaaaaatgcataattaatagatgaaaataccaaatactttcatcttcctcttgttgataaaactaaattctgtcttgatgctttaactgaatggggtcgtgagcttactggtcacttccagaatcggctacagcagagcaagaagcaattggcaagacagtacttgactctcccaactcggatgttgatttttcaagagaacattgtaactattttgagattcttgtacaacaagagatatattgaaagcaacgattaaagcaactttggttaaatagtggcgataaaaataccaaatactttcatgccactgcaagttcccgcaagcgcaataatcagattgtgcaattacaaaataataatggcgaatggaaggggtggaactcaggtcttgaccaggttgtacttgactatttttccaatctttatgcttcggatcatgctatatgcggtactgtggttaatggcattcgacgatcagttactactgaacaaaatgatagccttcttaaaccgatttcagttgacgaagtgaagcaagctctcttccaaatgcaccctgaaaaacctcctgggcctgacggaatgggtcctggattttaccaaaagcattgggacattgttggcaatgacatagtccaacttgtcaaggattttttcacaaccgaaaacattccacttggtcccaatgacactcacctggtcctaatccctaagaagaagaactttacaactatgagtgatctacggcccattgctctgtgtaatgtatcctacaaggttctctcaaaagttctggctaatagaatgaggttgttaattgatcatgttatctccccaactcagagtgcatttattcctggtaggctcatctcagataatataatgattgcctttgaaattatgcattatttgaaacggaaaaccaaaggcaagaaggggtttatggctatgaaacttgacatgagtaaagcgtatgatcgtgtggaatgggattatttatcggcggttatgcatcgtatggggtttgctggaaagtggattaatctcatcatgaaatgtgttacgacgattcgatattctatttttcatgatggacatctcttggggccgattactccttcacgaggaatccgtcaaggtgatccattatcaacgtatttgtttattatttgtgctgagggattttcttccttgattagaaagtttgaagaagataaactaatacatggttctcaagttgctcggggagctccttccatcactcacatgctttttgttgatgacagctaccttttttgtcaagctaatctgagtacgactaccaaaatcaagcacatgctccattcctttgaacttgcttctggtcagaaagtgaatgtttcgaagtcttcaatcttcttcagccccaataatgaagcaatacttcgacaccaaatttgttctagccttggaatgatagaagctactgatggctccctctacttgggtttaccgaacataattggaagaaagaaaactgttattctcagctttctcaagaataaaatcataagccgcctcaacagttggaatggcaagtttctttcccgtgctggcaaagaaattctcctaaaacctgtcattcaatctctccccagttacgctatgatcgagtgtctttcttattcctctagaaacttgtcatgaaattgagaagatcatggaaaatttttggtggaaaatgacaagcgctaaaggccaaggaatcatttggatgtcatgggatcgtatggtttctcataagaatttgggtggtatgggctttcaccatctatatgatttcaatcttgctatgttggccaaacaaggttggcgacttctttgttctcctacatcccttgctagcagaatattcaaggcaaaatactatccttgttctgactttctcaatgcagaactaggaaacaatcctagttttgtttggcgaagcatttggagtgcacaaaatctgctcaagcttggaagttatagaacaattggtaatggagttacaacaaatattctgcagcatccttggctgcccgatccttctaatccgtatgttacttctggtacaatcgggcttgttaataaaatggtgcattctctatttgattctcatgctaggagctgggatactctattgtgactgacatgttcaacactcgtgatgcatcattaatccttggcattcctctcaactatacagccaccgatgactgctggtcctggtctggggagaagtctggttgcttctcagttcgaagcgcctacgatttgctacaacagaacaagcatagacagcaagttcaagataactccgggttttggcaaaagttttggcacctaaaaatccctccaaaagttaagaatttcatgtggagggttgtcactaataccctccccagttgcctggaacttgtgtcaaaacacattgacatatcgtctttgtgtcccccctgccaaacgggtgcagaaacaacctcacatgctttcttaagctgcccgtttgccatcagctgttggaacaaatgcggcttgattactctctcgcatacagcttcaacaataggacattggctcgagtctatgtttgataaatataatgatgatgtctcatgtcgtgctattatggtctgttgggcgctatggaaatcacgaaactctattgtgtgggataaaaaacactcatctccaacacaggttcttcactcagcatggattactcttgaccactggcaaaaagctcaagataaaaaatgttattgtcattgtccttcttgacaaaggataataacattgagcaatggactaaacctgctttaaatactgtcaagataaatgttgatggagctttgtttgagaaagaaaacacatatggatttggagtagtggctcgtgattcctccggtcatctcattgatttaacagccaaatatcatggaggaacataccctggagaagttgttgaagctcttggtgtcaaagaggctctcagttggttaaaaggtaaagattggagtcaagttgaagtagagacagatagcatggtaaccgtccaagcaatccttagtaatcaacacatgaattctgtttttggtttgattgttaatgattgtaaaaacttattatcttctcttcaacatgttagtattcgttttgtcagacgatcagctaaccgggtcgcccatttcgttgctaggcgtgctcagtttttctttgatcgtagcattcatgggggtgttgtccctaatgatcttcaaactcttttgtatgatgaatgctaaattttaatgaagtagacatttcattttcaaaaaaaaacagatgaaaaattatgcactaaaacgatatctgaacgatctcgataccatcaatctcatctaaattttatagtctatgacacatttggataattatggggtgcgttatgttctattttaaaaaatacaagacttaaattgtcagttaacaaaataaaaagtcaaatcgataatttttgcaaaatactaatttttaatattatttgattttttttaacaatcattattattattaatattttgaaattattattattagagtaaaatttctataaattaataacatgggaaaaggaaaaatatatggtataatttaattgaggttattaattaatctgagtgttaatttacactatttttattaggttagtgcataaaagtaaaaaaaaaaaaaaaaaaatctaagagcactcacaacacagttcctctaaaatagagaagttttattaaatttaaagaaccgtattaaaaatacgctacaacagatgttttaaactccttcttcattttttaagtttttttaaaagacactatatattcatgttctacatttatagaataatacttactggtctacttatatttgttaattattttaaattttaataattatttttgtatgtggatatgtctatatattaatattatatatttgaaatgagtaaatataataaaattttaagaaaataagattttggtgatgtattttaaaaaaagttaatatataatgtgatgtaaaattgtgctgtaaaataaaaaaaaaataataagattttaatgatataatttaaaagataaaataagaagcagttgctctaaatattaatcaattgaggttgtattattattattattattattcacgctaatttttataattttatacaaagtttaaagcaagtgggcatagaatgtagaaactagtatattttagctaaaaattacatcaaatatgggattttgtaaaaaagttacaaaaatatggcatttataggtttgccactcttctatggcattttttcacaattaaga

SEQ ID NO: 15775 - DNA, 5735 bp, Cannabis sativa
  modified_base (39)..(39): a, c, t, g, unknown or other
gatgttaatgaaacataaatggtagtaaatctagatccnggtaaaatatttccaacaatagcctactccccttgtattgtattgacttaagagaaggaacgaagtattcttcttcttgaaagctcttacaactgatctctgagtgtgtttctctcttagatcactcttttctctctagaatatctgtctgaggcaattctttcgatcgctttcatagtgaggctaggttactaatataggaacctaagcatgagggatggtttcccttttgcttacaatgacaaaataagaaattacaatgattctataattacaatatatgaaatagaaaactaaaacaagttgccattttgctttgactcaatcccatgaatattgggatcttctttgtgtctagacacaacgagattattctctgaaattgctatctcttgtaagtcgctcagtggaaaaatgcttctacctggtcggatgtcttctccacagccctgctcagataaccgactgttatagatgctgactagtcatgtgcgggctgctagggacattttcctctgccaaagcatcagacatatgagacacgtgtcatgtgatcatattaccacatcaaggtgcaaaaatctggataacatttcccttgcatgtctggacgggatcctcctaatcgcacgtggacttaactcaaccaagagtcttgtcttgatgggtgacgtgtgtcctaggcgtcgaatgacgaaccgacgtgaccttgactagggctctcatcaattgtaactcatttaatgttgattgacagtcctgcctcaaatcatgactcgatgtctgcgcgtgctaacggttattctgcctataaaaagtacataacatatttttagggggaattcgaggagtttaaatttttgaaatgactacttacccttttttaactaattttaaataggatcgagaaccttcaaggatccttttatccattctcattcttgataaaccagagcgtaaaagttttcaagaaattttttctctcaaattcttcaaaggattcccaagaaaactctcgacaacatcatccgagcagaacaagaagcctcaagttctttatttcttccttttacatagttgcaatgaaatgcatgcttaattttctagatgttaggccatgaattttgcctgttcttgaactattctaaggtaaccctaaaaatcctaggttcaaagtttaggaatcttgattttgcttaacaatggaatcttgcactttcattttaacattacaatatccattttcactcatccattaggggtttagtgaaaatcaaactaaaattcgaagttttgaacttctgggtgaaaattctatttctgagtgaaatttctacttttgattcctcaaatgaacctggtcagtactttcaatttttttttttaattcatttctctaaccaattctcattttcttgtttcctaccttttgtagatgaactgtggtgagttttggggaggcaaccactgcattgaccaggatctgcttaaacttctgtacgaggattatcctcgtcttcgtgctagccaatcttcatctagtgacaatctttctaactctagctttgaatactaggaaataagcattgagaaaacgccttcctcagaacccgaggtgcaacatcactttctatcttatccagattcaatgtgagggatacggtagtttcatttgggaacatacaaaagggtagagatgctaccttccatctaactggacgtacatagtctgcccagatgtagtcgacactatactcgagggctgcccaaacctactgttgcgggtaaacccgttgccacctttgttgtgactattattaggcaaacgtataataaaaattcgtccaagcataatatgatggctgagactaagaaaagtgtacggaaatcttcactaaccggcccacattgcccgccttaccaccttgcctagggcagaacaggcccgacctgctactgaagagggggatattgctggggacgttgaagtccaagaagtagaggaccagggcaaggtctatcttgctactcctcttgatgctgaaggagatgagaaagagggagtagctcgagtcttgccgttcggtggctacaatgaagaaagaaagcttgtatttgaggcagacaatgttctaaaggccagtgaggactatgttattgaggaatacaccaaggctattcatttgaggaggctaagggcgctatgagatcgatggatttctccaccacccatggtgaccatgatgaacattacaaatttgctcaatcatggtctcctcgggaatgtcgaatgcttccttccctcccccgacaagctagctactaacccagaagaagaatactgtgattggttaagaactcacactaagcagggtgcgatgtttcccttacacccctatttaaagatgattgtggactactatcacataagtccgacccagttcacctgcaaggactcaagtatttatccgccctgtttatactctatgcctcacaaggatagggtgagccgtccccccacaatacaacttgggtttttgatctaaattcaagccccaagtagaataggtctgggtgtttctacttctctaagattgagaagtcatggttcacgggcacgatggccaccgaggttatgaagataggaggctttgtcaacgagtattattttgtcaaggggatggacaccaaccacaccagctttcagcatgtaccgtcctacttccaccctccgttcacactggagcctaggaagagggctcaaaagattcttcaactttatcctgctgaatggaacatctctctcttggccgctgaggctaattttgtcaagtacaagctgtttccggccaatttcataccaaaggttgtggcatcagaagagattaggtccgactaggaggccctgagcaagaggaagaagaagaggaatgcctctccaaaaaacaaagtacctgttgagtgatctatccagatcaggttagaccctgaaatagtttctcggtcatctgccctagtggcaggaaagggaaagtccgtcctagttgagcaagaataggaggattcctcagatgataatgctccttctctcattgttcaagaaaattctcctgcttacatgcagggtaccttaccttgcatttaattttcatttgcaattgcttatattgtattcgcttttaactttcttgttttattcatatgaagatatgtctcagaaggtgtttcaagccttaaaaaagaggccaagtgatagctcctactaggtacatttggccaaacgatccaaggtggatgaggtaccacccaaggaaaagagtttggtcgagtcacccaataacctttctgaggaggtagtgtcagaggtggacccaccggtgaagagctccaagaccaagagtgccaaggggggaagcacagatgggtccggtccgcccaagtcttcaaataattctatcgttatgctaaaccctgagacaaagaaggggaaacatatgcttcaattttactaggaccgattactccccgaggtaaatgattagctggccggaggagacgagatgtttatggagctactgatgggcgagctcttgaaggaggcaacccgagtaagtatttgtccttttgtcttttacctcattctcttatccatggaagttttgacctttctctatgtagctcaacttgaagatggcgtacacttactcccgagccaagtccacggccttaagaaccataaccaccaccaacaacctgcagaaggaggtggatgcagccaaaaaggaggttgagggcacgagggtggtgctaggcaaggagaataagcaacttttggccacaaacaagagagttgaggagttgtagaaggagattgaggatatgccatctaccgccctacttcaagcggacgtcgaggctctgtctagagaggtcaatgctctgaaggacaagagggaaggtttctgaactcttctcgccaccttaacccagaagaagacaaagttggaagaagattcaaatccaagcagaaagagcgggaagtgcttcagatggaggtcgaaaattttgagacggccaccttggaggatttcaatgaattgtggaaggccaacccacaaggaaactttaattacctcaatgaaatcgaggaggcatatctcagatttttgcggcccaaaaagacaagtaagacctcgatgcagccaactccacagctctgatcgaccaaagcactgacgatctggcccctgatgaccaagctaatctgtagaaagagctagagactccggccgtgtgaaaccttctttttcttttttttttgttcagttcggcccgtgggtcttttccaataaaatatggtcaaccaagcggcctttaaacttggttatgcttcattttgttttaagaggtcgggcaacctttaatcctgaacttatcgtgctttgttatcttcttaaaatgaatattttcccttattttagtaatttcaaatgcaaaccgctgtctttttatttttgagcttgttatttacctatgccttttacgggtataattaccccccaagtgaccaagagtcatagagcatacttatgactgttggtcacttgtattacacaagttcaggttttttctgttcagctattgggttcgagcagagcttttgtacacattttaatgataaattcataaatttctataaaaaatgattgacacaattagaatgataattaatatctttatttatttattgggttaaataattttgttatcgtagtaatttacatttattgaattatgaaagctattacatgatctaactgatctttatctaattaaaatataatctagactatactttagagatggtcatttgacctgagttccagtcatgttatccaaacccttaagcaggatccgctcagaaggccatctacttaagagtagatgtttgagcatgccagtcgagttgtcttttatgttaaggaatactcttctaaggaccatatctcccacaaggaattttcttgtcctcacttgcttttttaagtaccgagctaccttttgcttatgatctactagctttaggtttgttgaggttcgttcttcttcaatctcgccaactgaacctgctcggagggcatgattggtttctttattataggttaatctcctatgggacgaaggttttaactccatgggaaacattgcttcataaccataagccataacaaatggtgtttgcccaattgttgttttctccattgttcggtatgaccacaatacttctggtagttcctctggccaattccatttagctttttcaagccattttttcatggtgtctttgattatctttttgactgcctcgacctgaccatttgtttgagggtgtgccaccgtggagatactttttatgattccatgtgttgcacagaaatttgtaaatatttggcaatcaaactgtttgccattgtccgaaacaatcttgtgcagaagtctaaactgacatattatgtttattgtaaagtccaaaacttttttaggtgtgatcgttgctaatggcttggcttctgtccattttatgaaataatccattgcgaccacaacatatgttgggaatattttaccagaatctagatttacaaacaagtatgttgattaacatctgaaatatgaatatctctaaaacaatgaaa

SEQ ID NO: 15776 - DNA, 1942 bp, Cannabis sativa
atggttcttctcctgcatcttcttcaggctcattggggagttcagagagagagtgaattttgttttcagtatcagtgaggtttagagcactgttgagagaatgggaaagttcttccatggtaaatttagacaaaacaattaagaaggaccagagaaatgttgtgagatgtttgtggaggtgtagtaatcgttttatgttgtagtgcgaagtgaatatgtttgggaagtgaggaagtgaatttggacgggttggggggaatatgtttgagcagtgttggagcgatggagtgactttggttgagcagtgatcatcaggctgggggggaaatggaatggagaatgtggtatttatagtggaaagattaagtgatataatcgtgaagtgagaagacctctgagaggttggtgagacacgatgacaaaaggaattagtgagcccatacagataacacaatagaacaaatgccttgaaattgaatgtaaggctctacatatcagtaaattcaggggtcaatgggtagatgctgtcagtaccccctatagatatccaaaggatgcctggaatcagagtgaattttgaggatcgtagggtaatgatgaaaaactagggagcagagatttgatggtgaattaagtctatttgtggaaaaattaggccgaaattaaagggggagatacggttaatgctaaaatagggagaaaaccatattagggcatgcacatttatggaaaaattgagataaaagaggaatttatgtgggaagtgatgcatacatgttttgggggagtctatttccaaggaggcgtcgtaggtggtgatgattgcttctaagtgttgctgtggattgacgaagcctttaacggtgtgaaccaaggagcttcgtaggttgagagctaccgtcaccaagagttgcagaccccagacggacaaaaatgccgggcaccgacaacgacgacgacaggaacatggaggcagcacacgaagaaaccctagcacaggtttgaaggaagagtccagaaggaaaccccataaaaaatataccttttcatataagatgaattattttatatattatttttttttaatttttcttttaaatttgcagtttagattgttttggtagtttctatgtgagttgctatttggatttagttacgatttagattgctccgtcatttaatatgtgtattgttatgtagattttcgtaaaaatacaaaatatactactttgaagtgtaaaaataaaaatactatttttttttctaaattattgtgtcaacctttgctaattcaagggtttaatataaaattgtgtttaacaaaaacttttacaataagcataaactttactaatcaaataaaatataaagtttacgcactctgggatcccgaatccttttttcaaacgtttacaaaatataaccaatcgaaaggtgtcacccagagactaacaaaactgaggccatgatgtctcgaagatttgaacactttaggtctaatcatctagatatgtacaatctttattgaactccaaattcactgcgattcagctgtcgccttgcctttacctacacatgaagcacatatctgtgagtcgacagagttagtaagaaaagcataaatcataaacatatatatcctgacttgtaacttaggtgtgaatacacctaatcacaagcctaacctgcgtccaacatgtatgaatctcgaacgttcttgactatgtagaaccaataactataccacatacacttagtaccctgaaagtactagtgttggtagtgttggttgcacgaccaatcgatgtaccaaatgcactcagtaccttaaaaatactagtgttggtaggattggtagcacgactaatcattgtaccatatgcaatcagtaccccgaaagtactagtgttagtaggattagtaacctgactaatcattgtac

SEQ ID NO: 15777 - DNA, 4061 bp, Cannabis sativa
gggagtaaatgttgccctgatttttcctaatacacgtggcaatcccgaagtcggtggaatggaaagaaagtctaaatgtcaagagtaattaaagtaaacctctaaagcaacagtcggagatctaatggtcatgtccgggaagcccctctaagagcttcaatcgtgtcatgctaagtcaggaattatgcccacctcaaggagatagataaaaaattctggtccagtcgttagaccctagacctgagctgatatgtggatattaaatgtggcatggggaagatgtctatgaattgttttgaaaagacgtgttagaggcattaagcccattattcggtgattacactctatctatgaatcttatgacagctacatattgaactgtcgcattaatcaagaaaggttaagagcttatatcaccaaacacctaggaaaaactttatacaaactaccagacatacaaatataccttattatccgaatctagaaacttgtgcaagtaatggttctacacttgcgacaatagaaactatttttccttctttatgacactataaatatcccaactatattctgaagaagggttcagaaaaatggtataaacaccctctgtaaaaaaattactatataaaacagcagtgactcgtggaccaaggctcattaatgcccaaatcatgtaaaaatacctgcattaaatttcttctaattatttaaacaactctaatcaattggttaccgaaaatctctgtcaacacagtttgaggttgcattgtattaaataataagtaataatatatggctaaaatattatattgtattaattattaatgttgatttcgcttttagtcaacaacaatgagccaaatagtaagtgatagaaaatgtaaataacgtgaagtataaacaaatgagtaataaattaagaacacaaaaatttaaaggggttcgacccctttagttcggtaatagcctactccccttgctttgtattaactcaagaacaaagaatacattgttcactctcttaaagctctcacaatgaaatctttgagtatgctctcttagatttctctaaagtaattatttcgacccccttaccagtgataatggatcactatttatagggctaaatgcttgaggggagatttccctttgcttacaatgtctataattggtaagaacatatattacatatttagaatacacagattgtgggatttgaacaacttgccatatctctgtgatacgatcccaaacttgtagggattgcttttgtgcttcacgatgcaagtcttagaattgctaattgttgatacactgctcggattgtctactgctcggttgggaagacattatccgtgcaggtgtatgctgagctttgtttggaacatttcttcatgcatatgtagggaataaggtccacgtgtcaccaacatgtgctgccgcgttacagtgcaaaaaatgggataagaataacgaccataatttttaatataatgtgaatcgtattatttaatacataacaaataatgtgtatcagcttgtattaaaatttttataaagggtttaaggttggaaaccccgaccccacacctagccctagtcccgaaccaaccatgactcgtacctacactaattactgaacttggactcagaccctagaccagaacccgaaccccgacaaggagctggactcggatcgggatttggcccctagacctcggaccatggactcgaacctaagactcgacctaggactcaggcccagacccagaacccaggtctcggcctaggactcatgcccaaacccagaacccaatcccaaactcgaaccctggccctggacccgcaccttcaatccgaactcgaactctgacccatcctccgacccaaaccatgactaggcctcaaaccccagattccgaatcccgaacgcagacccaaacccaaacgctggacctggactcggacgcaggggtcggagttggggtcgattttatagtaaatataatataattttacacaagctattaatacaagtcaataataaacatagtatagtattaaataatattagaacaatataatacaatctaatacaatattatacaactcaatacaatacagtacaatacgacaccaaactagcccttaacgagccaagcaccacaaaatgttttatacaactattggtgtattttaatattgagttcacacgttttaatttaacaaataaaatggaaaaaaattaaacaattatatggcgttacatcagtgtgttattagactccttaagatctcaaatatcaatgttctattgttaaacaacacatttttgcagttccgtaccgtaggctgacaactaattaattaaaaagcttcacacgacatgtattcttcttcgtgaatcggaacgagtaatgacagtactattcaattcgattggtaactaataaaatggaatggtacaaacgaatcaaaattaaatgcaaaaaacgtaaattattctaacatatttctattgactttgtctttacccaaaataacaactccatttcttcattgctattaggtagaagaaaaatatatcgtaaaggtagtgataacaagcacaccaagtaagaacgagcacgaataaaaaatcacaagaagaagaagaagatagcagcggcaatgggattcgaaaagcagaatctggatattgtgttagtcccaagcggattactcgtcatgtttggctaccatctttatcttctctatagatgcctatatcgtcctcacaccacagtcattggtttcgaaaacaacgaccgaaaagcttgggtggaacgaatcatgaaggtcaaaaacacaaacacccacctcctattttctttctcacaatcactataactaagctcctccatatataacgtattttctaatctgccttctgtttttcagatcgacaaaaaggatgtgggaacagctctcgcagtgattcagtcaaacaccacggctgcaacattcttatgctccgtttcgttgactatgagctctttaataggagcatggctcggtagctcatcggagagaatcttcaggagcgaattgatatatggagatacaaggccttcaaccatgtcaatcaaatacatatgccttttgacttgttttcttctagcttttgcttccttcgttcagtcagctcggcattttgttcatgccaattttttgattagtacaccagagactgacatcccatttgagtatgtggagattgctgtgattagagggagcaatttctggtctttgggtctaagatctctctattttgctcttaatatgttgctttggttctttggtccgattcctatgtttgtttcttctctacttatggtcatacttttgcatgtattggatacaaactccaggccattgcataagcataaggagcttagaagggatcgagagagaaagtcagaagtcgctcttactgatcaagtagttaatggtagaaaaccactggttgaggtctgaaattggtttgccattcttccggattaaacggaccaagagaacattcggtttacattttgtagactttacagtgttccaaatggatgacatttccttaaagcacttttttttttttattattatcattttgaactaaaattttgtccaaagaaaccgtgttttcatgatcttgtgtaaattatatcctttattaccacacatgattttgataatattttatgattattacatttttcattggaaactagttattgttcttttaataattgtgttggggttagcttcattattcttgtcattcacataaagttaggctgtaaaagacgaactgcatattgcattactctctcatcgacggtttgtaaaagaataatattggtttaggtagaaagtgtattggtttaggtagaaagtgtaggattaaaaatttattgtgagtacatgtgtataatgtatacgctattataaatatgagacaaaattaagtagccaattatgttatgttgtcatgaaaattaatttgtagataccataagttaatttat

SEQ ID NO: 15778 - DNA, 5676 bp, Cannabis sativa
taaactttttcatatttacaactaaatctaatttgtcaaaaataaaaaaatataaaaaacaaaaaccctaattcatttcatttccattgtaaccgaccttctcccaaaaccaaacccctacttccttctcactctcactctctctcgaaccaacaaccaagcaaagccaccatagctttgcactttccagctccgtaacctcgccgtcctgcagcggctcagccccctgtagcaccggccaacaaccgcctattgtgagtgatttgttgtattgtattgtattgcattggttttgtttcttcttcttctttggatgcgattttattttattttcatgtgatttcagatctgagtttgagtgtagtttgagggaatattgcattgttgttggattttttgttgctgatttgagaaatctgcgactttaaatttattgtctttgaactgaactgaatctgcgagtttacatttttaacttttaaatgttatagtattattgtcagcaaggagattagagcttagtgaagttgaaaatgtgcgacctttaccctaacgaggtttagaaagttcaagatttaataagataaaaacacttctgtaccttctttctacttaaaatgtgcattttagcaagaaataacagttgatgtagagaggatgttggttagtatgatttgctgccatgatcgtgtaaagatgaaggatacatagcattttgtcactagatatttgggcaaataggatcttgcacttcctatagatagggagagagagatagggctaagctgagtgaaaaatgttttcatgttttcgagggaatgggaaatgaaaactattagactcacaggaagatggtcgggataaatatatggcggagttacctcatattttaataattgttgatcaaccagaagaatatacttgtcttgaagaatgtatcatatgatttgtattttgttgttaatttccattccgtatgagtggttttatgctcttaggtcctttggttttctgttagttgtatatgacatcagcacaaatacagtacatagatacactatatatatactataagcacacaaaacatacatagacctctcatcttttatagataagatatttagactgccttttgcagtgttctccttaagaactctaggaccactgcgctgctccaatcctgattggagaaaatcagatcttagaaaatcaggcttaagttttctaaattgataaaaattaataatatggtactttccgtgaagcacgaaatcacaagctgccctgtggtttggattagaattaaaaaaagaaagtttcagctcagtttttaatcggtttttaaaacagaaaattgtgagtctttttatacaagcaattctgtttcatgctcttgttacataaaaaatatacttgccgccctcatgaaattgaaaacatggaagttgaagcagttgatagatcaagtgcattattagtgcttgcttatgttttcatagaagatcatttatacattttctaattagctattgctttcaggtgtgagttgagcaaatatacatcgctcatccatgacggtatgctaattttcctttaagaactattttcttcttcttcttctttttgggtacttaacttcaatgataatattccagatcgggagaattttcaaagatgaagcaagcgaagagaaaggagagcgggccaggatggtgagtttgctattcatagtatattaatggtcatttatatgctgataacttatatttgaagtataagcttgggttattcttagttatattgtggcaaatgcgtatgtattgaataaagtttaggtttttttttttttttttttcactttaacattctgaacttcgtacttgtggactttaatgatgaagataaatattttacaatcttttctcttactaatttactttttgttttcttatgtttttattttaggcatcatttattggtgcaatggcaattgctgacttggtcaagacaaccttggggccaaaggggatggtaaaaacatattttttttccttcacaagcaaattatcataacatatttttaattaaagaatgcttatagttatgggtttccacgaacctaactcttaagatttattttaaaataccatgtgcaggacaaaattttacaatcaactggtagaggacatgaagttactgttaccaatgatggtgctaccattttaaagtctctgcacattgacaatgctgctgctaaagtcctagttggtatccttgcatttggtttatgcagtagtttttctgcttagtaaggttttcttattgttaaatgatttttttcttcgaagggaaaaaaattatgtcggaatgttagctagttaatagttatcacttctcttttactacaccgtggatcaactttactgaagaatgtagatagttgctatatatgtattgtgatccttaatataggagtcagacatttcaaaagtacaagatgatgaagttggtgatgggacaacctctgttgttgttttggctggggagcttttaagggaagcagaaaagctggttaatgcaaaaattcaccctatgaccatcatatcaggtttttatatttatatggacgatccttgcattctaattcattttatagtgtgacatgtattataattctgtaatacaaagatttcacctacatctgtaatatttgtttttattgtacgtaaggatgattcttgtcttttgataaattgtacaatgtgacttaaaatctgtatcttggttttttaggttttcggatggcatctgaatgtgctcgtagtgctttgctgaagaaggttgttgataacaaggctgattctggtaatgctatcttttctatcctgtacttttgttattatttgttttttgtggattctctcactaatcaaattcttaattaaagtttcaagactctatgaaataatttgatattcttatgtggttttttaaattggaatcgggttttgtaaatgttttggggcataatttctgcaatctttttctaaggatgaatttgctgaattttgcagagaaattcaaatctgacttaatgaagattgcaatgactactttgagctctaaaattctttcacaggataaggaacattttggtaaacttgctgtggatgctgtactgcgtcttaaggtaattcatgacatggagtatttttctaatggtgtgtatgctgtttgtgtttaaaactttttggagctgaaaatgtgtagttttttgtgtttatcatctctgtcttttattgtgttggtttgaaatttatgcatgtaatttggcaatgagtacagcctacctatgtttgtctttatgtctattgtttgacaaggcttttgtcaatgacagggcagcaccaacttagagtccattcaaatcataaagaagcctggtggatcattgaaggattcctttttagatgaagggtatgtcatgttgattttgcttcgtttgttgcagttagtctacttatcacattgaaatgtttatacctggcatattttttatttatgttggagccttgcaagtgtttccatgctttttgtacaccactgttgaagtatttgaatatttttttgaggcttttaatgttttatccaaaattcattaactgttcgcttactgcactatctttttctaatgtactttcttatgcttgctcagatttattcttgacaagaaaataggtatcgggcagccaaaacgcatagaaaatgcaaagattttggttgcaaatactgctatggacacagataaagtcaagatttatggggcacgtgtacgtgttgattcaatgtctagggttgctgaaattgaaggagctgagaaagataagatgagagaaaaggttcaaaagattatagctcatggcataaactgtttcgtcaaccgacagttgatatacaatttcccagaggagctctttgcagatgctggaatacttgcaattgagcatgctgattttgatggcattgaacggctagcgttagtgactggtggtgaaattgcatcaacctttgacaatccagaatcagttaagcttggacactgcaagctcattgaggaaatcatgattggtgaagacaaattgatccatttctctggtgttgatctgggtcaggcatgtacaatagtgttgagaggtgcaaggtatttacagaacatttcctgtatttttcctactctgctgatttgtttttcgacctctgcattaagtgtagtgtgatactttttttgttgagtcactggctataatagcacctataacttattcttggttaattgattgatttttgttatgtcctttatatagtttttgcatcaaggttaatcaaagttttttccccgtatttttgtgaattaatttttatttcattgtctaattttaccatgtctcttttcttcaatattgtttttgcttcatttttgtttagatgttacaaattgacatgtttgtgtgcttttggcagccatcacgtgctcgatgaggccgaaaggtctctgcatgatgccttgtgtgtgctatcccagactgtcattgacagcagagttttgctaggaggtggatggcctgagatgattatggcaaaggaagtagatgagcttgccaagaagactcccggaaagaagtctcacgcaattgaagctttctcacgggcactcttgaccatcccaactatcattgctgacaatgctggtttggatagtgccgagttggttgctcaacttcgtgcagagcaccacaaagaaggatgcaatgctggaatcgacgtcatcactggaactgtaagtgaattctctcttatttattttagaagaggtgattgtaatcgaaatatgatttaatggcaataaactgattaagaaaatcacaggttgggaacatggctgaactaggaatttcagaagcattcaaagttaagcaggcggtattgctttctgcgacagaggctgcagagatgattcttagagtcgatgaaatcataacgtgtgcaccgcggagaagagaagacagaatgtagagtgtcaattatttgctgggaaagaacttttgttttttaatgttctgtctttctcttggcatgtgcttttaggacttggtgtgttatatcaaaactctagatcaggaagaaagttttgttggcttgttttgtttccccttttcagacggtttatattaatgcatggttttgtctattttatgtttttgtttttttgagttcacttcttttttatgtttgttgaatgagggcttaagatgaacctcttgaaaatcaagagaatggggtgaagagtagtcaatgattttatatataatttatttttatatttgattcatgtgagataatgttattcaatatatatatatatatatatatatttttttttaaaaatagtggtattttttgttcaaattgtgaatcaacttattcagtgttattttgtttgcggctgagagtcatttgcttgtttatttttgtttgtatttgataggtgtggatcaaaagatgttagggatatggttctgatactatgttgagaattatgagttttatttttaaattaattggtgatgagtagagtggtttatgtttttatgactcaatatttatacatttaattca

SEQ ID NO: 15779 - DNA, 4445 bp, Cannabis sativa
ttttttttttttttgtctttttgtggagatcaatttatatgtagatgttagatatataaaagctttggccatatctattgtcatccttatggtgtttaagttttaggtttaactacatataataagtacactgatcacacattttcataattgcacttgtaatagtacatgatgttcaacaacatatacccaaatgatgactaaagctaatcccttttgagggaaggagggagggagatatgtttgacctttttcaaagagagagaaacatttaaaattgttatattcttattgctcatataaataagacaattaaagctttttactcttgtgttgaggtaaaattaaagaaaaacattgtcttattttctttttggtaaactttcttcacttttggtgccaatccaaatcatatggaaaatgttatataggtggggtgtcttttttacacctatcagttagtattttcgtttttgacattgaatttttaaataaaaatatacattatatttataataaatattttacaaaatttcaaaaaataaaaaatgatgaaaaaaaaaagtatgttagcaatgttcatcatatttagaccaaactgcaatccatttgaactaaaacagaaaagtacaatcaactccgggagatgtgtaagctagctacaacttcaaattaaaggagcctaaactatcttttctgggcccaatttggcccaattcaaatatataaagtttctataatgaaggcctagggcccaaaagacctttataaaatattttattttaagaaaactctgtcgtactctatctagtatgactcacttttttttttttggctgatctttgatatctactactcttttcgaggcgtgtaatttatcataaagacaaagaacaatattccagtgcggaatactatacaacaaacagatatggacacttcaatatcaatccgaagtgaaattaattgtatcaaaagtcaacgactctccggtgaaaaaccatattaataaatcttcgtatttcacccataagacttatatttttcaaaaaacaaaaaacacacacttaaatggttgaccttcagatattcaaataagtttaagcaatacaatctgaaccgttgatcacgtacatgcacgtgtaggagagcagagagcagtgttttagtgggcccactcaataaaaatgtattatgtattatatagtaatagtatgataatatatcatcgattataatttataagtatattaatacagagagggtgttctacgatggattggggtatggcacgggcccccatcacgtgacgttgatttgagttagtctgcactgcaatgcaagagtcagtagtgggacccagtgagccaggtggaggtggggacaggtagaagggaagagaaagaggccaaaggaaggaggggcatgtggtgtggtggggcccaggctcaccctatttacggtggagacttcttctactagtactactactagtaagtattatgccatgcacttgtcaatttgaccattctctaagccaataacctaactctgaaactttcacctcataaaaatcaaccaaatttattttattttaatttcttttttcgtttttggccatttatgtttttgaacgatgtgaacttgaaacgtttttcttgggggtgaaaatataccttgttgaggatgatcaggtttataattatcctcagttatgcatgcttataataattttccaaaaaaaaaaagtaatgtacatagatagatcatattaatttttttttttttgaaagggagatagatcatattaaattattagttacgaaagataaataaattaaggatgagtggattgactatattattcatcaacactacaaatattatattgtaatttatttttatatatgatcgattattttgtataaaggtgaaattaaattaagaatgaaatagactaaattataatctcaagtttcttaacggtatatcatccttatgaattatgataagaattttaataattagataaatataatgtttgtatttatatctattaaataaaaagaaaaatttaataaaacgtataataaaagtttacacaatagaaattatgtatccaatctaatttaattttgtagtatttatattcaaacatgattctataatatatatataaatgatattcttaaataatcatattaactttttttattttttcttgagaaaaaattatcatatttttaatcaatctcttatacacgcattatatattgtcaatctgaaaaatatgcatgccataacaaataataaagtaattaataaaatcatgaattactctatgctatggtaaaattaaaaaagaacttaaaaatgcgaattttttaaagtaaaatgaagatacattaattctccggtccggatatacacatgggcacgtaaaattatatagaaaataagaacaacgacactaattaatatactgtcctcagtctgtcattttgtttgtaatcaaaacttgataagaaggaacagcaacccaatctaatttaacatttagttaacataaaaaaattgtaactttttgtatccatatgtatatattaatcctttaatttcttttatactactgttacctacgaaagattcttaattcaccagctctttctctctctctcccttcatgtatttcttttcactaattttgttttgttcccatatagaaatatcagcacgagagagctctgaagaatgtcttttccaaacttattgaaatagtaaaattcagaaaacaaaaaatgacaatgctcagacgacaccaaatctctcatttagaaaaatatgttcgtgccttctcaaaattattgtcggtgcccactacaaaacaaaaataaagtaataataaaatcaatccctgcccaactaataaattaacaaataaaataaaaaaattctcattatgttgttttatatgtaatgtaggtactagagtgtggtatatatataaatatatacatactattacatatatatgtgtgtaattatgtaattttattaagatcaaaaccaaggaaggggtagtagggtaccgcatattattattgtcaataaatgcacacatgcacacacactgatcactcacaaaataaataaataaataaaattaatatgcaacaaaagaaaaaaaaaattatgatcagaactcaaaatcaaaagccgtggatgccacgactactactgcttcctcttcttcttgatggtgatcatcacgaataataatattattattatctgataatgaactcatctcaccatgattatgatgatgatgatgatcagctggagtagtagtagtagtagtaattggagaatggtggtcgccgttattattcattgtaataataatatgatcatcctgacgatgatcatgattattattatcattaatgttattattattctgggcttgttgaaacgacgttgaaacaagtgtcgtactagtagtactactacttcctttgttatacaaagagcttaactggtgaaaataagggcaagtcctagagtcaactgacctcttcttgttaacatctttggtttttctgaagtacttgttaatgttctcccacttttctttacacctcttggcacttcttttgtatcccaactccaacatcccttgtgagattctctcccaaagaggagctttatgattatgatgatgatgatgatggtgatgatctgatgttgatgatgattctcctgtagctgtagcagtagtgacagtactgtagagattgcaccttaggttaatcaaggccaagacttcatctctcggccacctctttcccaagtcttctttgtcatttatggaaatagggttttggactgttttgatggctgatgacgtggcaactggcttattagtaggagtagtagctgttgatgatgagagtactactacaatatccttattactactactactactaggttttttatcatcataatgaggatgatgatgattggtttggtttttttcaaggtgggttattgttggatttggatttgaaggaggaggaggaggaatatttaaagaagaagaagaagaagaagtgagagaaactacattatctttgttgttgttattactaatattattattgtctaattttgtgagttgggtgaccttgttcaagaagtcaatgattgaggcttgtctatcaccagcaagggcttgttcatgagccataatctcaagctccttgttcattctatccatctcttgcttcttccaagcttcttcaatagcaactttctcttcgtccctcttaaccatatcttctagaagcttgttatgcatctcctcttgttgagccatcatcttcttcacaatctcctcacaaaaacccttgaacatatcaaacttcatcatcttgttacta

SEQ ID NO: 15780 - DNA, 4770 bp, Cannabis sativa
aattatactattttaattattattaaaataaaaaactaaaatattaaataaaactaacactacgtggcttggcacgtaacaatcacctaattaaaaataaaatttatgtctataagaaatagttgtaaataaaatatgtaaattttgttttttatattataaattacttagaattttcaataaattcacaagtgatcataaataactataatatagattattataaaaaaaattaaactaaaaaattatcgtattaaaataaatagagaatctacttaaacacgcatttataaggtgtactgtagatttatcttatattttatatttattatagaataaatactattttaaatccaaaaattaccaattaaaacctctattttattaaatgataaaattaactccgtattttaaaaaaaaaaacaatatttaacctttatataaaaataaaagagagggaacctaaattcctatgagttcgcattggcacctgtctctctcgttcctatcagttgccgccgttatctccggtgctcgttatcgctggcggccggcaagggcaggcccaacccaacccccaacgttgacgacaaatagcaatttcgacctgacgactgagtagtacgaacctatctatccacctttcctcattctaaggtaacaaatttcttatttttctctgaatttattacttcatcttcccatttttcttcttctttttgttcagtttgtatatcgaatagtcttctcataattctcttattagaatttagatcatcgaacacactagctattgactaaatcttccgttgaatattaattattgttaattaaacgtgaccgaggagatcaatcaaaagaaattgatgaatttgatggtgaagtgtattgatccgatttcaatactattttagctttcttccaaactctccatttttaaaaatttattgaattcaattattagtattttgcttgaattgccttcttcttcaattattgaagttagggttatgtttttttttatctttccctctaattaggaatatgacattgaaaggaaaagaaagaaggttttttttttcttcttttcttttacacttgtgtcagctttttggtcctgcattaagtaaagggtattccgcaagtacggattttcctgctcatacatacttatcttaatttgtttttgttcagtttgtcatctatggagtagtggtgaattgttgacttctgaaatgaaattttgcccaaatactagctttgtcattttaggagtttattgtttaagcttcgtactatctttttaatgtagatgggtgcaagaatgctgtttaggagatttcccctagtgctaggcatttgttgatttattgagtatacatttacacagagagtaccactatcgagatatatttataacttgtgctatttttgttatatatgtggcactttctaatgaatatgcaatgagtttcccccagattaatgattatagttgaaataattgattataatttggtctccctttgtgttgtgttatcatatacattcaaattagaatgtctatgatgtatgatgtattgttttgtagatcattattcatgaagaacgatgattgcctattggatatgttttgtattactgtactagctttttatattttggactgtgaatagattttttttaggactgcttggacttttatctatttacactttggactgttgtgttttctaatttgaatgcctggaattttttgtattagaggttataactatggatttggattttattatggtggtcaggtggtgaattcttactgactttgaaacttaaaaaaataattaacgtttggtgggtaatctgcctaaactgagcaaactgttggtctgttaaggtttttcccaatttttttttttatttgggtggattgcatttaaatttttggtactcgttttagaaaatatgttgtataaactgatcgatgtatagccctaaatatatgcccatataattctcacatcaagcaaatatatgcccatataattttcacatatttataaaaaaatgattcacttacattcatagagaaaaaaaattacttatacataaaagtaaagtgagtagctaatgatcatcttatttgattcgttttgtgtagtgacgactacaagtgagttatagtgataatagtagttttgaatgttgtggcaattacaagcgaaatacaaatcatataatgagtttctatagatttatcaattatctttttcttttctttttgaatctctatgtcagcctcttttattttttgttttttaattgtatttttattaatattttgagtaaaatatttaaataatcgcttacaaaacgcagtttgtttcttagttcataattattacaatgtttactatcgtaactaaaaatatgtgaaaaacacaaaagaagtgcatcataaaacttatttttactgatataatatagaattttacagaaaggtatttaccattattaatttttcttttctgaaaggaattatttactaggtaccacttctttacataaaaattaggatttattttattttagtttaatccttgatgtctcacgtctctctccttattttgttggcagacttgcttgttaatttaagaatcagcctctaatcatcatccactattcatgttcttactgttagtgttctaatatttgggcaatatgtaggagttctgagttatcttccatttcagtgttattgcctttcccaagcttgtttctgaatgttttatgataaaccttcagtgcctctgtttgtaattgtggttttttccccttgcagaagaagcatttggagggacattacaataataagaataaaataagcattttctcaattgttcctaaaatttactctgcaaaaacctttccaccatagctcattttgaaggtgaaggtgatgggtccgtcaccccccaaaccatcgagattcactcgtccaaaggtaggggagtcgcagtcgagtcctaatctttacgtggccaactgtggtcctgctgtggggctctcgtacgacactattgcttctgtattcggaacatttggtgaggtgaaagcagtgaatccagctgatggcagtggtgttcgagttattgtgtcgtatgctgaagagggttctgcccgaaacgctttggaatcactccatgctcgtccttgtcttcaacttggaggccgttttttgcatattcaatattcctttcttcaaaccctttcattggtgtgaaactagtgcccagatatgaatgctgattctgaatatacattacacttgttctcacgttagaaagcttatttaatttgtttttcttttcttggttccttccatgtacaggtcaatgatcctctcccagtagctttgatggcttcagagttgaacattccgggtcttcacttgttgcatgactttgtcagccttgaagaagagagggtgtcgatgctgactcatgctttgttcactctcattgttatggctatcattccttgtgatgtgttcttacttttggtttcttaggagttgattgcagcagttgatgaaatgccctggaataatctttccaaaagaagggttcaacattatggatatgaattttgctatgaagtaagtttagcagtacttttgctggactcttttacatttatatatttacctatttaagctatctgaatttgtgaattcaagtagaactaacttgtaatgtttatgaaataccattttgtgtcagtcattggtcatcatcatgtttagacaattcttgtttttcctcactttatgtctggatcttattgttgaaagcttggtaaatttaatgatgtttcatttaggtgataatgagttttgaacttaaattatgttcattaaatatacgaagttattgatatgtttgccaacctaaaataatcttgagatatctccattaaaaattgaaggaaaaagaaacacagttaatgttccaagtgatctgttatgtagtttttattttatttgtgcataatatattgttttgttccttgtgctagtctctttcagttatatgagatattcaattttatgtatcattttttcagacttctttgtagggttaatgttctcctccattttttatttgtccatgcagacaaggaatattaatgcaaaaaagaagctcggtgaactcccatcatttgtttttcctgtgctaaagaaacagtcgatgtttgcaaagtatggtgttcctgcagatgtagttttggatcaactgacggtatgaagttagtaatttttgcacattatgtttgtatattttgctgtcttaaaatgtaaagttgacacataaacattatttatatgctgtattttgttacaaccgaggattgaattcataatatgcgtataagctctaaagaaactttgctatatatcacaggtgaatgagtatccgcctggggtgggtttgtccccacatattgacacccattctgcttttgaaggattaattttgagcctttcactagcagggccttgcattatggagttcagaagatatgaagatggtgattggaattctaaagcttcacttggctctgatatggaaaataacaaaaccgattcaaattttgtaaggagagctatccatcttcctcctcggtctatgctaatgttatttggtgaggcacgctatgcgtggcatcactacataccacaccataaggtatgtttattgatcagtgatc

SEQ ID NO: 15781 - DNA, 4029 bp, Cannabis sativa
  modified_base (1414)..(1421): a, c, t, g, unknown or other
ggcggtgcagtcgccggaaagagagacgtcagcccttgggcggttgcacccaccatggggttcccacaacaagcagtagtaccacaaccaccaccagtacccatgcacccacacttcagacccttacacgtgtggggtcatccaaccgttgaccaatctctaatgcacgtgtggccgcctaaacacttacctcattccccttctcatcatcctcctcctcctccgccagcctggcaaccagcagtccccactcctccaccactacacgacccttcttactggcactctcacccccaccgagtaactaactaactatatattcaaaatctcactctcattttcagccaatatttttattattattttaccgaattattatttgtaatggtaggttccgagtgcattaaccccaggaacgccttgctttccacaaccaatggctacgccggtaaatatatatatactttcgttactgtcaactttccttttggtttgtttgttttggcacctttcatagtgtccttatcttcacgagcatatataaatatgtgtatatataatatattgttctggtttcgtttgagaaattataatatactgttatgtgataataatgcagagatttagcacaccagctgtcccaggtatcccaccaggccatgccatgtataaagtagatgccggcattggtaatctcacccctggacaatcaggcccgcaccctcttttcgactttcatccggtcagtctcaatataatgtatatatttttatatattgaatgacagcattgttttttttttctaaggttaattacattattagtcatcgtagtgtcaaattattgaaggtattgactcaaaagcaaaaattgtgatgaatataattgttttttttttggcaaaattttgacactttttatagttcgtgcattggagatgaattaaaataattataacatatacaataatataatacaatgtacgtataaattgaaaatatatactgataatatatattttgtttcagtcaaaagagagtgtagatgaagctattggagatgttttagcgaaaccatggctgccacttcctttgggcctaaaacctccctcaatggatagtgtgatgggggaacttcaacgacaaggagtccctagaattccaccctcatgtgcttgattattgatcaaccagcccacaaataacatatatatattattattattggaaaataatatatgtgtgtgagcgtgtgctattttaatcaagctgatgtccagggaaaccctaaatttgacgacatgtcctttcctatatatcaaatctaatctaccaatcctttttttagggagatatcgatcatgatatctctctttctagaaaccattatttctcatataaatatatatatatannnnnnnntatatatatatctatataattaatcagtacgaacggcttcgatcgatcattagctttgtccatataatcaattatgtgtgatgagttataaactgaattattttttgtaatggtcgatagatatgagtactaataagagattaagtataatttttttttatattcctcaaagaaacaattacaaacaccaatgactaactcgattaattaattaattactaactatacaaaagtttcccatccttctcctatctgtagaagaaattttctttgtataacaatgtaaaatactgttacaaacagtatgcacaatatagtgtgaaaagttttcttcactgttatcactttgtggttccataaggcttcatgtatagctttcctacattgtagtgaaaattagtacactgtagtgaaaattatgtacatgaatactttccgtttgaattgactcactttaaatcaagaaggccatgttggaataaacagttaattctgttattagttagttgtgactgtgttagttgttagttattttgttggttgtaactgatctgtatataaaccagtgtacatttctcattcaataacaatatcttttggttcatctttttcagtctttctttctctccttcttcttccttttctttcttagttactctgttttcttcataaactattattcatggctagaaggttcaacatggtatcagagcgggagttttctcctctggttgcaaacatggcaacgattggaaacaactcagccaacaatcaagcagatccagctgttcatggagctcagcctaattccagatcacgaaccaatcaaaattctcaagatatatcgaatgaccataattttcttctttggaagcaacaaaatcttgctgccatcaagggaaatcgattactcagatatatcaaagaacctctactagatgaatgcttgaccaatgaggatcgtgctgccaacagaatcaatcctggttatgtcgattgggaaattcaagatcaactcctcgtgtcatggttgttatcttccatgactgaaagtttactcacaaggatggttggttgtaacacctcacatcagatctggacagcactcgagaaacactttacattacaagtctcgtccaaaattctggaatttcgaaccaagttgcagaacctaaagaaaggctcactaactctcaacgattatcttctcaaagtgaagcaaactgtggagaagttctcagtgatcgtgatcatgttggagctatcttcaagggtcttccaagtgaatacgacaatattcgtcatctcctctaacactcgcattgaaaactatactgttggagaaatcgaggctctacttttagcatctgaagcaagaatcaaacaatcggggaaagaaattgatttgagtgccaatattgtcactggtgaggaagattcagcaatggaagcaaattaatctgcctgttagcaataaaatttgaaatttctcctttctctgtttgtgctacatgttgtcttggaaaaatacataagttttctttcccaaaagcttccaccactgtcatttttgaaccattacaactagtagtttaaaatcttatttagggaccctcacacaaagtttctcacaatggctataaatactatatacattttgttgatgttttctctagatttacttggttatatctactaaagaataaatcagatgcctttaaaattttttcttaactttaaaaaggaagctgaattacaacttggtaaatctattaaaactctacaaattgattgggggtgaataattttctacttatctcactgacttggccgaacgaaagcacagacacatttttgaaaatggtcttgctttatcgacccaagcttccctaccccttaagttctgggatgaagctttcaggtctgctgtgtatatacacaacagactacctacatctgttcttcataataaatcacccttagaggttctcttcaataaacagcaagattataccacatttaaaacctttgggtgcgagagttttctcaatattaggccatacaataagcacaaaattgatttcagatctacaccttgcacctttctaggttatagtctcaatcataagggatataaatatctcgattctaatggaagactttacatctccagagatgtagtctttgatgaattttcctttccttattatgagaccattgtggaccatgattcacctgatttacctcaggttattcacactcctatatctaccttgattcccaaatgctcacattacggtcagccttacactctttctgatcttgtgcattcacatcacatcagtactaatcaaaggattgattagcatgtttcaatagataccactaatctaacttgtgctactaacagtgggcctccaagccaaccttcgatctttgttacaggtgaatcatcaaggcaaggtgctatttttgtagagcacacacatcctcatctcacaatagtttctggcttcccaaggtcctcattttaacctcaacagccaacaaataatgatgttactgaacaggtcatcacatctggaactggtgttgacacagcagccac

SEQ ID NO: 15782 - DNA, 7075 bp, Cannabis sativa
aatgattcacttaattaatttatagtaaaatatagttcacttacgtataaaagtaaatatttatcaattattatttgatttattttatgtacaaaactacaagtaagatatggtaatcaactttaaatataatactagtagtgacggcaagagatactgtgataataattgtttagaagatatttttgtgtgtgtgtttttttaatgtaagaaattgtatgatgtttattttttaaaaaaattcagtagaattttttatatagatttactatttttttaaaaaaaaattatacataaaaatatgttttactttctttgatatgattctattgttaattaatattcaaatatataatttaaaattgaatgaaattagacaaaaaattttaaatttaacaatgttaataatttgagagtatttttaacgacctcaaaattcattaaagagaaaaaattctaattagctaattttaaacttgaggagaataaaaaggttaataattaagggaagtctgagtgcagtcgtacactagtccacttgtcagcactagattagagatacacaagctttgtgttacatgcgcgaaacagggaatcactacatataagattaataatatgaaatggaaatatagtagagagtagataccctccctgggaatataaatttcgaaacgacttttatttaatatattcctttttatagaaagacaatcgtattttccaccatccttacaataatatatataaatataaatatggagcttcatgatcatcatcacaataataaatatatataaaaaaaaactaataataaaattaattacttgggtcttgggtaagagtttaattaatgtgggtctgaaaccatacaaagaaaactttattataaattcattaacaaatcctttactttgttttcattttcacaactcatctctctctttccctttctcttctttatagtaccttacatctctctctccctggtccaaggatatatatatatatatatacatatatcaacattccttaaccaaacactacacaaacaaaaccaaaaaaataaaaataaaaacaaaatcaagaaagaaagatatggaagattcgagcaaatcaaggttcaagaggatttgtgtcttttgtggaagcagttctggaaagaaacctggctaccaggaagctgctgttgacctcggaaacgaactggtacatatacatatatatatacgtatatttctgtatatgcattttcattttcattttcatgttttgaaccttctttattcattttattttaaaacccaacattcctttttcctttttccaaatgattatttcatttcaacaagtacccaataatagtttttttttttttcattattattagggcttattaagtttcatctttaactatatttctgctaacttcattctctctttctttaccacctaaacgtgtagggtttaatgatctatagagacttttattttatttttttgtttcattttttttgggttcatgtgatcagaaagagagagaaatagaagggattaattcaatataatgctagctgtaacctttctgtcaattgaattgttgagcagccttcttgcatgatctcttttttttcttttttaaaatttttaaacatacattatgctaattttaatttgtgatcacatcaaatattaacgaatatatatatatagctagcatatgaatattaattttcaacttgacacattaatacatagcattgatgatttattttcatggggttaaatgaagaacattaatttataatttttttttactcatgaatagaacttactgtatcactactctagcttagtagggttatgtatgttgtaataaattaagtacaaaaataattattaccctttttctcatgatgggctattgacacgtggacttaaggggttattaattaattttttttttgaaggtggaaagaaggattgatttggtgtatggaggtggaagcgtgggattgatgggtcttgtttctcaggcagttcatgatggcgggcgccatgttctagggtttgtctcactctctctctttctgtctaatcttggagtttgagttttatacaagtaaatgaaaagccatgccatggcatgatgatgggttttaatattgaacaaattaattaaatctataataatattaattaaggacaatattgtgtttgtttatttatatatttggaatttagataattattttgttacctcttgaaccttacaaaattcttcccaactatctatgaaagtggggcttttcttatcttaaacaactcaaatatgggggacagcataggatcaaatgctgggccagacataataacatatgcctgcgcatgttcctaatatatattttttaaaaaattgggacaaaattgtctttatatattctttttgttgttctttcctaaatgggtaccaaaagctaaatattgttattagtttaaagttgaatccattttgatctttgtaatgtgtcagcaccacaaaactggaatttaccagttgtaattgtaaagtggtcaggaaaaaaaaaaggttttggaaagtttgtgaactttttagtgtaactttctctttataaaatttcccaaaactttgtcaaaagaaagatatctatgcccattattttttttttatctctttcgtacatattgtgatttttgcaactttataataatgagacaatttctaacttttagtactactcgtgtgttattaatttgcagggttattccaaagaccttaatgcctagagaggtacataaattcaaactctctcaaaagatttggataaaattaaatattctcttcattagataatatttaaataatcatcatcattagtagtattataattaatttggaagtgattaagctaattaatttaattattgtgtacagataactggtgagagtgttggagaagtgagaactgtaactgatatgcatcaaagaaaagctgagatggctcgtcaagcagatgcattcattgccctccctggtatatatatatctctatatatatatgacatgtgatatgatgtgatatatattattatattgattttaattaatttaagatcaatttggtaaaatagacaaaatatatagttaatgttcttgaatatttttatcaggtggatatggaacactcgaggagcttctggaagtcataacatgggctcagcttggaatccataggaaacctgtaagaacgaagtttcctatatcttgttatgtttgaccaatcacaattatatcttaaaatgtttatttatatatatatttaattaatttattaagatgatcaatatgaaaggaaactatatatgttaagttatagtagttgacactttaaagaaaactatattttaaatgaatttggtaaagttaataaacccctttaaacatggctaaaaggtatagatagaagaaacaaaacatctaacattattaattataaaaatatagtttccatggtttaaagaccttaaaaacacatcgaagctttcacatggggcatgtttcatgttgttcaactgtaattattgatgatacacaaacaaattaataataattaataaaaacatttgatgttcctctcagctaattaaactgtatctcacaagtaataacttagaattataaaacaatatatattccaccgtgttcccttgtctccatgtggaggtgatgttatcatacacgtatgatttgtcatgctttccaagtacacgccttcttttttatttttatatgtttttaataattaattaatagcaacatatatacaaaattttatagaaaccaaagtttgacgggtcatcgattgcaacctacctatatagaaagaaatcttagtgagtgggatgtatgtaatatatatcataaatcataaatatacatgatattataatgtatatcatatggtattattattattattatgtatatatatttgtagaatcattgcatgtgatatttaattctaaatatcgtacacatgaaaagattacttataagatatgccaagatttgcaatttaatcaaataaagcattagatgatatctctcttttatatttataaggccggatactaaatatacataatatgatatataaatgaatttgatgtttaaagaatctccatttgaatgggagaaaagattctcttctaattaattacaagaaaaagatatgattagttggtttattaataaagcggttggatacatatatatatatgttcttgtatgcttaagttctcaaacacttaattagaattggatattttaaaatatttaagttaatcttattaattaatatatatgtataggtggggcttttgaacgttgatggatattataattcgttgctgagtttcatcgataaggccgttgatgaaggctttatttcgcccactgcacgtcgtattatcgtttcagctccaacagccaaacaattggtcagacttcttgaggtactaataataattaaactcatctattatatatatatatattcttgaaccctagctaactagcctctcttattatattaaaataatatttaaattgtaaatgattaactcctgtgtgtgatgtgaatcaatatttattttttttctctatgtactgattcttattacaaaggaaacacaatatttatctagatttgtttaagagatgaataatgatagggtttaggtacagcgacaaatatatatgtataaatattgttgaccgtatattattttatagaatgttgaccaaatatataatgataagtcccacttgttcatacatgcctagtctttattaagatttattattataattaataacttggaatttggtgaaaaattaaaatttgtgaatttatgttttattatctcaggaatacacaccagagtatgatgaagtaacatccaagttggtgtgggaagaagtggacagactaaattatgttgctgagtcagaagtggccacataataattatatgtaaaaatgtccatgttacgtgaatcatacatgtcttttttgggtttcacgtacgtaatatatacttataaatatatatgtagttattatcattatatttattatattatattatacggggggctcaccgtagttctacagcttaggaagtgatctggatctttttttgtagctgagccacaagtttgtgtattgatcatatatatatatatatgtactttgtctcgaaaagagaaaaattaaatgcttgtatggcttggcctccattttgtgaaggtatcatcaatattgatcaagatcatgtttaatttgttctgagtctcaaaattcatgctctatgtatcgaccatttatgtaaataattattgtttatcttcattgaatcaaagctaactcattttgtgagatttgttgtgatcgaaccaatctaacagcttaagaagtttactaattacacacgagcatagatgaaaaataaagtgcagaaattaattaaagaaagataattacgagttatatacaatgttttacattttggtagaacagcagcctcaaatcatactggatcaagtttcagagattacaagtagtacaaagcaagaacacaagtaagttacaagaatgacttgtttcacttgagtatgaactctcttttctctttctctctcgatctctctgtaaaaattacaagaatggataaacaaatctaatccatctaactctttccgagagctaacaaccagcttacaattccacttgtccaagttagtaccaactaacttcactagcttttgtatggtaacttgtaaccatatcttacaaatctccaccttagagccaatcatagctcctgtcactgtccaatcaagcccagagggcttagctatatataacccaaacattgacccattccaaacagtactcaaatttgcatgaaaacaactttggttaacatgttgaggggttatctttaatacgaatttttgcaatattgattgctcctccccatattctctcttataaaatggaacttaatatcaatatgttttgttatctcatggtgcacctgatttttgctcaactgaatagcaccttagttgtcacaaaacacagtgataactttttgttcaattctgatgagttcctgatcaatcaaaccaatcatccaaatagcttcgtttatagcttcagtgagggccatatattctaactctgttgaaagtcccaaacatgttgaaaacataccctgtcaaggaccttttagtgtctatgcaaccaacatagtcagaatctacataattaataataagaatgtcttggtcaatctgcttgttgcatctcccaaacactaatctgttttcaatgatccccttaagatatctcaatatccatttcacatcttcccaattctcctttcttggatttactataaatctatttacaatacttagtgcatatgcaatatctggtttagtacagaccattacatacatcaatgattagtactattgcatatggaacatttgacttacaccaatttcattactttccaaaatttaagtgaaaaaaaatgaagaaaaatggaatctggccatcaagactgcgactttctaagcaaggccccagcattctctcggttcctggaagaaaatggaaagtgtgaaaccaaaaattagcgaagcaattcaaaaggagaaatatgtttagaagaccgcaactttctgagcaaggtcgcaacttaggaggtttatgggcatgcaacttgacattttcattatttaaagagggctgaagacaagctttgagcacaatttgaaaatatagaaaattctcagcatagaaggaaggctaagagtagaagacaccattcgaagactccaaacagtgttctatatcttttatctatatctttttatgtcattaattgaatttctattattttagaatgacttctagtagctaattttcttttacggattattatgtgaaccacttgagtttattttatggattaatgt

SEQ ID NO: 15783 - DNA, 2614 bp, Cannabis sativa
  modified_base (2570)..(2580): a, c, t, g, unknown or other
taatagccaaacaccacgttctaaagttatcgtgcataaaacatgtaaaaatataaaatttcatatatgacatataaaatgcattctgaattcaaataaatctccgtaaattggtaactcataactgaaaggcaagtttcataattaaactctatttatataccaatttcaaaattaaaattaagcggtctttacaactaataggtatttaaaaatgtttaaactacgggaattttctcgcccacttattaaaggtgggccgcgccgctaatactattagcggcggacattagcggcagatcttcccactaataatttttttaaaaaaaataaatgaaaatggactatcagtggcggacaatagtagcggacctccgccgctaataatttttccttttccgaaaatataaatggattattagcatcagaatttgggataggccactaatactactatttttagtagcagagatgccccgccgctaataattcttcagcaaatgaacaaaattattgtagtgattggtaagtcgtagattgtccattcatattccaaaaatgcgagctcgcaaaatctgtggtaatctaatcgtgtaatgggccttcgcgcctacttgatttaagtaatgaatgtttgcgatcattcttcatagtatattttgatattccttgtgttgacaacacaaaaaatgtgtgttattaaagaaacatctaatacattagtcatttagacagaacctatgtatagaagcgatgttcacttgtcgcaagagagacatacttgctcattacatatagtcgatatatgtgcggctagtattaattttaatggatcatgcttatctattgactataccgggcatagttcatgactagacattgtctaaggcggatctttttgcaagtttaagtcaaacacgattagctttactagagctatcaatcgacacgtcatcattttccatcaggaattgggtccatgtctcaactatttatgagactgtactcatattttttggtaaaaaaactctcactataacacaccactaattttgtgatgacagttgtctatcgagtggcaaaattatatcaagggataggcgagttgtattttaacataacggtcgcacttaggtatcttatgagggttttaaaaatacaattataattatgaattttgtcctcccaagatggcacgtcatcaaacccttttgaattatcgtaggcatgatttgagataatcgttggattaaaagcctttttgtttttgagtgcaacgtgtcaagatcacaacatgtgatcatgacaactacaataaccctctttatacgaaatgtggatttttcaatttccctcccattctcaaactctctcaattttttctctttcatagaattggatgatttttcatttaaaatcgttgcaatttcttgaaggtttttccagaaaaagtttagttgttatactacttaagatcatgcaaaaaaaaattcttttagcagacttttcatttggatttaaggatggttatatttttgctttggttatttctgtataaattgttgaatgatcacatatcttttgaatttttaaggttgaaaaatcttcaaactgatagaatagtttatgagcagtagatttcttggcaaagacggactgaaaaaggttactttttctagaaatgtaatcctatttcttgaaaatcctcatcctttttgaacaaactttgaatattaacatgctttctgctagagcacttaaaatattcacacatgcatataggtttccacttagtagatgaagaactatatgaagactcgtgatttttcaagtattttctgctcaaaattataaatacatatgtgtgaggacactcaccttttttaaatcatatgtacaacacgctgaaaagatcttctatctttaagatgagcgatctctcgaacttttagatattcaaatcttaatgggggaccttttgtagatgagccccaaaggagtgacaacttcatacctacgtccctgtcagaggatgtggctctagagatggcagtattgcaaacatcaatttccacaaatgaaatactccacatggttagggatttaacaaaactcgtggtggttgaagtacgaggaagtgaatccactgtgtctactcaaagttttatccatctaagggttatttttgatggataagtggaggaagttcaataggagtttgacttgcctactcgcgaagaggaagaagagagtgatgacgaagtggttggggtctttaatgaggatgcacccctcgacgaaccttttccttgtgtggacctcaaatcgagggtaaggctatcagatctagtttcttttcataaacttaatcttattcgaattggttatacaaaaccggtggccaggaagcgaccacatcttcctttcattaatccagtattcattccctctaaggtcgctgattcccatacttcgttgtggagtcacggctaaaaagagataaatggttgagtactcatttcattcataatatttagttcactgaagtatcatttataggtggctaagtnnnnnnnnnnnaaaatacattgaagggtataacggtaaattaatc

SEQ ID NO: 15784 - DNA, 9674 bp, Cannabis sativa
ttttttaaaaaaaaaaaatacaggtcgggcctaacccggcccgattatctcgggtcggacttgacccgctaggccaaaggaaggagtcgtgccagattgggtcggaccaaagtgatgtcgggccgcgccggtttgtggcgggtcgggcccggcccggcccggcccgattgacattcctaattaaaaattaaattgtcatatataatcattttaaacatcggttcttgaccattgttagaagtatgtgagaattgccattaaaaatgacaattaacggttgttttggcattgaaaatgatcactaaagtttgttttggcattgaaaatgaccattaacggttgttttggcattgaaaatgatcattaacgacagttcttaaccgctattagaaattaacacttttatcaacactcattcgacgattttttccatgcttcacgatttactatcttatatgttgctgtctatggcttttttttctcttattttctttgtcagagtgatgcttgaaaagtagcattgtatatttaaaatgactgtattatatctgtgtttcaaggccatcgagttaagggagaactgttgtgatttaacattttttaaaaagaaaaacaaaagtgattagaagatttttatatgtgcgtctttttttaatcatttatgtgtctagtaaattatacttatttatttatagaagaatatatatattttttaatttattttgctgtttataatcaattacattaataaatttattcaattcaaattaattgtattaataatatataaatgttaaatattaaaagtaaaaaatattatctacgatgtcttccatgaaatatcataagcgaggcaacatacaatgacaccaattataacgtcttctcttatgaaagacattgtatgtcttcaatgactaataaacaatgtcattaaaaagctctttttttttttaaaggtattcatatttttttttaattactaattaaattttagctcattgggatttatttttttctaaaattgtgtacatattttgcataatacttgagaagatgataaaaagtttaaatttaaaagttttgaacacatattattggttttactcctttttttttttcatatctaaatctttaaatttgcttaattttgaacaaatcatttttttttgcgatgctccaatgacactctaggaacaccctcaatttcatgattttgaggtaaaatgatgtcaagtcaacatgaaagcatcacaaagccatcatttgtgatctcaaaagtatgaaaaatggaagtgtccaataagcattgtaaaaacatcattttattcaaaattctactgattgttagaggtttggatttgaaaaaaaaaaaccaactaataataaaagttcaattactaaaatacaaattgatgttttcttcaaacaacatcaaaattaagatttcaatatcgtaatagtatcgtaaggagagaaaagaaaaaaataattgagaacacctttatgaacattaatttttttttttttttttttgttgataacctcgtactacaggtattctcatttttcataattttattcgaaaaatgatgcattagtcacgttcccatgaaaacttcacagaagtatgactaatgcattctttcttacctcaaaaatatgaaaaatgaaatcatcgcaaaaacatcattttgatcacaattctacaaaattttcaaaggtttagatcttaataaaaaactacaaacaaaactaataaatcatttcttaaaacttttaaattaatgttttaagtatatatttatagaggttagatattgaatttcattaacataaaaaaagtatatataagtggtgcttcaatgggaagattcagaaaggaggtggaagtgtcaatagcaaaaacgatattagtggtagtgacaatattagcctagagctatgccgccgtagtgaggtaatagtggtgcaatcgtggtgtggtagaaagaacttgagagacagtattatcaaaaaagaaagacagttagagagttagagagagacaagtccgctaatggaagggaaaggccatgcaattcttttcaacaattattattgacatcataattaaaaagtaattttttatttttaaaaacagaaaattattttttgaaaacaattaagcttgtttggcattttctttttttaaaaaaacagttttcaaaaaacaaagttacaaaaaacaagaatttcgaatgttttaaaaaataattcacttttggtcaatattgtttttagaaaacattaacgaaacgcgacttgtattgtgaaaacttcaaaaactattttttgttcacattctaaaaatactttttcaaaaacaaaatacaaaaaacaataccaatcatgctcttaagctttagttagctgggttctcctaccagttaggtaaccagtaaatttcagctttcagatctaaaaagctcttttagtaactgttttaggaagagtttctaagaaagctaaaagaaaaaagcagaagctcaatcaaatagggcctaagaccaacaattttttaataaggtatactagaactagaaagtatactcatagttcccttttaattttgctaagtttacctttgttcctagaggagctaatatggcagcacagagttaccaagtggaatggaggataacctcctactggcagtttatgattatgttaggcacaagaatgacagccccacggtagaattacacaaactcttagagaagttggtttagatattaaaaatactatagatatgaacatggattataatatttgtgatgcgatgtaatgtgcaacctgggtattaaaagagattgattgactagagatggtagaaactaacgtggtttgaaatatctcacagtatgtattctgctaccccttcatccctatctgtacgcataacgttaccaaggaaaagtaacgataaccagaacaataatattaatattagaaaggtaagcctacaaacacactaatgctctcatgaccatctatggctgaaaacgctttcggccttagatatgtacaaacacacctaccatgaaaagactcacttcaccaaggcccagtctgtgttcttctcaagcaccgtttctttacttctcgctgcaggtttatcatctccattacctaatgcacatataaatagagctattcaaatcaatggcaaacgtgaagacatattcattttctgagtgtcatggatgcttattatacatatttgtagagttgttgaagttaagggaggataaaaatcataataaatataaatcatcaacaggcggccatgaaatatccccatgataaactaaatgccagtcttgattggtgattagctaattagagagaaacaaacactacatgtacaagagatagagaaaaatctgaagtacctgttttttctgcatttccacaaattcttcctacaacaaccgaaggcaatcaaataagtcagtcttaattactagtttggaaatattatacgtagagaaactttgtaacggaaattacttgtttcttcctcaactcttcgttcttctcttttaacttggcaacttctgcttccagttccatagtgtaagcctagcaaaagccatacatcagaatattaggagaaacatcacacacgttacaaaaaggtacgtgacaaagtattttattagttatcgcccgctacacacctcatattaaggaaaagactatagacaaagagaaagctacaaggcagacttaaaagaaagtgtaaaacagaattagtcagactataactaactaactaattaactaagctaactgaataactaagcatatatatattttacataataactatgtttaataaccacagttaaacatattatactaagttataaaacagaattatgttcatagttccagtagctatatatctcttcagttaaacttctttgaatttgaaatgtagaattcaacttcatcctacgttgattaatgttccattaccttgatacaaaaccagatccttaaaaacttctcaaaacctttttcatatctcgtcatgccagatcgcaaccatattaccactctgccccaaatgatcactcacgaagttttgacacacagcacattaatagaccataaaagcagaaggttatggctagtaaattttataagggggcaagaagactataagtataacatttttgaaaataataaaaaaaatagaaactcgaataagaaaaaaaataatttaagaaaaaacagacttttgcttaatcttgtgtaacaatagtacagtctacaggtattaagtcctactcgtagatttcatagaccattaaagttggtagtgctacaaagaaggaaggcaaacggtatgaggtttggacacgttagcttacaagttatttgttcttaatatgaggttatgacacgttaactaacaagttatttgttcttaatgaattggtttgcgtgttgtgttatcgatcgttcacttgtctaaacaaaaacctaagaggaaacaccgtagttgagtcgcttatatttgaatccgaaggcataaataagaaaatcaatcaaactcaaagtgctcacctgctttcgagcgcgggacctggcagctgactctctgtttttaatcattctcctttgcctccgctcgacaactttctccacagccccactgcactttctacccctcaaaccaccattaaatacaaaaggaaccggcgaaacagatgaggtatcaccgttactcttcatcccatcagaagatatttggttcgctggggatccagtccccatagtaacagccccacctcctaatccaaccattcccatacctccaccctgaaccaaagcattactcaaaccctgatccgttatccccataatcccacccctcactccaggactacccaactgaccacccgtttgcagaggcaactgagatgcataactcacagtaggctgcttaggaaaaatttgctgctgggccaggccctggtgttgttgctgggccaagtgctgctgagtcgatctaaccccattgacgttcaaaggcaaattcgcagcttgaatggaaatctgattgttagtgtcaggaatccgattacccaccattgtcgcagcccgattcgcctgctcaaaactgattcccaaacctgtgttatgattattaacggagcacgataaatcaccaaagaagccactattgttaggaggcttcccggccatttggttatcttctcgaacaaccccagctctcaccaagaactcctccaaagtcatctctcccaaagtctgctgcctctgaggtaagttaggcccagcagctccagacccatccttggacaagtccctccaaacctcgtctactgtcttctggctcagcgttctaggcagtgtcaacgacccctgtttctgaagaggcgcaccaaccccagtttgaccagtattcgaaggaccaactgaggccatgctctggatctcctcagcgctccaaatgttcttcaaaagctcatccatattcattgacccaaagtcctttcctatgccacccactgtgctctgaaactcatcgaaagttagtgaatagatcgaagactgtctcacaaggtgattattcgccgggggccggccaccaccaccgttagccgacggctcgttgcccgtgcccttaaagttcaaattcgaccccattttcgtaaatcaaactgcaacgaaacagatcccaaaagagtcttactccaatataacgtaagaatgaaatccctgaaaatcaagtacagatagattcaagcaaagagtttctgtttatgattttagtgtacactgcaactgcgaagaattggaagaaaacttttcagactaagacgatgaaaatcaacattgcttgtacgaaattgattagatgataagttggtaaagacactcatagaccaattcaatttcagataaaaacgactgaatttacaacaccccgaactatcaccataaatataacatacacactactaaatgagaaaagaaaaaagaaggccaaaattgaaaattttacagcaaaaatagtaaatattaaagtagtagttagagacgatattctttaaatgtaagaaaaaataattactcaaaaaataaaatgcaggcagataatttaactttttttttttttttggtaaatttgagaaaaaaaaatctcgttctgataccttctttggctgcgtttcctttttctggctttgccagaatcgccaaatgtcgactgtccgtagctgctgcttttatttataaatgattaatgattaattaatgaaattatttatttatatttatatttatattttaattgtgggttgaaatgtagagacttaagacaaaggagtggggtgtctagcgaaaaaaaaaaaaggacaagggagtgggaaggcagggagggctggaaataatgaaaaagaaatggtgtgaaatataaataattgggaggtggatcacactgatcagctgcttttctaaccgtggacgaatctgaatggctgggaggttttgatgtgacagcaaccaatgagagatggctaagtgggagaatcttagccgcacacgtctcttattaggaagggtttggattcgattatactattacatagtggcgttggataaggatttggtgtaaaagtacgcactgggggtaagtgcgcactcttagaccttgcgtgtgcccctgtggcctctggtgatgttttccttggacattttggaccatgcgttattctattttgactatttccctcagcaacaaaagcttgtcgtcactgcatgtgattcttatccaattccatcgtctctaaggactacattaattttttttcattttccacaaagatataaagggaaattaacaaagatttataaaataattagatttttttttttaaaataaacaaaacaatattttatgatacatattaaaaataggactaagatgaaaactaaaaaaaaattgtaaaatggttaaatataataaattagacagtaaaaattataaaaatatttttattttatttgattttttttttttaaaaaaaaagaattatgtaatgataaatttttgttatatgaatttactagtattacatattgtcaatactaaaaattagcttaacaacaaatttacaaatttgtatttccacttcgaattatttacactaaaattatcccgattgagatgaataactctgttttattacattattcttccaagatcaacaatgattttttttctctctccaatcaatgtttagagctcaagtatgttttggaagtgcaattcgatagagtttggaccgagctagtgtggtcaaggatctgtctatttttgaatgttggagtctcctatttataagtgagaatggtcgcgatatccttttcctctactcagattggtcagtggattctctcttcttgcttcataacacgcttttttcccggctatgcttatcaagttcaattcttcaagctatttcccagttcttttcttctaccattccctttcttttaagtgaaacaatgcatttatattgtttttgcaacgtcactttgttagctttgatgctcttatcataataaaattacgtttatacccctcaatttatgtaacgtcctattagtttaggcacgctactgtattttcttaattactatattaacttttgctaatcaaagagtttaatagaaaattgtatttaattaaaactttataataaataaatgttttcataaataaacatcgtaaatgtagatatttacaaaactcgagatcccgaaatctattttttaaatataaacattatgcaatataacaaaagtgtcgcctagcgactaacaaaactaagtccatattttcctgaagatctgaacactccagatctacccgttcagatatgtacaatttttactgagctccaatactcactgttgttcaaccatggtctttacctacacatgaaagtatatttgtaagtcgacatactcagtaagaaaagcataaacataaatatataaccgacctgtaactaggtgcaaatacacctaatcacaaagtctaactcgcacccaacgcgtataattgagtctcgaacgttcttgactataacatgattgaccataatatcagcctagtcatacttatgtgatagcatcaatccacactatgagtacaactagccataatgcactcagtactttagttgtactagtgttggtagcactagttcgttctccctgaaagaacaactaactataataccacatgcactcagtattctaggcgtactagtattggttgtattagttcgtacttcctaaactgtcaatatatcccgtcgatatccaagtgcaactctatgtacaccaatattgttcttactgatatgttatctaattggataacataaatatgtacgctaaacatgtgcatatgtgcatgtgttatactaatcttatcccaattttataattaggtgtgtcagtcaacttgagtggaaaaactgctcaacaagttgaggccctaagccacattcatgtaaaataggtaagtgtctctctaaaacaattttggggacttaaactcaaaaccagaagtttttctatcgataaatagtatggcattaccctaaatatcgagaaaacataaaaattagagtacccaaaaatcacccagctggtcacccagatccctaaatgattccaccgtttcctggggttattcttggggaaacaattcaccgtttctatagaaatggtggaccgtttcgtagcaaaagttccaaaactcaatttttcttccaaaattataccccaaatctaaccactttccaaagcacctaattatagtataacaaacataattcaatcaaaaactgcatcatcaaagccccgaaatcaaaatcaccattgttgagctaagtttgagttcaaaaagtcaaacttagctccaacaaaaacaacatcaaacattcaaaaattattccccaaaacaaattctaaacattccaaaccctaacagaacaaaaaaaaaaaacaatttcatgcttttaaaccaaacttttctcttaaaattgcaaaggaaagaggagactagggcataccttgaattggctaacaaaaaccttctcaaaacttagctgaatccttgtaaaaattatgaagaaactctgaactttagtttgggttttcttgggatttcttagagcagagagagagggtgggtgggtgagtatactttggttttatttgttgtattaatcttctcgtatctgattaatcaactacatcatcaaattaatcaactaaatcataaaattcaccagaaaagttgctgtaaaagtcatcgtcactggaaaagtcattgaaaaagtcaccatcgctggaaagtcaatagaaaagtcacccaaagtatatgtcacgatataaattaaaatacaacaagttctataacataatgaataaaaacaagtaatatagaataatcaaaccggttataaattaaaatagaacaggttctataacataatgaataaaaacaagtaacatgcaataattcaaaccagttataattaaaaatagaaccggttctataccataatgaataaaaa

SEQ ID NO: 15785 - DNA, 6790 bp, Cannabis sativa
ggcataaaacccaacattattttcttaagctctaaaaatatttagttgtcgaaaaattcggtacactcgccgataaggctaatacaacagactcgtggagtaaagattattaatgttcgaactacgtaaaaaactacttatctattatttgtcgttttatattttccttaagctctagttaatcggtttttaaaaatcttggtaaacacaaacattgtacaagttttgccactcttaatctcttttgtgctcttctcactttttttatttttattttctctaaataatttaagagatttttgtgctcttcttattaactattttttactacaattgcatttgcatgcatgcatggttaggcttgtataattttaactacaatgtttataatatagggaatgaattaagaagaaatcatatttattatattatttaccttggtctcatcaatcataaaaaaagttaatgaaatttttttatgtaatttaagtatatttgttcatcgctattctctaacttaattaatcaattaacaacttttgctataacatcctgttaactatcttaacaattaatgaatcattctatatgtggtataaacttatattagataaacaatgtgctttacattaggtagataacatattttattaggtaaataacatattttaatatagataaacgacatgcaatatcaggtaaataacgtactttaaaataagctaaacaacatgcctaaaataaaataaacaacatgtattaatttaggtaaacgatatgtaatattaggtaaatgtgccttaaaataaggtaaataacgtgtctaaaataaaataaacgatatgtcttaaataaggcaaataaaaattactatcctaaaataaggtaaacggtacgtcttattaagtaaacaacgtacttaaaatacggtaaacgacatattttattaggtaaacaatatgtcttatcaaataaacaatatagtgagagtatatttggcagttcaattatactagtaaataaattataaaaaagattaatgtaaaatataattgataatatctcttcagttatgctaaaatctcttgagatttgttattggttattggttattgatctcttgagatttgttatgtggtattgtttgatcttaaaaatgtataaactaatctttaatgtatgttattgaaattattctttaaatttatttattattactggttattgattctagaaaatgtattgttgaaaaattagaaaattataattaatattggtgattgtgaatatggatccagatatacttagtaataggtaagttgataattaattttgactttgtatcgtcaaagtgttagtttatgaaagtgtgaggggttggtaaaaaatgtagattaatgggatttgatgatatatgagtttatatatgaagatacatgtcacgatccccatattcgagtatgtgcactagtatcggattttgtgagaaattttaaaaacgtgtgattaaagatcgtactatgagatcgtgctttataatcatataataactatcttgaaggttccttcacccacaatttgaattatccatttcttattataaatatcaagttacgaatttctaaatttatcttgtaagtaagtaactctaaaaatattgatattagatattataatagaaacacaatacttgaaaatatggaaaacacaaattcttaatttgcggaaggatccggttatgataaagaaagacaagttcatcatattatcaactttgaggatgaagctatcaacaagcgaattcaattatgcctagtagggaagttactgaaaaacaaaaaattagatagagaggatatcaaaggagatatgataagagtgtggaatttggagggtcgccttgaaataaaagatctcccagatgatcttttcctttttacttttcatggagaggtggatctagaaaaggtggagactaatgatccgtggaattttaaaagaaccctccttcttctacaaaggactgatggtttgtcttatattgacccttcatcttttactacttctcctttctgggtaagagtacttcgagtccctttcaaaggtaagaatgaatcaactgcacgttttattgggaatttactgggaaaatttataaaggttgataataattctctagccaataattgggtcatttcatgcgtgttcgagtcctattagatattcatcaacttattcttaagggaatgaccctttccttttctcctaaaggacctacttttgatgttgatttttaatatgaaaaacttacagatttctgtttctactgtggatgcgtaggacataccaaaaagttttgtgcttcccataatatactattggaaaatggaattcaaccaaaatgtacatatgatggccaaaaactcagagctccaaatgattggtataaatcttataaacgtgttagtcaactataaataaaggtacaagatttttaagtgagaaaagtcaagtgaccctgccaattcaaaagactcaaattatctatggtgctcctactggacctgctactacagattccttaattagtcctactttggaaggatcacatattgtccatttatctaagactatacctatcccttcagtatcgaaaagtgatgggaaaaggccaatggaaggtccatcagcaaactcaataaaaactatgaaggttacaccatctaatgaagatgctattatgcaaaacatggaggctaagaaagtgattaataaccctaccattatggatcttaagaagaagggtactaaataggctgagctaacaaagtaacaatgaatttagaattttacaatatttactttaattttatttggttgtatgttaattagttatcattatagtataggtttcattatggtgtatttgttttgcttccttttaatgtaagaaaaggccctgtggcaagattaagttctctctaattttatgttaataggctatataatattttctttatattgtaaaaatcttatattatgtggcttattttattatatatatatattttttgcttttgttaattttagccttttttggttctcagataagtcttatatggattccattaattcaaagatagttacgaaaagaaaatataatgaatgttaattttttaaagaataaaagaaatttcaattttgaatattataaaagtatataaaataactctcaaatacatggtttaatacattatcaataagtgtccaggtaatttaaaatttaaaatacaaaaccagtgttataactgctcatttattcctaatctatagacattctcatccttttcaaaattattaaatactcattgttcagtaaagtaagataaaatgttaataacaccattcattcattaattctagttttgattattagatctagagtttggattgatacattatgagtatcctttcttggaatgcacgtggactgggtaacgaaggaaaaagaagacagcttaaaaacttactaagacaacaccccgctaatgtgctttttatttcggaaagtcgtcttgaaccagttcggatggaatattttaagaaatcactgggtatctctaaaggttttgaggtgccaagagtcaaaacagaggggtctcttacttctttagaagcaacctttaattataacaattttatcatctaatgtttgtcacattgattactttgtaaggtctgaatcaaaatcttggtatctgactggtttttatggggcaccacatggaggatgttaaaaattttgagtgctctgccacgacgcgcctggattttgtgggtgattttaataaaaaatttcagatcctgacaaagttgggggaccgaataggtagggatcatcaattacagcttttcataattgtatgaattttgtaatttacaacagatggaccttactggtccaagactcacatggactaataaataccaaaatggaggactggttttagaaagattggactatatttttcaaaatgatgagtgggatagattatttccctctgctactttgaagcatttggaattttttggttcagatcacagggtattagctatctgtttgaatcctatggttacacatgatacaacaaaaaaaaaaaagaaagaggttcatgtatgaagctttgtggaataatgatgatgaggcaacacatatcattgtatcaaactaaaagggcaatgactgtcgaaatgatttagacaacgtaatagataatatccaacaatgctcagagtctttatctcaatggcatcaaagcaagtatggtgattttcataaacaaattagaataacagaaaagactctttcaaaagcttaggaacaagccacaagagtgtctaaagaatacattgataatctagaacgtaaagtggaagatttacttgcaaaagaagaaatttgttggaagcagaaaagtcgagtctagtggctacaggaaggggataacaatacaatttttttccataaaaaagggcatctgctaggaaaaaggagaaccggatattgggactttttgataaacaaaatgtatggcatactgaacaagaccaaatctctttcattgtttcagagtactatcaagagttattcacatccatatatccaaccatggagcatatacaaagaattaccgattatgttccaaaacttgtctttgaagaaatgaatatgactttgttggcccatttcacatcgaatgaagtttttcaagctttaaatgctattgctggtgagaagagtcctggagaagatagtatgtctgggatgttctacaaacaacactggaatattattggaacttctgtcacacaagctgtattaacaatgcttaataatccttcacacatcaacaaggttaattcaactttaattacattgatcccaaagcgttcttcaccaacacttccttcatatttttgacctattagcctatgtaatgttatttataaaatggtatcaaaagtgattgtgcaacgaatgaaaagattattcccaagtctcatctcaccccaataaagtacttttgttgctaataggctaatcagtgataatattttggtggcttttgaattaattcatgctttgagaaacaagaaaacagggaaaaaaggttatgcgataacgaaattagatatggcaaaagcttatgatcgtgtggaatagtcttttttggaagcaatgttggaaaggttaggatttcatcataaatgggttgctcttatgatgcaatgtgtcatgacagtaaactacaagtttttcattaatggacaactccaaggtcaagttattccctaatgtcgcttacgacatggtgatcctttattttcctttttatttcttatcataacagaaggattatcaagattactgcaatatgctgaaaattgtaatttgttaaggggttttaatatcaacagacatgctccttctatatcacacctactctttgctgatgactctttactattatgtgaagcttcaaactaatgttgtgatactttgcaaagtattttactgtgttatgaatcaacttctggatagaaagttaattttgataaatcttcgcttactttttctccaaatactaatagaggtattcaagaatattttgcacaaaagcttcatatggatattggtgagtgtcacgaaagctacttgggtttaccaagtttttacaataaatcaaagaaagaaatgtttggatacattaaggataactttaaagtgaaattatcacaatggaatgagaggctattctcgtttggagggaaggagattttacttaaggcggtagctcaatctatgccaacataaactatgagttgtttccaggtgctcatctcaattttggacgatttggaaagtctaatggcacagttttggtggggtacaacatcattcaagaaaaggatgcattggttaacatggagaaatatgtgtttatccaaggatcaagggggtatgggatttaaagatcgtcaatacttcaatcaagctttattagccaaacaaggttggagattattagttggccctacatcgctgacgacacaggtttataaagctagatactacccaagaggaactttcctagaagcaccacttgggtatatgccccttcctaaacatggagagctattttttggggtcgtcgattgctaattaaaggtatacgatgggttgtgggagatggtgcctcaataaaaatcatgaaaacaccatgattacttagaccttataatttcaggcctctgatatgtcaaagaaatatcccattaatggtcaatgaacttatcaagtcagacagaacttggaatatacctctattacacgatatgttcttggaagtggatgttaatttaatattatcattacctttaactccaacccgtatggcagaccgaatttgttggttacatatcgatatataatgactatatatgcattgtaaacacatttaatataatttcttatgtttgtgcctggagttgataatattctagaagaagcaaaaaatatgatgaatatcgtttaataaataaatggaagaagtgtatagaagcttatatgataggaagagtaaagtcaatcactgatgtgaatggtataaaattttagttagaattatcattacaaataacatcaagttcttccacttaatatgatatgcatattagaatattttatatatggaaattattttctaattaaggaaatgattttctattt

SEQ ID NO: 15786 - DNA, 6541 bp, Cannabis sativa
acaaaacaattgcgacttataaactcaccccactgtagtgtcaaaaaatccagacaaatatttccttaaatctccatggtttgtctttccaaaaataagcctttgtgccagcctgctaccacttgagtaaatgtatgtctgcagcacaagaatataaggtgaaggtagttaatttaagatcaaacatgaacctccttcaaaatgtatggtctgccgctataaaggtgtatagtatcaacggtaaatccatctgcaacaacttgcaaataataataatacacaaattccatccccaaaaaccatagtttgattaggcctcaactatatcaactatacatgaactattagataattatctacacaaaacagtgttagacacgttgattaatttatggaacatgcgaagagcgtctacattaatttttaaaaataattaattgatatttacatcaacaaatagcatccatcaatcaaaatttcaaccaaaatggcaaaaatacaccagtcataaaaagtcagtgtacaaagtaggaaaatcagtattgaacttatatagcaacacacttataactaataagtttagcttcagttattattttcaggatcatcagtcacagccaactgctgcaatagtcaattaaccctcactgatgccacaaccatacaaccagccaactttatcaaaactgtaatgatataaagaaagtgtgaggagacttcagggttttattgtctaggtaagcaagttgggtatgggacatattggaccaaatcactgacttatgtggcatttttgataccatgtcagcagtaaattcaaagcacatgtgcaagtacctacatggaggttgttcactatgttctaacaaggttgaacctattaataatttattttatgaaatctataagggtaaacctttgaagctcaaaggccattagcccagacaattaacaaactgaaaaaaaagggttagctgaatctacctttatcccggaatcatgccatctagcaagagctgtaggtacatcttcaaaaactacaccctccagttcattattttcataaccagttcgccagatatgaccctgcataaccaaaggtcagccatattcacaaaattcatgctacatgagaaacatactaccatattttcttacttgcaattgtttcaatgcagtgatcttccgatcagcttttatcatagcttccacatttgcaaccaaagctgcaataaccttctctttacctgcatcataagaggggatgggagaagcaccactaacaccattttctaagtcatcttgaacctgccacaatgatgatccaaaatcttaacattcatatcaatagagttttgataaagttgggagttctccgtgtatagcatagactgcaatttaaacaattaatccagactattcaattctgctatgaattattcagttttgaagtagaagcaacatattgatcaaaattttatgctcactttccacaaatttaatcaactgataagatgcaaaacggattgttctcatgtcaccaagtcaaatcatataacctttagcagtaaagctttatcaaacaagaagaatgttagcatatacaaaagaaaatgtgtagagttaaaaattaactagagtatcttcccatatgtgataatgaaaatgaatacgtgaaacttttgctatgagtatcttcccatatgtgataatgaaaatgaatctagtacccatggtagcgttagtaataaacattgatgaatattccacaaatacgtgcatgaaatcaacacaactgaaaaataaaattcacacctgtgagcgcagcaactctatgtcctccttggtttctgcagtgtcatatgtcgcagacaaatgtctagcaacattatcacgggcatatgggaaaagaacatcactgacaaatgatattggagtagtggttccctcaatatcaagaacaatgcaccgctgcataaaataaaacaatattaagtcaagccaaagacaaatatcttcactgtagtcctaacttaagtgaatataaaatcaataaattgaagcatatacttgcttagaattaaagaaaaatgacaatacagctgtctccaaaacagaaacagaaacgtaagaatgcataaccacaatgataacaaggaatgttatcttactcgcgatggttctatgtcattgttcgaacctgcagtccctgccttgacagaaatgtttctgttcccaccacttcctttcccgtgatttggggaagaccattctaggcccatctggtgaagtttgattgcagcatcaaacagatagtgatagcattcagcctgaaagcacgagtaactggttgaagatgagagcattcaaaaacaattttcagaagtcaacaaggatgcttcattttttttttttttgggaaagaaccctaaattttcaataagaataagaggccccatgtaaataaattcctaatataaacaaaagtaggaaataaaactttaccaatcgggtgagtacaaaagtctaccatagcattagaggagagcttttattttcaatttaattgaaatccataaatgatacataatgcatgttttggtttctaaattctatcaacttcagaaaactatgaagttaaatatctttacacaccactaattttaaataatcttttaacacacctgagtcttggcgctgatccatgagtctccccatatatagatcccatggttgcgaacaagcaccgctgttgttttcgggtaggcttcaatctataggacagatcaagataacaagaaaaagtatttcactaatgacaaagtaaaagggtaagaagtagtcagctaaatgaaaatcagctctcaaacaaattcatatagtggaggaaagccaagtcagtccttttggtaggtggaaacatgccctactgggaagtgaacatgcaggctataaagatttgaaatagctcatcaagattaatgtatgagataataaagatcaaattataaactagaaatatcaccatagctaattaaacaatatagaaacacaggccaccaaatgtctatgccaatcataaatttattagattataagttcccattgctatacatacagctttggcaagagattctgtgagctcatattcgtaggcagtgttctctataatgggtaccacaagttcatcattatacccatgcccttttattcctttgatcatctccatatgactgatctgcggtttttttaataaaaaaaaaggagaagcatttcaatatatatgtagtaggcataaccacaaaccaattataatatgaaagattattacatgtcatataaaaggtggggtgttttgttagcttgtggtagctatgaggtactagtgacttcgtttttttttctcttaacttggaaagggaaaagagaacataaaagaggagatttataaaggaggggaccctgtgctatcacttggaatgatgaaattatgttccttcagcatagtataaagcttaagcccatgttcaataaaaaaaatctatcagctcttccatgtattccaatggccattaaagatctagagccaacccttacaaaaaaattaaaaaaaactgtaattgagtatgattacagcttatttttcttaaaccttagcgattataaatgtgttcggacaacattcatatactaagtttataatatattgccatctggttatattttgagacattccatatggtctttttatttcacatttgcaaagaccataatgagacgaacaggaagaaagggcatatgcataatttatgtcattgtcaactttcagttcctaatactggctaccaacctgttataattatattttccctcttcaggtcattatttacgcaacctacttgtacctatttcctatcagtcactatgctactagttaccaaaatggatgttgaattttaaagaacatttggtggggaaaaagggcacccacaaactcttccaagaaagaaaaatatactgaagaatcagaagtatctctacatttgccttctgtgcacattaaggactgtttttttaactgaaagatatcaactacaaaaaaaataaaaaaacatactctaaattcatttgcttgtggattgatcattgtgactaaacaagattccatcccatgactatgaataacagctccagcatcacgcatttcatatgcctgtaaatataaggaaatacatttggcataaacaagaaaaaaacaaaacaaaataaaacatagagaccagaaagagatagaccttcataaattaaatcataaataatggttctagaaaaattcataacatagccgctaacgaaacgaaccaacaagaataaatcagattggacaaacaaggcacacgtgagaccagaaaaaaaaattgggagtttaatgatgagaagattatagtaactgacaaacgattttcctctccatactgaaaattatagtgtgtataattcaagaaataaggtaggtttacatcctaaactttttaacacacaaatgaacaaagcaaaaacaaaagggaatcaaagtaacaactagaaatcctattcaaataaaaaaatagacacaactagaatccttatttgaattcatgttagaaacaatgttgtccagcatgagcataggctgcattgtacctcgtacttgagattccttgatctctttccccgcaatatcaatcgcctcttggctttctgatggcgatcgaacagtcattagcagtaaactttctaggactccttaatttctctccaaccaaaattaggaattatttgaataatattttcattactgagaatgaactacaatactatctacttcaagctataataaggtaatggactttggttttgataattcttttaaaccttaaaccgtaatagtatccactttgcagcattctttctcgcattgcaagagagaataaagtgaaaaagtaaataaataatttatgacaagaaagcaccataactaattgaattaataatgagttcagagcagtgtttccattgtgcagaagaaagcactccctctacacctgcaaacaatcttaaaactcaaaatggcaccaacagaggctttacattatggctacataatcacttatgagcgaaatattgaatcacatcgggctcttattcttaagactaatttaataagcaagagttacactcacggttaatcaatgggtattatgaagataagttcacccgaagaaattagctctcacaacaaactataagaatgagtacatagtgatttaccaaaatcaaacaacacactatactacctattgggcataagaataataagctggtaccttcataaaaagcggaccacaatcagaacatttgggaggcttatgtggatatggctttggagatggagcagacaacacagatccattgggagatattatatacatgtcttcaggtaccattctttccttctgaacacctacactcgtcagaaagtacaaacaactgcgagatttataacttttccatgtagtcaaacgaaattcctatctgagcattaaatgcaaaccgagctaaaatactacagtttcaaaaactcaatccggtgcacagagcaaagcgcaaacaacaaactccacaaaccaaacagcttagttatgcattcgcaagctaaaataatcccccaacatactcaatatattagagctcacataacagagtatcaaacccataactaagaaaacaaacacgcatgaaaccaaagttcaaccacaattgaataaaaaatcacatatcattgagcctggtaaaacaaaaatccataaatcgaaggggaaaggaaagtaccggaaggagacatgacgattagctgttggggcttaggaatggaatcatcgtggaccttgattgtgatgcttccaccagtccctgagacccatccgagagtgtagaaatggcggcacaggtcggataacagaaccctggtgtcattcactgccttgctctccatgtacgcctgcgatgtcgtccccagcttcactccgtttacggccgccgccatgtttgtctatggagataaagactagtttttagagggagaataactgaagaaggctagcttgagagaatggttgaaattttgtgtaagattttggagcaaggaagatgtgatgcggttactctccggtgactgaaagctgggttctaattggactgagaaaggaatatggctggggctgtcctctgtattctgttttgtttgtttgtttattatatatcttgtcaaaattatcactatattctggtttcatttaatgaatttttcctctcaaattatgatttttaaatttttttaagtggttaaatttttttagacttttgattaaatggaagtttagagaatataatttagactatatgatagatattaaaatttgaaggacacaatttaatagatggataattttcatatgagtaaaatttaaatagaataaaataaaaattattaaatttaata

SEQ ID NO: 15787 - DNA, 5140 bp, Cannabis sativa
  modified_base (38)..(64): a, c, t, g, unknown or other
ttttagaaagtttatatttaggatgtttaaacaacatnnnnnnnnnnnnnnnnnnnnnnnnnnnaaaataaatttccaacacttattagtgactaaaaatgaaaatttcgatgatatttggatgttaaagtcagaaaatgaggttcaagaattggagtgatcattagggtagccaagaataccaatacacctatttagaatgttaatcgtagaaaacatcaactgggtaagtcttaaggcatagttccctttggggtcagttgatggagtattataataagaattatcctcacttgaagaatgaaggcagtaatactcatttcagtttggaatgtttatcatcaatgaggtcgacgcagtggatccatcgattataacatattagcttttggtaataactctcatcattacgtgtttatgaactctggagctacacacttatatgtggcatcaaagatgacaaatcaactgggcaggccttgtgttagacacaaattaaggcttgaaacctaattacccgtggggaagttaaatatctccaagaggtaaattagagatacactggttagaatggataaatatatgctcatgttgtgccatgttatgacatattagttaacacgatagttggtgtacataagtttacacctcgatattgatgatatgtgtcttacaattctagaaagagaaaattgatattttggcggtacaatcatattgccaaggctcggtaaaattatagtactgaggatatcaaatgaattgatgttataatggtatgatcatagtgttgggtgatacaaattctaggaagtatgaattgatgatatcatgacggtacaactatagtgtcgggttgatattatggtcaattgtacttataatgtggattggtactatcgtagcaataagatcttaatgtcgattcagcagcataagcatgatgctggttaatagtggaggatagaaagttaaatgttgatcttagtaaggatccttcacagactttgacattatactgggatggacttttatccaagtttatggctaatttaacagtataacaaagatagtaatcttttagctggtgggcgaggaaccatggattatttgtggaattaatttggggttcctaaatcccaattatattcgggttgaggtttagaacctgattacgagatgggtacataagatatctagcggtaataatttatatcggcagatctgaaatacttgggcctgagaatgttagtatggtcaagaaattcaaggatatgtctccctaatgagttatctagatattttacccagtaagatcgattttgttattgggttgatactaggaagcaagagttacatactgattttaagaaattagtctagttagcaagcaaaataggcacttgtagttaagtattgatgacttagttgaataactttaagaaaacttaacctctttccgaaattaccattttcttagagttacatcaattaaagactctagaggaagatcttttgatgatggcattccatattaggtttggccagtatgaatgtttagttatgacctcgaaatactagtacttcgataacttctataagtatcataaagagagtgttaaatggtctcctcagtaattacattatggtatttatcaaggatacccttgaatacttacagtcaggagttggtcatgagaaatgtttgcgagtagttttataggaagttaaggaccataagttttgcattaattcaggaaagtgaggattttagttattattagtagactttcctaagtcatattagtagcagagacaagattatagtagatctgggatagattggcgcagttagagtttaactgaagtattaaattaagaaacctccttgaattagttgggctttactaatggctattagcggggttatattaatattctacagtggtaacagaaagagccaaggatggttaagagtttgtgtggattgatagggataaaagtatctttgctacatctaagtaatgattagtcatgactcatcattgatttaccattggaacaagcaaggttcatggttatttgaacatctttgttcaaaatctagagtgtgaatcgatatatgttgataaagtcttcaattataaatttcaacattaaaggggtatagacagtataattcaacctgcaactggagctcaccatagtggtggttgcaataagattttgtaatttcattacgacgaagggaaatgtcaagtttatactaactacaagagtctcaagtaattctttgccaagaaggatttaattatgagactaagagggtagttagagatagtcaagggttatgactatgtgatgtattgtcattttagggaatttagtattatagttgatgccttaaaatgggaaataactttcatataggtataggatgatataatgctttcttcaaagttaattgctgataggataggattgggttaagtgttaagttgttgcaaacaaatgtagtgattgaatacttcaaaaaaaaaaatctattaaaatcatccatggtatttgattgggagaccacaaagttatggaattcaatcatgttatggtgaatcatctcagaaatttaacgtccttcctattagtggaagtcaggtttaggacgaagcagtgcataggagtataaatgcaaaagatagtcgatcttcatgaaattatgaggttcattgttttgaacagtgattaaagttcacttctaagttaaaagtgaatctctagagagccacaagtacgagattgagtttggtacaactcgatgtcttcaataaatggtcagtccagagaggtggcgcaaatattagaagatatatatgaactggtgctacaaattccaagggattatggaattggatttctactataactatgattagtagattattacaggggtgactccctgtgaataatatgatataaagtattatttttcataatcacttcagcagctaatgatattataatgagaataaagttgaaaacaatacttttctagtaggtagaaaagttatatgcatccaaagtgtaggtgggaggtgttatctcacaagtctcaccaaataaaggtgtggagtgctttggcagaaaaagttatgtagattttatacgtgagtagaaaatcatatcttacgagtctcacaaacctgaggtatgacatatttcataagaagagacaaggtaagacttgagattaaatagacaggtagcatacggtgtaaatttattcccatggtgttagtcatgtattaatgctggataggtatagaatggcatatgtaggggatgtaggatcacatacctacagtcagatacatcatatgaggaatgagtttttttagagtaggacgctagactccataatacaaagttaggtggagaagaaacttgggaagtgaatccaattagaggattcattatttaaagatgttcagattcaatttcgaggacgaaatccttttaacgagaggataattgtaatgaccgcatacttaaaacataaaattaattgacaattattattaattatttataatatctaattatgtgtgtatcatgtcatatgggacctattcttaaaaaataggcgtttgatttataatttatcaatttcagggactttattgaattttaggtgtatcacagaggatatacatgaattttaatatttttcatgattttatacccagtaacggtggaaatacgatgaatggctattttagtcacatggatacaattttgtgtcaagtatttgatggagtattattattgagtgttttagaatatcagggtaacggaattggactattttacccctaggtttaaaaggtttattagcgttaaagtaagggtattaatgtctttttctacttaagttaattctagaaatttgtaattggatgattatgttagaaagtaagtgctatgttctgaagttagtagattaattaagaaattcaagattagacagaaaaccttctctctctcctaaaacattatctctttctctcaacctaacctagaaccaaagaagggaccaactttcagacttggattcttcaccaatcaacaaggaaatagtaggacttaagtgaagaatttctttgtaggatcaaaggtaagctctagttccttttttccttgatattgtaaataaaagttttgtttggttatgtgacttttagaaatagatgttatccgagtttggagtgtataaggatttttttctggggcaaaataaaagtgtttgggactggtttgattggttttaggtggctgagttgaaagttgaacaagtttgagttcatgaactcaaactttgctcaacaatggcaacttctgatttcttgggttatgcttgttgttgcttgatgaaatatgttcattatggtctatttagatgttctagaaagttttgtagcgtttgagtttgattggagcaagttgtgggggttggaagatagaaattttttgagcatttcttctcagacaactggaatttcggttggttcagggctgttccaaccggaattccggttggacaatatcgggaaaggccgattttcatgtttgggccataacttctcgctcgggtgtctgttttagacgttctatataccgtttcgaagcttgcgatgagctctactatatggtatatatttcagagtcaaagtataaattttattttagggtgttttcaccacataatttggtagaaaaccctacattctttttaggaatcaagaagtgttctggagcaaacacttacaaatttttatggaaatgtgacatagggccttcgattagcagatggtatttccactcagattaactggcattaatgaatccaaaattggggtaagattagcatagaatgtatatgtatatgtgtatgtgtattatatgcatgttgtttatatgattcatatgctaccaacactagtacggtatcggtattgagtgcatgtggtacaacatatgatgtttaaaggtacaattcagtgttaccaatactagtatagttaggtacgtagtgcatgtggtacaacacttggtggtacccagggtacggttcaaaccctaccaa

SEQ ID NO: 15788 - DNA, 5402 bp, Cannabis sativa
gatcgatttatgcacacccctatggccattcatctggacttggcattggcccaacaactaattcataagcagctacaaaccgttctttcttgtaacattcatggataaaatcataaacagttgctctgatgctccaaatacatgccaaagcatgttcacaagggattccagccaattgaaactttctgcaagtacatgttctgtatacaatatccaccacacagatcacattattccctggttaatgcacttaaaacttgtttgcatcggccctttgaggataacaattcttagtaatttttttaagtttctctataatctgcataattctatttgccaccggcactgggtgcttccactttgatatacttactctcttatcattgaacctacacatcatccagtacctaatcttctctaacaatgacactagaggcttatctcgagcacacaatataacagcattgaaactttcacaagtactattaaccaacatgtcacatttcacaccttctcgaaaataagactttgtccactgagttggtaacttaccagacaaccaagcaaatgcagtgggattaacatccttaatttcttgcatcctccttttgaattcttgaggagtggttgccttgcagccgcccatggtaattgtttcattaataacccaggaaactctttcttgaagttactgtgcaaatgtctaacacaatttcgagctttggccccctcccatatttctgcaatggctttttctaggcctttttgtttgtcactcatcattgtgaacatggcagggctgtcaacatatagatcttccttcaatagatgaaaaaaccaagtccatgtatatgtatcttctttttcacaaattgcataagctattgggaacatactgttgctcccatcaattccaattgttgttagcaacattcctttacaataccctttcaagaagcatccatctaggccaataaaaggcctccaacctcttcagaatccttctttacaggccttcaagcaaatgtacactctctcaaatacccttttctcaccctctaatcttgtcttcaatatggctgtgctacgtggattagttgataccaccattttgcaatagtcatctaatattctatatttctcttcaacagatccttccaataatttcattgctttgttctttgttctgtaagaagtatgcctactaaccatagaaaatttggtatcttgagttatttctctaaatgccttaaaatccatattcggattcaatctgaatcgttccaagaaatagtttgctaaccaagatgagtcagcctttttattattcaacaccaacgggcattcgtgcgtttcccacaaagagttcaccctaaacgttcttttgtcagagagaacatgagcatagaccatccaagggcagccatcacatttgcatattgccctcactcgatcagattcattggtcacatacctaaaatctctatcattctgaatagagtattccctaatagtcgtcctcaacaaatctatactgccaaactacatataaagtttgaacttgaagtcttcccactttgtctttggattatactctatagaatacttcttcagagtagtgtcttcatcatcactacataagctagttaagtcttcttcactttctataccatcatccacttcgtctgtctcattgcacaacacagtcacagatccccaccacctatttggattggttggaacatcaacattcttctctgcttctatatcttaagcatactcttcttcttctagttcaaaatcttcttcagcttgtggttcttcaaattgggtttgtgggacttgttgttggtcagcttgtggttcttcagtttgtatttgtaggacttgttgttgtacagcttgaatttcttcattgaaaactacattagcagccacatgtcttatggcatctatgtgataaatacttataaattagacaaaacaaattttatgaaatcacacaatgaaaccacatacatgttaagataaaacaaacaaggtcaaatcattaactatgcaaaacataaaatgaaatatctctttccttcaataaactgtcacagaagagaagatgattgaaaaaattaaaaacctatcaaatactataaattgttctgtttcaaaaaaatatatactataaattgttcaatctttgattaaatgattattataatggagttgaatttattagtaaaaagcacacatataaaataatcaattctacagtaacaatataatagaccccactatagaggaccacttgtgtaagattcttaagcaaatattccaaagcatgtacagaactcacatggatttactcaacttttcacatactttccacaactaaagcttattaaatattgaaatcaaacaatgaatcaatagttgactacaataaataacaaaaaaatacacatagaattttacttatttcaacacaaagcacaaccccacaaaaatataaactagaataatacatattcctcaatacataagacccaaccaaatcagtacataaccctcaaatcaaaaaaaaattaaaaagaagaaaaaaaaaccctaaaaagtcattttctaaacaagctcttgaagtagagtaactaaccatatattggggctccttcctctgaaaaatgatgtatcggcatcgtcttaaactactccctagttggtagactatttctaattttttttaagctttacggcctctttgaatgggatttcaaagttgacgaggtttgataactaacatatcttacaagtttaggcttcgaaaatggggttgttgaccgagatttttggcaaccaataaattagcagaataagaagagctgtagaaagttaatgcagatgatttttacgtggttgggggcattaatgagccttagtctacaagtcttttttatttatgagagtgtttattacaaagaatgttcttggtgaatctctctcgtctttactctctttgattccttaatcaattttttgaccccctttccattctgtctatgggggtatttatactgtttttctggggggatccctaggaagggatcacttgtctttctgtgtttgcttcttaggggtacatgctcctatcaaacacaaaataggaaatacatgacctatatcgtaggtatcttaaggggtaggtggatataatcttttatcctctcttgactgatgtgattccacataatgtagctgtcactagactcatcgatcgttgtgcaatcgcctttaaaagggcttacaccatctgtcatatcttttatggaggttccaatacgtttttccccatgcggcattaaatgcgaggtgatcgttcgaacgatctctttccctcccagagatgacttgttgtaattctagcctcccggaaagtaaacacgtgctttgtgctctccttcgggaggctcgctccctgagatgcacatccttccccaagacttaattgatttttgtaagtggaaattctcctaaatccacgtggcatccttacatgcggccacatattttgaaaaaaatcttaggcaacatttatcccctaagtctcatttagtgaagggtaaatgaggcttgtttgaggcctccgctagctttgtttacgtaacggcacgtcccctaggcgcttgggctgcatttatgactgtcatcattaatatttatttccttttgcaggcaacgattcgcttcccatccattgagagaccaacgcatttaattcgggtgttagagaggtactcaattgtttttaactaccctggcacccattcaccccgtccattggatcataatttttccttcattactggagacaaattacgtcatactttgataactttagtggggtctgttttgctaatgttgacctccttaaaatcttccaatggtttaatcatcctttctatcccaactcgaggatctaattcatcttcctcccaagttacccctgttctagttggatgggtgcttaaggagcttcttcaacttcatctctggccataaaaactgatatggccgatacattgtaacacttccatgcgcttttctgatcgccctttattacttcaacacttctgttgtcacatgggaatttcatgcataagtgtttgaaggaagtaattactctaaaattgactaagactagcgtcctaggataggcaatgggacagtctactactatgaacatacaatgcttaaaagcgaaggtagtagtacttccgactataccccattcaaagtaactgggagatggttcttccttattagcagtagaaaatccctattaaagccttaaagttggatagggcatggcatcaaatcaggtttagttaatccaatttctctgaaggaaaacttgaacagtatgttgactaagcttccattgtccactagcactttggacactcttttgttggtaatataggcttcaatcactagtagatcgttgtttgggaggtgtatgtgttgggcgtcctattctgtgaaagtgatgggaaaattcatcatttgcgaatgatgagttggtgattgcactagggcactaactcattcaaatatctcttctgggcattggaagtactttcggtaatgtgcggtcctctagagatagttgccatgtagccatccacgagtggcagagccaacccttgtgggtatgggttccaaggtctagggacaaggactgccactgtagcttgcattttaaataccccatgaggggcctgaatggttggggcttgcatcaccggagcggttagagccagaggtggtattttgggagcttgaagaaggcccaccccctgtagaggagttatagctccctactattcgagaatgacgagctgtttgtgagctataccttgcctaagatagattatgaggaactagacccaatgactaataagatggtcaacacgagccaaagtttatatctcatcttttaaataatcacactcattgatagtgtggccaacatcactgtggtacacgcacctgttactttggtctcttttttgcttccctcctttgaacatttgaggtggatttttatagtggaccatattgtaggtagccttataaacattctctcaagtgtcgattaagttggtgtatttagtatattttggttcatactgacttcttcctttctttggagcctcactctagctctatcttcttccacttttcttgttatgcaaaaagctcacattcaattctagggcttccatttttgattatccgggggtggcacttgatgtcgcccaattaattacacgacgatcgcggtagtaaacgggctatgtcatatccgtagggaggtaaattaccactaaagattaatataaatagaaaat

SEQ ID NO: 15789 - DNA, 3896 bp, Cannabis sativa
cagttccccttcagcatcaaaattttgtaatatcttggtcccctccaggcttaactggtttgaaattaaatgtagatgccgctgtcaaccaagacaagaaaatactaggggtgggtgctatcatccgagaccatcatggcagtgttgtagcggctatatcaaagccagttcaaggttgcttcaggtcggatgaaatggaagccaaggcgctatttcattctctcaattgggctatgcaattgcagttacaccttactaatgttgagacagatgcattgcgtgtttcatcagctctaaattgtccatctaggaatttatctagttttaatgatttaattatggatgttagttatcttttatcctttttctcaggagtaattgtttctcatgttaagagaaatgctaaccaagctgctcatggtttagctaagtatgctcttgagttggatgaagatgtctgttggatgggtgaaatcccaaatcctattttctctgttgttgtaaacgatatgcagttttaataacagtgaaatttctcaaaaaaaaaattatatgaagcactattttctctatctaaaaattaattttttacattttttttttcttttttacatttttacaatattttacaaaaacaattaaactatataaaaaaagtaacaaaaaaaaataatatccaaacaacatcaaaataacagcaaaaaataacatacaaataataaaaaaatcaacaataaaataacaagagtataatataaaaatatatcaaaagaccgtattttctgtaaataaaatcataaaaattgtaaaaatatttaaaattcttattttttttaaaaaaaaaaaaaaaattatcccatgaagtaatttaagtgttggataactttatcccatccctcaaatttttaaaaatggcccaaacatggtatggactaaatccaatcccacctagatctccaatgcaccaaacaaggccttatggtatagcaatcatcctcttcaggattaattaacctatacaattgaccagtttcaaatgatcccaagtaaagaaaatagtcctttactatttacaaacataatatatgattcacatctcttttcatgttttctttttatacaaaaaatctgttctttatatgtacataatcaacagatatgtttatatagttaactaaatccttacttaaacaagatgtgaaaactgtaatctgaaacaagctttgcagccaacccaatcatgtccattgacaaagaattatggctagagagggacagcaacagcaccaccacacaacaatggcaaatctaaacggcgggaaacaaccaccccattgtccatccaaggaacaaaccggcaccagcaaggcctaaccccaatgcaaatgcaacaatagacttgtgaatatcatgctttggtttgccttgccttttctttccagccttgtgctgatgatgatccttatgtgattgtctactaccacctttgcagggtgccttttctggtgggaaaagatcgacgattggttggtttttgttcttaagctgaaggcagatgttctctagctgcagcagttggagccattgcttgtaagcaaacagttgagacgcttgtctgaaaagtagcgtgatgatgtgttccttctcggtatatgcttgctttgcagcttgctcggcttccctagctcgtttctgagaaaggcatagtgcttttaagagctgagctttggttttgtcattttcggtatcatcttcagcatcatgcctgttgatgctggtggtactaagatcatatgaacaaggacaatttgtaagtgaaattgaactttctaaaaactaaaacatggccaactagttgtatttttttatgcatttttatgcacaaaaggtaaggcaacagaactgtatatggtagtaatgaaaaaatagtaacaagtaccaataatctacacagcattacctgagagtttcatgaggcgaaaagcctgaatttgtgcttcctgaagaatactcttgactggagaatcttgattcagtcatccccgttggatctaaaggcgaagaaagagcatcatcatagtcagaattctgtgagcaagctgatggtttctgttgcttcctataattcttagcacggggtcgtggaagatcacaattctcgatgtgctcaagggacttctgagcaaccaaggaagccaaatcatctttaccggtactacgccaccatggctcattcttatcaacaccatcccagtgagattcataatcagaaggcagtttcttgggatcttgagaaaccaaattgttcaaagaatccaaactcatataatgttcatccaagtaccataaatctctcacatcctttcctgcagctgtttttcggggactaacagcctttagttcctggattttagtatccaaaccattttcattacaagtgacatacaccttcctgagttgatccatagaacaattattattcttagcaataaatccttccttgttttgtttcttttcacaaacatcattactcaaaatttcaagttgagcctccaatgaaattctctcctcactaacaaaattcttgtgatgaacaaagttaggttcctgattcaaccaccaccttcttctaccagataacacatcataatttgcaaaagggtgcagatgatcttttgcagcattatcaggggaataatcgaactctgacttcgaggaacacgacgacgacgtgcaggaagaatacttttccctcacatcgtcgtggaagtagcaacggcgagcactacgtttccatgtagttcttgcttctgctgctgccattaattacttcaacaataggcttgtgataaattctgcagttacaatataacacagcagaaaataaggtatgaatccttaaccccttttttggttaaaaaggaatcaaatctataaaaagtaagcaatattaaacaaccatgaagaatcatcatattaatatacctctattatagcatcataattatgggataagcatttggggagcccctatgattattatcatccaaaaatgacctgattccataatcaagtaaaagtaaggcaacaaaaactaaaattacacaaatcaattcatatgggtccttgataagtaccacatttttacaatcacaaacagctttctgtgaagaagtgtttgtcatgttgttataaagtacaagagaacaacagaacaatccaaagaaactcatgaagcaaaattcttaatgacccacaatcataatcaacaatcaataatctaaattacccatgagaaaacatttgctgatccagagtcttaactcataaaagggtcaagattttacatacccaattaggttctgaaagtaagggtttccaaaacacagaaggaatctgatcctaaattaagactttataaagaaaataaacaaatcccagttcaactaatttccccaaaacagaaaacagttagttaaaatcaatgacaaagaagcacaatccataaaattatgtaatcaaaaatagaattccaaaacgaaagaaaaaccacttgaaacacatgatatattcgaaacaataaacataagaagaacaaagaaataaaaaaaaattataaaaaattgacctttttggtgatatgggtattctgaattttcagtatttcaaactccaaagatggaaaaactaagatcaaaatctctccttttggtctggggcaaactccattttccttctttcttggctcttacatcactgacatctgttaaatattatataacatttctttactaaatttactcactcagataaacttgtcagagaaattataaaggcttgaactaaaaattgtagtacataattttcaatttcatggccagttgctttcaaaaaat

SEQ ID NO: 15790 - DNA, 8511 bp, Cannabis sativa
tatatatatatattattattaaagagaattagtgagaagttgggttgggagattcttgagaatatatatattagagaaaggaaaaaaaaaacgatatgtgctcaaatatttacagtaacattaataatttttaagaaaacaatgtcatgcaataggcatgaagctaccacctctcttaattacttaactcacgctctctcaagccaattggggatgtcaaaaaaataaattaggttttttttatattaaagtttttacattttttttatatgtatagtgataaaaatttaaaaataatattttgaaaatataattaagttttttcaataaaatattaaatttagtatcttaacaaatagattaagtatatttttgagaaagtagttatgttgtttaatacataatagtaaaaatatacaaaaaaaatagtatttttaaaaaataaatttgagattttttttgtttttaaacctaggtggggccttgggcgtgagccctactgccccacctttgagccggtcctaacttaactcatgtggaaaacctaataatgttcgtttagagcattgctaccttaagttgtttaacactatatcgatgtaacaagttgtaattggttaataaatttttatattattaattaaattaaaatgtgtgaaattcgatattaaattgcatcaacaacactacgtcacatattatggtattgatattgaacccatttcatatgatgagagtttgcgctgctttgctatgtgctatttatggtgctaccatagaaaatactttatttgaagatgataatgatggtgcaaatacattacgtgtttttaacccaactcaaactgaagaaacttattcattaatggtcaccgctaatcgtttttgtcacatcttatagtgtttgacaccttaaaagtgcgacatttttcgtttatttgctgtagtgattgattgattaataaaaactaaaaagctaaaaaaaaccttgacttttgtggctcctaattatgtatatcgtatcttactttctttctttcttccttccactctccaccaaacttccatggaatcaacactgttttagggggccaccccatatacataaacatatcaatctatctaccctacctagctagctcctgctggcttcccaagcaacaaattttattcatacatgtacatcatatatatatacatgtacatacatattcaaatgtataatgtaatcatgtcctgagggccggcccttaggtgaggtaaacaaggcattaaatattaaataaaaagaaaattattatcaaaataatattcaatatatatagtagtaaagactaaagtgtgttatttcaaccaatagcaaactcatatatatagcaactaagggaacaatctaaatcgcaatcaaaacctacatagtaattcaaactgtaaatttgaaataaaaaatttaaaaataatatataaaataattctcctaaattaatatccgtattaacatctacatatattttaatttaataagtaactaatataaataacagctaaccacgaagtgtacaatttagtattaattaacttaaagttggctggaaaagctatatatgtgtgtggggtgtctgccatgcatgcatgcatgcatattcgatcatgtagaagagattagatgtactactatagcaagctagctagtggaagcttttttcaaccataaatattctcatctcatttcttagaattattaataaccaacaaactcatcatatcaaatattattgtactgagagaaagaaaaaaaaaacataattaatactaagcatcatgaacaaagagtactcgaagaagagtaaaacttttctactaaaacaaatgcattcgatggctcaacaaggcagtgttactactactaatagtaatattagcatccccaccaccaccatcgctggtagtcatgttggtgttggtggtgctgaaaagaggggacaatactctcctgcatatccgccgaggtctcctcagctgatatcaggagaggagatgattcatttcagccacccacaacaccctttgtccttgcttaacctccctgaccgtttcacctgcgccgcgtgtaaggagcgcggtgcaggcaacagatactcttgcctgcaatgcaattttcagctccatgacttctgtggttcagctttcccttctatcaagtctcattacctccactctcagcatcagctcctcctcttttccaaaccaggtaatctattatactatactttatatacaagtgtccccatatatccccaactaagaaaaatttatatcttaattggaatctatcatagattactctaacttcattacttaaattttttgaattgttgtacttaaatatgtatctaaatctttgtttttggcagtaataatataaaaaaagttaatattttgttgcaattagttacgatctgttaatttttttgttgttaaatgatgatgtgataacatatacgtcacacaaaaaaaaatatttaaaatataaattaaatatattttgctatttcattattttaacaacaaaaattcattgttcttacttaattgtaataaaatattaatttttgtactaatagggttaaaaaattggatattaaagtgaaataattgaaaagattgagcatatatatattatattgagtcaataaatcctataaaaaaatcttacttttagttataataaaataataattaaaagttaaaaagttgtatataattataaattactattcctatattatcactaaaaggtctgtatctaaaggtattagtcataaaaattataatttattgtgattaaatatattactcatgataagtattgttaccaaaattaaattagtaacagcttgtatctaaatactgtattagcaactttttattgtgataaaatttgtcactgaatgtacgtttcttatgtagtgaatttttttacacatgctttttgtgcagtgaaaggtggtgggattgtgcaatccaaatgcgatgtgtgcagcaaggcaatccaagggtctgcatacagatgcaacgcatgcagcttccaaatgcacccttgttgtgccaacttgcctttagaaatgcaaaagttttgggttcactcacacactttaaggcttcttccacccaattattacaataatagtagtgacacaacaacaacaacagcagcagcaacaacaaacatggcgtgtggcgagtgtaaccggaagaggtcaggcagagtgtactattgcaccacttgcggttaccatctccacgccgtttgtgccaagacctacatcaacggtctccgcgaaaacggccacaaaaacgatgacaagtccaacaacatgctcggcacagccgcccgagtggcttctcaggtggtctttgatttctttgggggtcttatagaaggcatagccgaaggtgttggccaagtcattgttcaagatgttgccaagggcagatccaatactcctactactagtactagtaatgctgccaatggaagatcatcttggaataattattaataataaccaatattatatatgtattattataattataaatcaatccacatttctagtttatatgcatgccactatataaatatatatgtggatttattaatgatttgattaattaattagcaattcatataaatatatatatgtttgtgtgtatattgtatatgcatggcaggcttttatctccaagaaagaaagaaaagaattagtacaatatatagtggaggatgcttgcatatgatgtatagtgtggactttgtaagtttattcatatatttcatgtgtataaatgatatatgtatttgaaaagtaatgttgtgtttaattacttttactgtgttgtgtttctgtaattggcttgaaactctctttcctacaagtaaataacaacttgggctttctttttttaacttatgattattaaaaaaaaaaaaaaaaaaggcaaccaactttcccttcaaccttttctatttaagtgtaaaaaactttaattattgagaattaattttaaggtgatttgccttttacgaatatgaatcataattcttcatacagaatcaacaacagttcacacgcacgttactatttcttgtcttttgtttgtctccttaattgcttgcaagacagataaatgattatatcaatttaagctaaaattaaaagaggggatctcaatgattagagaagtaataacacaatatatatatatatataatacatgcatgattaagccatctagaacagatactttctgcaataagagcttttagtatatatgcattctcaatttaattccaaatgatgccaaataatcaaacatgccaaattggacccatgacatgattcaagtgccaaacttgttacagccgagtccaacttatttataacaaatgaaaacaagtgtagaacaagaagtaacagatagacaaataagagaaaaagaatgggcataagaagggtataacagaacggtctttgcctaaatatttaataataataaagaaaaaaaaaaagaatacacctcctaacatatacttggaatggaataatataagcactattcagttatatcacagtgtcacttccgtgatcaatctctagatcaactttacagtgacgaaatcgatacacaaaagtaaactcggggcatctctatatatatatttatattatatatatatccataaaactgtaaacgaataataaaggtgtaaagtaacgtagtgaaaacctttaacaacagtagaggacggcttatgcttcttgcttcctttccttctttaaccacttgaccttctttccccattcctccattttaaccttatcatctaacaaatagtatacttctaacatctacaactcccaaaacacgaaaacaaagaacaaagaaagagtcacctattttgcttgcaacgaaaatcagctaaaagggcatacattattacgacgacgatcccaaatcttacgctccaacaagcatcgtgcttgactcgcatctgcccacgaatggtaatgccaagaatgacaacaccgacaaattaggttccaactttagcattgacatctgcaaaaatcacttcttgtacacctcaagaaccatttgagttttttgacgaagagagcatagagtatagccatctctctgtcaggcagcccaaatttgtcagtcactctaagcttaatccagtactattcttattaaatattaaattgtgccgtaatccaaattctcccacttgaagggggcaacggcaccaatgtctggaaggcctcgcaagaacaggcaaacacagacacagacagcagcaattgcaagcattgaatgaacatacggacgctgcagcagaccttgagaagcgggtacccttcgataatactttgttgctgcagctgcgcacttagcacaagatctcctactaccatgttgatattcagtactcattgtatttccaactgttacagtgatttgcccattcgttctgtcatcaagtttcctcgccaccagcttgttgtatgactgattgtttgtcatcacagcatatgcatatggagactgaccgtttgcatcgagaagggaattccaagagttcaagccaatctacagtagacgaaaaggtaagaagcaattactttttgaaaacaaaatttagaatatcttttgttttaacagatttaacggaaactacctcctgtggatcatttgtcaatgcatcaatcatttcatctgaagatgacatacaagcagccaaatggagaggagtaatgtagccaggcccaacatgatttggtggaaaaatatatttcttcgagacaacatcagagccaataactgagtaatttatgagcaggtcaaccatcttcttacacttcctttttactgcacgatgcaggagctgaacctcagaaagcatctccactgtctcccttgatagctcattctcatccatatttctttcaacaagtatgtccagaagtgttttaatcaaagaagaacagtttctttccacagaaaatgtgagcaaaaatttgaaacgtccgagtgaataacaaggaccatttagaaaggatgaggcccttttgcgttggaacagccaaccgagttcatttaagaagtgaagaacttcctcctttgaactcggtcgcccatcatcgtgattttcatcttctgctatgacttcacttacttttctctccccttgaaaagtagactcaagaaccttcaactctttacagatagaagcatcagctattatcactggaaagctattgcccttgaaaccattttccacctgttacatatattgacaaggttcaaaagtggaaaaaaaaaagatagaaactgtacgttttacataaagggtacatcgaaaaaattatcagagttctacctcaatgaaacagcggccaaacaaactgggagatgcatcatgagttctaaaaccacacaagcttatctcctcatacatggtgccttgattagtagataccctaacctccattgtcgtgtaaacacccttgtcagtgcaatgaatcctacaataacacaaactggtaagtctataaactcgcagaagatattaacaatgcaaatccacaaaagcagtctgtacttacttggtgcctagagtgctcagatttcttcctctcaatataagggaggtttctcgcccccctacaacagccaaaggtgtaactgagataagctctggtgaactccatgtcttccatgatttgcacagccgaaacttccctgatgattgatttcacacaaattaacatcaaaaagttagcaatcgtctgtacctcattgattccacaatcctagttctcaattgtaaaatggtataatccagtcagcaaatgaaatgacaaaaagatctaaaagccaccacttcagcttgtccttaccgtctttatgagatgctaattgtctgcctgcatgcaccaaaaatcttccatttctccaaaaatcagaagctgaactatgtaccaaagaactgagacgttgaagaaggttttcttgaagctgcacaaatttcacaatcattccaagtgtcagttaaggaactataaaactactaacaaacttgctatagtatcaactcacttgttcccaggcagctgatggcattgaaacataaactgatagaatgacacatccaggtcgtatgtagctctccatttctgagggactattagaaagccaattgaaaatctgggtggaaaaattgttgaaaagagttaaattaatactagcaaggatgacattatagtagtggtagctaggccaacaattagccacaaactccgcacctgtgtcctcaaagtcccagggaaatggctaggatccttatcgaatagtttaaacaatattcttccagtgcgatcctgttaaaagcacactcattaattcatattgagttaaaaaggtttatcgtaaaagctaaacagatttaaatgattacaccagtattaagtcgatgaaaacaccacctggacatcagagttcaggctagaaggtgaatgatccgacccagaagaggtgtacccagcttgatgaggaacactttggatggaagcagcttcagttcctttgttggaccctctaaaaagatcaaagggcatgttacactcattaatcctgctagattcaacattagcattagtttctctgcttgctgacatcttctcggacttgacagtttctgccatagtctgcatgggaaacagcgtctgcataacaggaggagaagacgacggagatctctcttcaatgggattactgctgtcagatgagaaatacttcctactagatgccagttttggcgggctatcagtctcaggggacgagctaaagagctgtaggggtaagttcacacgtgtttcttgagcctggcaatcagaatcttccatgggagactggtaactggtactgcttctatctcccccaagtgaaggcaactcttgaggagatctcttctgcaaaactaaactgttggcctggtcgtggcagttcaacttagtcttcccgctgtcactgctggggctgctcctttgagataaagttgcaagagcatcgggagcagatggtgctagagtagccgaaagagcagcaagcaagtccatggtagactgagatgctcttccattcaatttatcataatgatctgaagacgtttgatctggaattttcctggacaaacttgccagattatgcaactttgcggctaggtccatcggcaaaggcagtgaatttatcttgctaagaatttgaaggagctgctctttgtccagtaaaggcgagcatatcatatttttgtcatcatttttccctatatcacgaatcgcagcatacaagttcagcacaatatcaacgagaatttagaatacaaagcccagaaaaacacactggagcgtgatggtttaccttgtgcgcgagccacagcagcca

SEQ ID NO: 15791 - DNA, 5103 bp, Cannabis sativa
  modified_base (196)..(201): a, c, t, g, unknown or other
  modified_base (245)..(245): a, c, t, g, unknown or other
  modified_base (703)..(705): a, c, t, g, unknown or other
tcgtaaataaaagttgggtctttttgtaaataaaatatttttcagttcctaaatgtaattaatatatctgttattttaaggtttattttttatattattatgtttaaaaatagttttttttttaattattttactaatacacaaaaacaacaaaaaaattacaaaagtacggtttttaaatatttttacgattttnnnnnntttatttatagaaaatacgatctttttatgttgtactcttgttnatttgttgttaatttttttttatatgcatgttattttttgttattatttaaatgttattttcatgttacttttttatgtagttttcttgttattttcgtagaaaaccataaatatgtaaaaaaaaaattctttaaatgtaaaaatgtaattttttttacaaaaaaaaaactaccttatgtaattatttttttttatatatatttgttatgaaaatcataacagtctacttatcaactaacgaagtaatttaaatcgtaatccaaatctacataatgaattactgaagcaacctaaaaaataaaaataagaaaaaataaaaaaaataatatataaagtgatttccattatttaacaataaagaacaaaaaaaattcaaattgttcgaacaaatatttttttcttaattaaataaaggctaattaggatttttgcctcctgaattttgacatgtactaannnatgcccctgaacttttaagatcgttgaaaatgcaactatttggattgttgaatttaaggacttttttccaattttagtaaaaaagtctaacatggataaaagtccaggggccatgatttagtgcatagtaaaattcgaggggcatgatttggtagatatcaaagtttggggagtatgatttagtatataaacaattactgaagtagtaaaattgaatgaaattagacaaaatttcttaaattcaacaatctcaatagtggcattttcaacgatcttaaaaattcaaggtcaaaagtcctaattagccttaaataaatagagaacttcattgaaagatgaaaataaagggcaaacttcacaaacaattgttcggattaattttgttccaattctacccgattttccttagctacaactacaaaatatttttatattaaataataatctggaggggcttgtttgtggaaaagtgacacgtgtcacaagggctctgagcccaacggctagttatataaaacggctataattcaaattctcattctcttcttctcttcacctttctacattttcccttttcttttctctcattacacttccgatcatcataatcatcatcactttctcaccaattcctagaaaaaagttcatctccgagaaaacgattcccttgaagagagaaagtggttgtctttaccactatatactctttcccatcaatgattttcatcaagaaacgggtcttttgaacgagcattttctagagaaagtgtactcgtttctgcctcagtacccattttaatttcgattacaaggttcttttttccgatttctggaagagttttcttggaatttcaagaacagggttcggagatttttctcgagaaagtgacaagagagaggagaaaatgtggaacgacaacagtgagtgtaccattattccaccttataaagggtttttgacgccacctccggcgtcgaacttcaaccctttgtatccttccgttacatcgatgactgagtgtagaagaaatcatcctcagaacagagttgattcgtttcatgtaatacataaagtgcctgctggtgattctccttacgtcagagccaaacatgttcaggttagacacaagttcttgtttttcaagatcatatggtgtttgttaaaagttttatgttagtttcttttctaaaagttctttttgagttttcttttcctggaaaacattttttatagagattctgatttgttgtgtaatgcaaatgactttgattttgattacttgtttatacattatagcttattgagaaggatccaagtagggcaatctccctcttctggtcagcaataaattctggggatcgagttgatagtgccttgaaagacatggcagttgtgatgaaacagttgaatcgttctgatgaggcaattgaagccattaaatcgtttcgtcatctctgtccccccgagtctcaggaatccattgacaatgtcctagttgaattgtataaggtaaatttgtctctttctatttctataatcatctcttttaaattctggttcccacctcctcttattattttcaacataaagtttgaattcattttagtaaaaaagccaaagaaccttttaacatctgacatttacttggttttacaaattccttattagttcatattcatttgtacaatttgtttctactaattttcttgcttttaaatttcactcagagggctggaagaattgaagaggagattgagatgcttcaaattaaactgaaacgacttgaagaaggctcagcttttggtggaagaaggactaagacagcaagatctcaggggaagaaagttcatataactgttgaacaagagagatctaggttcatacacacaaacacataactattctatatccatatatgtgtttatatacacacattttgaacgaaattcattatttataaatgccctttatcctctgtcaatgcaggatattaggaaacttagcatgggcttacttgcaacaaaataattatacaactgcagaagagttttacaggtatatttccaagcatgtttgtatatttaattctgttatatttgttgttttagacaatattgtttaaaaaacttatcatgcctcaggaaagcgctgtcgctggagcaagacatgaataagcagtgtaatttggcaatctgtttgatgcatacgaatagactacaagaggcaaagtctttgctttatgctgtcaaagctttatcgggtaagaatcccatggatgaatcatatgccaagtcttatgacagggctttggaaacactgactgaactagagaaagaatcagaactgaaatcaaatcaaaaggatggaaatagctcgaaggaaatgtcaagatctttatcttcctccatgacaagtagcatggaagatgtaaatagctccataaacacaagcaggctgcatcatcatgtatttgaaaatgtggtaccaagagaagtttgcgttggtggtaaccatttggagaataaggccaatttcaatgtgtttgaaattaacaattcacattgcacatcaatgacagcaagaagtggcataaagatttctaggccagttgtgcctgttgataagtggaagaaagattattctgaaagctcaagtgaaagcaagcctgtggttattaccattatgaaaaaccgagttggtactgttggaacagatccaagttccttgaacaagaagacatacttttctccagctccagctaggtgcaatcagaggactccatatactcaacctcgaaggtgtctatggggatttagtgatgaagagcagaggagggtagaagaagtatggggaaaagatgtgactgggaattcaaggaagaattgcagctataatgatgggaatttaaggaagaattgcaacaatgataatgggaattcaaggaagaattgcagctatgataatgggaattcaaggaagaattgcagctatgatgggaattcaaagaaaagctgcagctacgatgatgggaactcaaagaagaattgcagctgtgatgaagaccggaggagaaagagttcttggcaaaatggtgatatgaaaagatgtaaccaggaagaagagtatttaaatgtaggcatgattgctgcagagtcaccaaatgatttttgtaacacaaaggcattgggaagttccatcaatacttttggagagggaagctctggcagagttgagaattcttgccaacaacctacagaaacttcaaagccatcagtggattcttcggtttgtaataacaagaaaagttgggcagatatggctgaagaagaagatgatgaacattgttatataacagatgagttttgctgtgattggagtggtgaagaagcatataataatgagaacatgaattcaaacttaatccatgggagtccttgtctacagactcagatgaaaaacccgagccaaaagcttgaaatctttcatggtaattggtatagtgaagatgagttgaaaggcaagagcgatacttcaaacatgattcctgggacttcttatctgcagtctcagatgaaacgtctgacccggaagcttgaattctgtgaagtaagagatgaaggtaacaacagtaaacaggggaatgtggctgtttcatctgggaatccaactgctcggcgtactttgtgtttcgatcagaagaaccagaagggagtttcaacaacagattgcttcagttctgcagcagcatctaagaatgttcagaagttcgaccggaactcaaactcggggcagcataagggaaggtcttctgttaagaaaacaaagagaaacaggttgaaggttttccaagacatcacccatcatccagatagtccatgagtttggattagagagttttctgctcaagttttacaacactcttcatctgtgtgtcatgtttgttagatattattgtaccataacattctttaatctttaccagtgtctaagaaagttcagaactttgatgatgggtcactcaaattctgggcaggcaaacaaaaggtgttctctttccagaaagaacataaggagaaccaggttgaatgtttctcaatacatcaccattcatccagatagttcacgagtttgagttaagagaatattatgtatagcaaagtctttctttcttttacagtgagatctgtacatcatagccattctttgattctttacagaccaattatttttttggtattgtgctgaactacatcaacttctaaattcacaggagttcagtgaatataatctttactgtaaattgatttgattccttacaactgcaaggttttcagttttataagcatagtagattttaaacgtagcaaatgattgatgcatgtaacttatttaatcat

SEQ ID NO: 15792 - DNA, 9292 bp, Cannabis sativa
  modified_base (8277)..(8285): a, c, t, g, unknown or other
tgactaaaaatatatttattcacaacaaattgtgattttcgtaactgtaattttcacttatatatagttataacattaagaattgtaattcattagtataaatttccaatgcttcatgaccacaaatgttaagttgttggcattgctcataaatttactagaatctcctatttttctttttttattgaattttaagtgaaagtaccatttttgatgtcttaaagttatttttttttcaaatatatagacaaacatacatacccatataaacatattttatatttccaatatttcacatatcaaagaaaaaaaaaatagattcacaaactttaatataaacataaatgaatgtatcatgcaaaaattacactttctctctaaaaaaagataacttacaaaaaaattaattatatattgaaaataagagaaaaaaaaattaggagatgtgatcatacatattattagtgaccagggcctctaggacttggtcctgactctagctgttgaaaccatctgctcatcatcatcatcttcttcctactgatcttctcgtacataaatggccgccgtctgagacggaggcggtgatgattattactggcaatggagcaatcggccggtaataatcgactccccttggcttggctcaagttcaacaccatcaccaccaccaataatagtgacaccaaaatcatgctgtgcttcatatcttatatatattcttctgtatacgtacgtacagtatatatatgtgtatgtatgtatactgtatatagagaatgagttaaggggtttgtttttttttatattcgttcttttggttaatttcttgcacgaaaaaatgtgtataaattaattaggatagctagggctacattatatataagtttataattaatatgtaagtgatctatgtatataagcaagtaaattaatatataatctgatatttctagttttttttaattggagttattttcgtaggttataattaatttttgtgggcttaattatttacttgctcaccaagatcagccgatggtgtgacctagttagttacacgtgtatatattatttaaaactcttaaaatgtgtatattaatattttgacatattttataaaaattattataaaaaaaaataatatattaaaaataaaaattatttaaattacatgtatgtaaatatatgggttttttttcagaaaaacttggcttggttgaaaatttgaagagaaatctgtagtggaaaaaagagggccaagcatgtgattcatgatttatatatatatcattacaatgggtgcaatacaatgagaacagtccgatcccaaaatcttatgctccaactccacaaatgggcggctttgaatttgaaaatctttatataagtttgaatatatatgaatatttctataattggctgggatataaatatataatatatataatggtgtactgatttacttgtatcttttttggtgtcgaggaaaatatgttatttaaaaaaaattatttcacacgcgtataaaataaaaaaaattatgcgtacaacaaataatttaaactttatttttaacgtgttaaatttttcatagcttaaataattattatatacacaactatcaaaaattaaacaaataaaaatacaagggtacactaggggagctagaatttatttagaatgatttatttttaagttatcacgtaataactagtgtactgtaaaatatatatttatattcatctctccatggagtatttaaagtcaaaatagaatcttatcaattaatattagtctaacgccaagtgcaaatggttaactagttctatatgtaatattatcaattaatattttgttaggaggtgattaaaaaatcttatttttagttacaataaaatttgtaactaaaaataaaaaaaaaaattataactaattataaattatgtttattgtgttgtgactaaaaagttcgtgactaaaagtattagtcacaaaaattataatttgttacaactaaatgtatttttagtaacaatatttgttgtgagtaaaactaaactaatgacaagtacttgtaactaaatacagtactatattttaatcacaataactttttactgtaactaaaaattatatttactcataaaaatgtatgttatgactaaaagtacagtaggataattagtatagtatatgtgtacattttagtatgagattccaccgaattaattaatagatgcatgttaattatcatcttttggaagaaattaaaattataattaatttgatgaatttactaatttcatggcgtgaagttaatttaagctacaaggatagtagtactgggacacttctatgtattaaagtagtatatgagttctatttaattacattttccattttctaaaaaaaatacataaatatatccactatctatatttttatttttatcttttttttttttttttttgataaaatctctatattaattttttaggaattattttatatacaattttttttttaaaatttacgatttaagttattcgaagttgttctaatagattttggttgcgaattagattgtttcattaattactatgtgaatttttcgtaaaaaattaaaaaaaaaaaaaaactactttaaaatgtaaaaataaaaaaactccttaatttggttcaaggataaactttgaaaagttaatataaaaatggagttacatattggtggagggattttctatccaataaaattaatttatcgtctatcctaaccataatttacaataatagttacactaatttggtgtagaatttacatcaatttagtgtaaaaaatttaattaacaccaaatatctcactaaataaatatattttacttatctctcgtacattttatattatttatagtaatagccccaaataactaatatatgatataattatatcataaaatcttaaaataattaaatcaattaaacattatacttaaaaaaaaaaaaaacttactgaaattctatagttaatcttaacattcacgactattttcaatgagcaaacaaagattatgcaaaaattagtttacccactaataatctcaagcatttcagattctcaaaataattcaaattcatatgttaatatattgatatttttttgtggttaagatcttcaagtgattaaagttgattattaaattattattttatttaatatttatttttatatatgttgttttttttttttttagttttataggttagtgttatgttgtttttatttaattttatttgacattattattttatatttttaaatatattaatgttttgaattaattattatttttgtaataacttttaatttgagaattaaaatttaacatcaatttttaaagtaataataaaaaaaaagagcatcatcaatgctatgcccaattgcaatgaaattacgtgtaagtaagctacatttatttaaacgtgaagtttttaatctctatttattttcttggtacctgtatttatcaattagttaattaataatcaaataatgaatcataacatgcaaattctaattaagtacattataaaaatctaagcaaaatgttgatttaacatctaaaattcgagacacatcctgaataaaattaatgtccaaaaaaggatacgtattacgtagctagctacttatcatccaaaataattataataataattaatgctaaaaaacacaagtggtatttaacactttttaagtattacaattaagtatcgaatttcatataaattaactaaataatttttagtgtatatcgctaaccaattgcaatctctaggtggtgctaccagtgtccaatgataatactctatactaatatttatgggcattattattagacacgagtagtgtctaacactttttagacgtgttgtcaggcgtgacctgggtttaggcgaactaggtggggactaggcctgtgtctagggcccacctagtccaggggcccaagaaaaaattcccttataaaattataattttttttactaattttaaaaaatatcacattttttctagataagagctcaaaaataattttttttctctatagctagcccactaaattttagggccaactatgcgtgttgccttatgattggtgagggactctaaataaagacaattcttctgacatgataaccaaggtagtgtagagtggtaagtttgagcactgcctaaagctgattggagtcagctgagcctgaaggggctaagggaaacaatagtatttataacaaagatttgtacgttaagccgacttaagcttgaaactaaagtggagatttgttgattatggttacaaattttatcatctggaagggaagttgggaatccgaatagtagatacgagaaacttggtgtgtgaatccaaaaagtcttgtgcgcgcagaagactttgtagaattcgaaaggtgtttctaggtaagcttgtaccgcgtatgaactgtctcttcgaatagcttgtcattagtccagaaatgtacttccggatagcatactgtcaatcttggttgttcttccgggtaggaatgcttgtacgtatccggatagtttgtccatattaaagcttctggattgtttgtactgaaatcgttttctcaatgctgacgttgattattattggtggtgatgagctaaaacacatttaaggcagtgtaaaaatttttaggcaacaatacaaatctataaatagttatcaatctttgtaatcagagagcaaatcagactattgttgcttgagtgaaaattgtgatagtgtaaggttgagagagagagagtctaaactagagagataaaccttttcttgtaatctctaagagtttgtgaagattcttgtaactttataaatactaatatcaataaagatatgaatgttgttgttttaatcgagatatagagcattgcacatgactcaaatttgttaaacctggtgttattcttttctgttttattacttaattaattacttaaattctaatatcacttgatttattgttttttgattgtgttgcgttttgttggttcactatactgcatcgtaagtctgttcccgtttcgcaaaatatatatatttatttatttataagttgaatatgaaggtaataaatcaataaacaaatctaagaaataacgaacaaataatgtatctttacaaaattttgtgttacaatagtgtaattcaatgtacatttattaattatagtataaaggcatcctaattataaataaataaccataaaaagaatatataaaaactgtgacatgaattaatttagtgaccaggtcctcttgggctaggacctgaagccaggcgttgaagccagcaagccatggtgaacttagctttctcgtacatcaccgttgatgacgtgtatttctgaatctgaacatgttcctctgacaatattctgcttccttctactttgtcagtacagctcaaaactaccaaagttaccacaatcaaaacaatcaaaagggtacttttgtttttgaagttcatcatctttgaaatcaaagattatgttttgtatcttgatgaaaagggtttcagttgtaatgggagttaagaaaaagaattaagtaatgggagcttttttcctttttggttttggtttgaggatttgaaagtgtggttgtgtatttataatgagttgggaagagagtttaactggttttcatttttggattggtgggctttcattaatgaactttacttacgtgttgaccaaggtgtgtgaaaaagtcaagctctcatgcttgagcttgttgaattatattatatattatatgttatatattatatgtatactatggttttgttgcttaaagtggagaaacaattgggatttttgttgaaacagtcaaactgttatgcatgtttgtgaataattgaacatttcaaaattaccaatatacccctcatcatcaaaacagagttttttcgttttgttgttttgtgtaaaggggcaatgaggtcaatgtgaaagaaaaggggaaaaaagttgaattgactaactggggttggttgatcttgtgttttcaataataatatgaatactgttttgagaggaaattactaagtcggctcctcaattctgatgatgatctcaaactcaaaactgtcaacaatgggtggtttttgcatgcataacaagtagtcaaagcatacctttttgtttttcaaaactaaaatgcttaaattgtgttaataatattcaagtaaaatagctgtacttggaccaagaaacaaagaaaaatatcatatttaggattattttcttctcattggacattggaggaggccgtatatattccataatttgaacaagaaattgtcaaaaataatcttaatatacatttttgttgggggtgtcaatgtcatacataatccaaaagctagtttacataagcacgaagctcaaaagctgaaactgcttacatatacatacaccatagaattaataatctaattaataccaaattaggacttttgtttggtgttttcctatacaaatatatgctaaaacaaacagctgaatgaagctatagcaaaatttgaatttgccttctgtaatagaaactacaggagtagattcccccaatttttgaccaatgcaaataaaaattagaagtcttttgccttctgtctcaattccttgagctccctctctatctcagcatcttgaaagggatatggtgtatttgagctggcgctgacacttcttcccggtggaagttcgcctttctgatattttgttttgaaaaaaaaaaggtaaagaaatccaactacatgatttcaagattttactgtcctaattcaaatgtcaaaataggaaatcattacctttgagctaccggagagttccttcttcaagcttgctagatcatcatcaactgacgagccctctagcaatgcaaactgcaaaaagatcggaaaatcatcaacttactgattgcataagacttaatcgagagttggacaaagtaagtcagaaacagacgcagttctacctttccttctagatcatcagaagttaattgaccaagagcttctgcttgagactccattgccatcactgttgagacgaaaatgtatatcaagaatacaagatcagaagaaatggaaagttaagaatataacttcattggcagaatattgtctaaaagtctcatcaaagcaatgggttcgaccactgtaaaattgtacaacacattttaccaaaccatgcatgaactcctcaccaaagaaacatggtttagatggaaaactatagataaattcaatggtcaaataatataatggattctactattccgacaccttaagaaatactaccaaaccaagcatgaactccctcaatgaagaaaaatgtaggatatagctgtcttttgcagatatattttataaatttttttaaaaaataataataattcacatgcatacgcatacattatcgccaacttttccaaaaaatttctaaaaacactagcgtgcatctttcttaaataagatttgttgtctgtatatttgtaaaccattttcatctagtctttctgagtaaaccaaaaaaagtaatcaaaaatcctatgatgtgatttgaattttatttattttctaagaaaagaaaattgttggtttcgaaaaattgaaaaaaatttggattttcagttataaagctaaaatccagtacaaacttaaaatgtatgctcaaccagtggttctaaagtctgaagtctatacctttctcttccatcttttcaaaagcggaaagagcattactcgtattgacatttcccaacatttcgcttactttggtttgagtcctaaagaagcatgcaagtaacaattactcaaatattattaaaaatctcaacagataatataacatgaaggggctgtttagacaaactttgcagactgtgcacgtgctttcagggtatctttctttgatctcgcttcttgtatcttgctctccagaagctagcaaaaagtttaatcacatgatgtagataaatcattagtaactgcatcactatactcatcaacaaagttggatggtcaaatctcatgttgttgtagcctggtgtggagttagccttgtagttaacttccaatccagaccagtaaagaggtgggaaggggatttggaagaaataaaaagtaagactattttcattgttccaactctttaaaaacaccaaaaaaaaaaaaaaannnnnnnnngaagaagaagaagaaagaaaaaaaccattgttcatattgttgacaacatgaaaaaacacaaagaactctattgtagacaaaccactagatcagacgaaagaaccaaaagaaaaaaaaaaagtgagaactgagaaagtgaatatgttccttgattaattttgaaaacatttaaattagagaattttgtttaattcagtgacccatgctgcatgatgagtttcacaattggtacaattaatgaagttaaacgtacaattaatgaagttaaaagatagcaaacaacaaaattggcttacccgggtattagagacaagattttcaacaacacctttctgttgatcaagttgagctttcaaagaattagcattatcctgcaaagaaacaagtggtgtgtaaatgcttaataaacaactatatgcaagcaatttgcactacgccaattacgctgaacttactgcaaaagattttctcctctttagagcttcacgtgcaagattctcatctcctttctccaaggcaaattgtgccttgcggtacctaagtgacagcacaatacaatgtaagttcagaaactctcagcaactattttggaaggaagagttattcgttgcagtaccattcctcagaagcttgttgggcagctttgtacttattctccaaccgcttttgagatgccaataccttaaaatgataaaaagggaaaaaaatgatcaattataaatgaagataacttgagaaactactaaagcaatgtaactttaactggagtaaaagaagctaataaagaggctagctacagtccagtccaccacagaaaccctctttttcttttcttttttggcaatatatgaagaaagaaaaggacttgagaatgtgtaatgaacaaacagcagtagagtatagagcttacttgtgctgttgcctgacgcatctttgttaagtcatcactcatttcgataaccgtttgatccaaaattttctcaggatcttcaaaggaacttatgact

SEQ ID NO: 15793 - DNA, 4109 bp, Cannabis sativa
  modified_base (34)..(40): a, c, t, g, unknown or other
  modified_base (182)..(187): a, c, t, g, unknown or other
aaaataacaatatagttgtttattattattattnnnnnnnttgttattattattattattcttagtgacaacgatgtaatggcttaaccaaaaatttggggtggtagtaatttttatgactagtacttttagctacaaactttttagtcctaataaaaatatgataatttataattagtcannnnnntttcacttttagtcacaaattttgttgcgactaaaagtaagattttttagaatgatttcatttaattagctagcattattatagaaacacaaattttcctaataatactcattcataggtagtacccattaagaacactcataaattgcagtaatgaggaagtgcaataaatcacgaaaacctccatagccaccacagttcatgaaaactcgatagccaccatcaatatgtttcccctgcctgaaatccctcaatctaaatgcagatctactcatatctgttcaccccaacatcttacacctcccctttttcattgcctaaatcatgaaaaccaccatagccaccacagttcgagttctgcagtaggtgctcaatctctagttcgccgttagctccatccgagacctcacaagatctggtctccaaaactcagtccaccaatctctattatttttttattatatattttttattttggtatttgtttggcttttgtaatatagatatggagagaataataaggtgaatattattttttaaatttgagaatcagcagagaaagaatcaggtggatctaataagcgcaatagtagtggtgtgatagcaatggtagtgggtggtggtggcgacagtggtggctggagttggggatttagggcttggctgggctagactatcgaagaagaagaagaaaatgataaaataaattattttttaaaacttttgggaaagtaaatatggcaaaacaaatgatatttgggaattaatttttgatttttataaaaaaaaattgatttttttttaatttttttctaatgatttcatatttttaaaaaataatttctcattcttaaaaaataaaaaataatttatttatttattttaaattattttttaatttttatatagagttttttaaataattatactacatgtaccaatataaacatgtcacgtgtacataaatgtatacataagagtaatatatgacattttaaatttactatcatatgaataatttgaagtattttaccactaaaatttaagcttcaagaattaagtgcaagtaaaatgacaattgaaagagtttagccgtaaaaaaactcttagaaacactaattaattattaaactgtaaggtgtcatgttagttaagtttgttacaaagttagttagttgttagagttagttggttaggttcaccttctccctcgatgtggtatataagctcatctatgtattctgttttcttcaataatgaaatattcaattcatttcttcattcgtttttctctctctcaaaactaaaatggtatcagagccaaccgattgttgagctcgtgcttctgctccttctctttcgttttgatcctatgttcttctatggctcgaggaacaggaactcatacttgaaatagtagcaacaatgaagttgctgatcaatctaatcgatttgtagctctcgatgaaaataataggtttcctaccattgatccacgtagtccttattatctgtctagtggtgacagtgcttcttcatcactagttccaaagattcttactggagcagacaattacagttcatggaagcgatcgatgatggtagctttattggcgaggaacaagatcaagttcattaatggaaagcttccagaacctgatgaagatgatgaggattatgattcgtggatcagatgtaatagcttggtcatatcctggatcttgaactctgtttcacccaccatagctgacaacatcatgtacatggaagatgcttcgcgaatctggtttgagttataggaaaggtttcattagaaaaatacccctagaatttttgaagttaaaagatctatacaaactctaacttagggatcaaatgatgtgacatcctactatactcgactcaaagggttatgggatcatttacaagagtacaaaccccaattagtgtgtacttgtggaggaatgaaggtcattcaagagtatcaggttgaggataaggttcttgagttcttaatgggacccaatgaatcctatcttaatgctagatctcaaatattgcccaaagatccccttcctaatgtcaataaagtttttgcttgtataatccaggaagaaaaacaaagaggaattatcattcctcaagttgaacgtaatcaaccttcgaatgacaaccccaacaattttgctagaagtacacatgccaatcatggcaataacagatctgacaatcaatttgataacaaacctgtttgttctcattgtggtgttcctggtcacactcattgtggtatatggcagattctctagggaaaatcctaatcaacctgttaatcaacaaggtcgatccaatgccaacttcacagcaggagctgaaactaaggaaggatccaatgaggaacatgaccttggtgcacaatgtcaaaggttaatggctatgctagcatagaaaatacaagaaacatcttcacaaaaccagcaatctgatcaacctgttgtttcaaatgtgtctggtaaggcctttcttattcctcaatctagttggattatcgatattggtgccacacatcatgtgtgctccaatctttccctattttgttctgttcaaaaacataataaaatcacatcagtaaaattgccaaatggaagtaatacaaaggtttcttttgttggaaatgttaggattcatgacattttacttacaaatgttctgtatgttcttgatttccaacataaccttatttttgtacgtgctttatctaattcagccaactattcttttctcttccttcctcacaaatgcgttgtttaggatatcaccaagaatcaagtgattgggatgggtgatagaattgacaatctttactatatgtctgaacaaaaattttctctagcttgttctattactaattctaaaatcaatgattaaactttgtggcattatagacttggtcatgtctcttgtgtaaggaatcattcattaaataaaaaattgcagtttcaatactcctattgttctactttcattgttctatgtggcactttgctaaataaagaaaattgcctattgtcagcaatcataatctatcaaaaaattgctttgatcttatacatgttgacatttggggaccctacaatatccaaattattgaaggctttaggtatttcataactattgttgatgattgttctagatatacatggatacatctcattaagaacaaatcaaatgctcagttagttataccagctttcatacaattaataaaaactcagtacaatgctcaaattatgggtgttaggtctgataatacaaaagagctacaattccctaacttgttttcatccctaggtatagtgcattattattcatgtgtgcaaatgccacaacagaattctgttgtgaaaaggaagcatcaacatttgttgaatattgctagggccattctttttcagtcacacattcccttacattattggggagaatgcatcaacactgcagcatttataatcaatagaactcccacaccaattctcaaacataaatccccatttgtaattttacattctaaggttcctagttatgatcagttaaaagcctttggatgtttagcacatgcttctactctaagtgcaggaagataaaaaatttcatctagagctaccccttgtgtttttttagggtatccagctggtatgaaagcttacaagctgcttgatcttaacactaacaaagtgttttgctctagagatgttctctttcatgaacatatcttttcttttgttgtgaatagtcctatgtcttttgaattgtctaagttttttcctagtgatgcttcaaaaactgttcatgaaagttactctccattacagtcctaacctcccatttccacttacaatgaaaactcttctccattacagtc

SEQ ID NO: 15794 - DNA, 4912 bp, Cannabis sativa
tatttatttatttataaagtaatgtaaatttaagaatttataagttaataattaaattctaatagtaattattttttatattactattaaaatattattggaactataaattatacatatagttcaataattaacttattaattataaaaaaaatatataaaaaagtaaagtaaattcaagtttgatataaaaacggattcgtctatttaagaaaaacggatcaacacacacgacacgcaaaatataaaaccttttcttttaccatttgtttagaaaaatcctacagttttttttttttcacaaaataataattatagaaaattagaaaaatatatttatttgttaaaaagaaaaaagaaatggcgggaaatttgtatagaacaagggcgggcatcgcttatctccatactcatttccagtccagcaacggtcttccatggattccgattcagattccgacggttctcacgtctccaacactcccccaagagttatcaagccttcaccaccggcacagacatcggcaccggtctcggctcctccttcacggcgtacccttttctccactaccaaatccaaaatcaatgtaaaggcctcctcttcttcttcacactccaaatccgctccaaagcccaaaagttcttctcacaagaagtctaaggcacctgatccgacctccgttgaacccgagcagacacctcccgaagaaccatttcccactctctccccaattttacctttccaaatccgtaaccgggtttccgatcagagcccgatatctatcgagacccttcctgctgggtttttctccaagtctgcgtctttctcaaaatttcgacgttctagtgttagttttgatcctattaaagatgaaccatgtcctcctttggcgtcaaatttgcaacaaaaggttcatattggtgggtctgattgtgcagagactgattggacactgccagagctcgaagatgaagcatctgttggttatggaaacactgtgaaagttggaaagagacattccaatttgattggaagcaatgaacctatgccgcaggtgaaattgcgaaaatgtggcaacgaagggaattttgtgaagttgaatttgaagcgaaataagaagtttttgaacaaggggaaaagaggaaatagtacttcatcaggtggccgaagattttacaagaaatataagaaaaagtttaaaccagcaggtgggggtgagacggaggagggtgtttgtgaggaacatggtgtgtttatggagagcttaacgaaagaaaaggagaagcaggaggggaaaaaagctaaatttgattgtgaatcgattgaggaaacgattttggctgctcgaaatgaatcttcggaagagaacttgttgaagctgttgagcctaactcatggttatgattcgttcagggaagggcaattggaagcaataaagatggttctagatgggaaatcatcgatgcttgttttgccaactggtgctggtaaatcactgtgttaccagttgcctgcaatgattttacctgggataactttggttgttagtccattagttgcattgatgattgatcagctaaaacagctgcctcctatgatccagggaggtcttttttgtagcagtcaggtgattattgctttctttctcttcatttttgtctcatacattagcatataacatagtttgatagtagtatgaatggaattcttttcattgttttagacacccgaagaagtttctaagacaaagatgttgctccaacaaggtctcattaaggtgagttttgcttcctttagagtgtggctagcaatgcttctatatattgttgtgtttggttatgattgctggctttctctcttttactgatagactatgtgtggagtccaatttacatttagtgtatagtgatttttccatttgagtataaaatctctgtctttggtgtcatttcaggttctttttgtttcaccagaaagatttttgaatgcagaattcctgtcaatattttctggtactttactcgtatcacttgtcgttgtggatgaagctcactgtatatccgaatggtgagtgtgattgcaactgcctcttaagccttaactcttatatccttagacatcaagattttctctttatgtggaagtctattttgatcctgttttttaggtgaatgtttttaatttttcttctggtaatgaatttttttcacttttatgaagttgtgtatgattccaggtctcacaatttccgaccgtcatacatgaggttaagagcatcattgcttaaggagaagcttaatgtcaactgcattcttgcaatgacagctactgcaacaaccacaactttacatgctgttatgtctgctcttgagattcctccaactagtctcatccaaaaggcccatttaagggataatttacacttgtctgtatcattgagtaaagataagtaagtgcagttgctctttctttcctagattctatatctttaagatgataacaaattctgtacagtactcatcctattaaatttcatggataaaactagaatgaaagacctgctagcattgataaagtcttctccattcaaagaggttcagagcatcattgtatactgcaaatttcaggtatatgcaatatttcactttgtgtgctctttcatatataaatatgatatatatatatatatatatatatattactggctatctgtgatgccatctagactctggctcactggctcacttgtgtatatatctgtttcttgtttttcaacttcttttcggatgtataatttgcttctatatatttggggtgtgattacctgaagaaaaagtatatttcttggtagaaatataattcatttaacaacctaatgcaataaagtagaaatttttgttttactcatcagattaacaaaaaagtccatacatattcagttttgagagacaacttagttcatcattctaatgtttgcagttcgaaactgacatactgagcagatatttacgtgattacaacatctctgcaaaggttcgttttaattttttcagttcacaactttatttgccgtattacatcacagaagtataaatctgacaaagtttttttttaaaatattttttacagagttaccacagtggtatacttgcaaaagatcgtagccgaatacaggaattgttttgtacaaacaagatcagagtagtgagtatcatacatgctcattatattatgaatatgttttagtttttttaaattagtcttttcatattctaagaaaaactttcaatttcttctgttgttaactcttgcttctatcaaaggttgtggcaactgtagcatttggcatggggctcaacaagacggatgttggagctgtaagaaaaactacttataataacatagctttgttgcattatttttaaattagatgtcactataaaaagacaacattctactgtatttatccaatcaagacacaagccactggtataaatgattagcttcctttctgtgaagatattttgaatactaacatattgcatttgcttcaggtcattcactacagcttgccagaaagtttggaggcatatgttcaggttgaactcttgtttctattcactgattatttgaaagacatttgagttaacgtttcctataagatagagttatacttctgtaggagattgggcgagcagggcgagatggccgatcatcgtattgtcatctatttttggatgatgacacgtatttcaagcttcgtagtcttatgttcaggtagtcagataagaattataccttgtcatttagcataatggtttgttggtttcacaaaatttaaattggtagtattttgtttgcagtgaaggagttgatcaatatgcagtagacaaattcctttctcaagttttcaccattgataataaatcacaagggaagatcttctcacttgtaaaagaatccgcttcttgcaaactcgatatgaaagaagaggttttctccttttacttttcatgttcaactctcaagtttattatataattagtcacgaatgctctgtgattggtggtggttcaggttcatgatgtattgtcatgaaagagacacaaactatataatatgcacataagggggttgtacttattttttgattctcatacactgcaaccttctaaagcattccattgttatttttgtccattttccaggtgatgttcacacttctgacacaattggaattgggtgaagtgcaatacctgcgtttactaccgcagataaatgttacttgtaccttaaattttcataaggtgggtagaaaattcgatataacctctgttcacctgggagttctacttgctgcgggtgctctcagaagctataaacatgttaccaatggcaggaattatataaaacatttgtcctactatgtgagactatatgatatagctgtcctagaaacccgttccttagggaaaattacctgttcttttcctcattatattagtttgatcattgatgcttaccaatagtattacttgcacatttgcagacacctcctgatgttcttgctgaaagggatattgttgttgctgaaattctgaaaaagtgagtatctttaattgttaaaaaaactaagctagttgagtactatttattgtcaataagattttggctaagcaattatgacatggagattttcaggtctgaaatgaagcaaggaaagtatgtgtttgacataccaactgtagcgaatagcataggagttatgactactgatctatcaattcagttacagaatctgaaggtatggaactattcgaaagaagaagactatgttttatattatttagctattggagataagaatagaaaataaatttaatatgtaatgtaggtggtttctgaagtgta

SEQ ID NO: 15795 - DNA, 4029 bp, Cannabis sativa
aattaaagttaaaatatgtgatgaaaactaatatattatatatgtcagaacaatataaagtaatagcatttctcttgtgaaaaggacaaaagtacatcacataggaagatgacaaagtaagtaacatccaaagaagggcaattattgcaatcaataaaattttagtaataaggtaataataatagtgcagggcttgattaatatatacagtactaaaggtcaaattaagcttaacttagatcttgagcagatggttataggaaagtcaatcttattttcagtttattaataataatctatatagagctactacaagttaattactagtatagcagccagccttagaaaaaaagataagaacaatacataccaggaacatgggagataggtaggagtcttggctggacagctgggcatcgtcaactttgagctgtttgcacaacggtgcaaaaaccagtccttcatttggtaatctcatgatatatcactcgtgcataagaatttattagaagcaaataatggcaattgtcttgaatcattaattaaattggtggcaaaaccactcgtggtgcaatgtattgtatattacaacggcctcatatgaaaggagatacttagagatttcttcaagcaaataatttaggagaaaatgagttggatataacggtgggaagggaacatggttactattaaatacaaatctacttattaatcatatacacattattgtgtgctgaatattgattatcttaagaataagatcaaagatgctctgtatgtcttctccatatctcagtgtatataattgagcattaggaaaacaaataagtcagaggcaaattgcagcaatacccaattgcagattcaactctgaaaggccattccatctcttctttgagatagtaaaaataatccaatggctaactcaaacattttatccaccaaaccacaccctctttttgaagaatgtgaagaacacttgtgcagattaggggatttaaatgcaacttcttcagcttcaataacacaaaagttgagtggtcttgaggatttgcataattgtgctgagaagttgcttcagttgcccctcactcgaaaagcacttgtaaatggccgccatgagaagtgggttgaccaagtggtagatggttccctgaggctgttggacatgtgcagcgcagccaaagacgccgtgctacacaccaaggaatgcgcacgcgagatccaatccaccatgagaagaagaagaggaagtctcgaaagcgagatcaaaagatactcagtctcaaggaaagttgtaaagaaagcaatccaaaaggccttaagaaatctaaagagtaatgactcaaagaatgcaatattatctgcttcaaacaaagacatcgaaaccatggcattggctggagcattaggagaggtagaagcagccactcttgcagtatttgagtccttgttgtgctttgtttctgggccaaagtcacagtattccaaactaaacagctggtccttagtttcaaagcttttaatgcaaagcaaaaagattgggtgtgaggaagaagaaaaagctgtgaatgagtttgaaaatgtggattctgtattgcaaattctcattcagtctgataagtgtccattgaacattgagaatgtccaaactgagctgcaatgtctagagtcttgcatccaaaactttgaagaaagactagacagactctttaggggtttaatcaaaatcagagtttcctttctcaacatccttaacaactagttaggagattcacaatcatattgtacatatgtaaatttttgtcttgttataaaatatacaaaatttgtctcatcaatatttctgtgtattataactctgtttcactcaagtactaagttgcaatttattgtcttttatttcaatgaatataattataagaaagctataaattgacaaattgtgatggaataatcatttattaatgacaaaagcaattttaatactcattataactataattattgaagatcagctggagaacaaggactttgaaaaagtgaggaaaaactagaagaggagagtgtggaatgggaaagtgaagtagtcaatgagcttggttggttggctgtaatcaactttatcatgaaatcaaaattccaattccattgttgtgttcttcaaaatcttgtaatgcctttacattttacattatacattatataatacatcatagaatacatatatatacatgaatataattacaactaattatgtaatgaaatttcatttctattacaaatgtttacaaaaaattaaagcaaaacaagcttaacccttctacacccttcttttataaagtaaaataaaaaggaatacacttttaataacagtactcattccatttttctttatcacaaaagtaccagtttatgtattcctatattcattataaaaacaaaccaaatatcaaaatatcattttcattcccctattactattacaaaaaacactttctatgtcaattgggagttgacacaccattagaatttagaatataggacaccagcaataattttcacattggtataatattattcgttttgggtctaagcccttacgaatttacttttgggtaccttcccaaaaattcttataccaatagagatattattcatccttataatatacccatgatcttcccatttttagccaatgtgaaactttagttacacatctagcaatcatccccttaaacaaaggaccaccttgccttccctaccacatatccactttccaccaactagtgtactgccctctaatgcgttggagcacaggccctacatgaaacaccgccactaccttagaattcttgctctttctcaagcaaactcctctatgtagagaaaatcgcttgtctacttgaacacatccatggatcccatcatgacattactgaggctcaactcttttgtttggcattctttattcacatggctaactttgaaacccaactcttggaaagctttcttgtccttccgagaaaggtcctcgggaaagctagccttcctccagaatggagttctgaatggccaatcgttgttcctagaaaggattttcggatagtcaactccaactagttctttcctattcagaaagttccttcagtgagtgtcttggtccatgattttgaaagccctcatatacgctcccaaaaacactcatacatatgttggcgtggagatctcgctcaaaagagagttggttattgcctaactaacttaacactctcgctttttgtagctattgactttaggatcttgattctaagtatatataaataccaccaatacttatcattttagacacaacgatcagatcgattgagtttcgagatagagagaaatatatagagaaaagagagagattggatttggattttgtatgaagaatcttctgtatgaagaagattcttgagtaagagtgtgagagttgaaacacttagagagaactaatcagagaattaatctctactgtattgtacctgttcttgctcaatcaataaagaaaattttggtggtgttccaaaacaggagtaaagccataaattacattaatttatcagacttgaacttatatatatcttagtgtttattttattattttattgctttaatcgtttctaaatttaatgctctcttcatctttgtttttcttttatttttgtcattattaattatttgattgtttaaactaattatataattttctcacagtttctatttatagtagtgattctcttgtatatatatagtaattagttttttcattcttatacttaaaattaaaaaagtgagtttttgtttatattataattatagacatagtgtacacttctctagagatcctaaaatcaaatacccccaatatatatatatatacatacagtagaacttttattcaagaatacacttgggaccaagtaaattatattctaattgggaggttataactaaatagacttacactagaaaaaaaaataaaaa

SEQ ID NO: 15796 - DNA, 9517 bp, Cannabis sativa
agagagagagagagagagatgacaacgaattaagcaaggacttccatttattcaaatatgtatcttcggtagcttgctattaattatttgtttaaatttttggtagtttttttaagctgcaaaaaatatattcaacacctaattttttgttgaagttgttgccaatgccatatatagagttgtaattggtcggtatttactacaatgatattaatatatgctaacattcaataataaatctatacctaattaacaattgtgtacaaattatctcctaacatgttaccccctcaatcatgcgtccatgcatgcatgtcttttttaggttttgcttttaaagtgtgtcttcatctataagtaaattttctttttctttaaaataatctaatcaaatagaaatttataaagcatgaaagattcttaagcattacaatcataataagttgcatcgtgctacataaggaacaactcacatgcagacattcttgcatttattgccatctaccttaacatgatgactcaccattagctccaataacatttttctctttattatattttcaaaaagtcatgtgaagttaatttttcttttgttaaaaaaaaaaaaatcaaggataatttaaatgaaacaatgtaatacatattatataactagtgtacaaaaaatatgaactagaacttaacaagtagaatacaattctagctaaggtgtgcaatgtctctttgttgtgtattcaaaattataaacactttaaatatttgaatttgatctaatgaatatggggtttgtcagaaatatttggcagattcgaacattgtcatccatgctacaaatatacaaatgaaggaataaattaattttaacttcatccatattcaaaattgggtcatcttattgtcttataatataggaaattcatgaaacaaaacttaaataaacaattaaaatgattcttttttctttttgttgaattaaaaaattaaaatgaaaatttcgatgaataatagggatatgggggactaatcgcattgaatctagacctcatatatataaatatatatacatataattgtaggtaaagttttaatttgtattggatacataaggtggtaattaagattggaacctgacacagaaagaagatagctatctcatgtcttgatcttaatcggtgcagaagatgacgtcgtcttatgtgcttccacgttgtgactttgtatacataaataaatatatgtatttataattactttaataatttgtgagattgtggcttagtcatggtctttatgggcttctactactacttctaccaataccactgcaccctcattattcttcgtgacttcattaattagtccctaaaatataatcaataattaacacgagtaatatgtacgtacatccaaaacaaaacaatcctaaaaatgcaatgcaagtatctataagccagctagcagatcgcagtataaatatatatatttttttgttaaggccatgataatttgcagtgtgtttgccacacaagttttaaatagctgaaaattaatagcacttgtcttacttacactgacaaagatatttatttgggaattgtgataattgctagtgtggataaaataaaaataggactatttatagaaacacagttgacagacaaatgagaaaataaaaaactgagatgattattaatgctaaccagctatttaatatctcctcttttagagtgttaagggaagaaagacattttccccttgttctatgggaaaagagtttgtggtgtcgggatctttgttgttgtggaatgtaaattcttggaactcaaaaaccagtttccacttccaactcaccacaactcagttttcaaaggccatggatgggtggctctactttccccaaaaaaataagatgataaataaacaatagttatattaaccaaaacccaacttccgacaactactacatgccacttataatttaaaataatgtgtttatgatttgtttagacttcattaatcttaaattaatgcattgttcacctccacgaattcgtgttacatggttgaattctgtgcttattaaaatggcatgactgtctagtaaagagtaaccttaaaacaaggacgcaatgctcccactctctcttggtagaattgccagatcacaagtacacgtgcaaggtaggacagtaaggaatgcttgtatgtaatgtatgtacactctaataattaataaggcttaaaatagggactagtcacacgaagtctccatgaaatatgattaagattattaaacaaccgtggggtcactcaactcacattcaagatttttgacaagggtttcatgaactaaataaattcaactttgagactcacacaaacacaaagatgaggataaataatggctgcgctactgcttcaacttcaattagatgtttcatgccttgtgtattaaagcaacccataccacccatttacaggaaaatgctagaaaagttgggaaacacaaccatgacctaaaacaaatcttaattttattaagaataaaatgttacaagaacagcagaatttgatagattacattattgaaggaatatacagagcatctatatagtatagttatctataactctctttcaagcacaaaaccaaatgaatgctatgcatggttgatgctgggaaaagatattattccttaatgtacaaaactacactctatcagtttgtaatatcaatattatacacagtatgtaggtcatgagtagtcatgacacctcaaatctggcagaatgaaccgacttttacatggggagaaagttgtagagatgggctgatccttattctcttacgatcaatctcgtccaatgaaatctacatgaatataccatacgagttaaaagtgattatcaataaaaagaattaccacatgcccctttacaagctttctttacttcagaaaaatattggaagtattatggtgaattattagtacttttaacatgaagcattatggtgaattattaatgtacttttaacatgatctacctgctgctgcaattagtttgaatttgggtgattgaatttcagaaagttagaatacattattgctcggagaagttggagattctaagacaccatttaccaaacatatatatttgtattaccaatcaccactttcactttgaacttaaaagatcagaaaaaatttaaaagttgggaatataagttgaattatcaattaccaagagaagatcctcatcagtaccgaaggatttccgggcttcctcaaggcaatctgaagagatcttaatatgtttcctgcaccattagaattcgtcactaaaaaaaataagcagaataaattataaagaacaattaagaatgttcgaaaagtttatgcatgaacaactgaagggtttttgtttttaaaagtcaacaaccagatacttaaattcttcagaacattttaccattccaagtagattttggattaatagaaaggatgcaaccatgaaatacatgagatattacctagaactggcaggatctctaatctcaaactcatctgtttcggtgtcgtagccacatataatcacatagtggcctataaaagaaaagagaatttctgatgagtatcatttatcatgactcaagcctaattgaaggaaacaatcaaagacaaattacatatagttaagaaaaaaacagtgatgaactaaaaatacagcaggtcctaatcaaagaataagatcaaagaaaagggaaggtcccattcccattactatacggtgaagattgaaaaatggcaaataaatgaaatgtgacagaaatagctgagaatcatagaataaaaattactagattcccaagataatggacccaagttctaaaatggggctctctgcctaaaccctataatatttgtaggaaactcaagccacaggcctaatgggagaaaatcacaggtctgctgtttgagctacccgtcattggataacccaaactgatcttttgaacaatcagcacaaagcacactaattacaaaattagccaaatgtggagtctcaaagagaaaggcaaattaacattcagacaattagatatcataaagtgcaaggtcaagaaaatatcacttcaaaaagtacaagtcagcaattgcaatcaaatggtacagcagtacaatttcagtaccctcagtctcaataaggcatgttacagtacatctataaacgaaaacaagaaatgttgctaaccagtgtatccagaattgatgtcactgatgtctgagataaatacatccttcagccaagaccgactagagcacaaaattttgaagctataatcagaacttgccagtatatatacattattattagaaatattggagattttacagtcgcccaagaccgaaaataaaaagataagaggatattataagaaaattagacctcaatttgtattggtcaactaaagcaatggcgatatattccccagacaatatcagaagagaaatttcttctatgctgagtgacctgcactgtgagagaaaaaaaaatttccccaatggaagagaatattatatgtaggcaaaaaatacgacaaaatttatgaaaatactaggtctgttcatatttcttactacaaatatatggtacatacttgtatgttaattccagcttccagtgattttttaaataacatatccactcgtatcagatcattaggtaattgctcctacaccatattcaaactgaatttttgagtattatgaagatgagaaaatctaataagtacatcaagtatattaacacaagaattaagaaaaataaaattcatacaattcataccaaattaacaaccaaggctgaacacgaaacaaaatgaaataggtatctaatgcacagaaaccaaggttctactgagttaaatgtatgcagtaagtcggtggagccagaagatacatgtatttgagaaagaaaatgttagctatgagagttgggtacccaaattaacttcttaattaataggtctatatttggataaatataataggagtttacaatggtttgggtaattaccaatttgtactaatggcgtcttgttgggtataggagttctagtttgtattttgtaaaatctcctgtggatgtagtatgtaattttgctaaattgtgtaaaatagtgcgtgcctattgtgcgtgtgtgtgttatgcttgatgcagtatatagagggagggctcattttccccaattggcattagaaccaagttatggatattacagcaaagctggtgacagatatcatgatttagccaatgtttagaactttacatgactaaaggtatagatttttgtagtgtcgatagggatacaaaggagaggaagtgttagagtgaattctaaagtagtgttttgagcacacatagttatgcactgagggaaattcacggttataacatgatagtcaagcaatcaaagaatacatagtctagatgagaaaagagtataacatgtgcctatggagtcgcatgatgttgatgactttgagactttaaccatgactacatggcataatattataataatgatgatacactccatggttttatagacttgtgatgtagaagaaaaacaagatttaaggagaaaaaattcaggccatctgattatgctcttgctaggtaatgtatctttgacatagctcttaaagcttcttacaagagtattttactaaaccacgacacagccactaaaaaagagtagcgataatgagtgaatcaccttgtaaaatgtttcaacagaataatttgggtttgctccaaatgttactgtgtagtaggaaaaactaacagaaaacttctgcaataggtatgccagatcaacggtccaaatgctgcacacaaaatatcaataatgagatctgcgagaacttgttgataccagcttctatctaaaaccgatcaataggtcagtgaatatctaaacacactcaaaaaaaaaaaaaaatgcattcaatctacttgagaagcaagaaaataaaaacaagcttatttgttgttcactagttctttttgctcgctaaatagttctggagctaactcacacaacatgcataagctatgacatgcttctaatgcaaaatttacttttaaggacctttaacttataaaaaattcccaatattcaaggtgatcctacctttaaacccacttcatagaagaatctagactcatgttatgccatgatggaagacagcaattgggaaatggcaatgataggtgttaggctgtcagctatagacaagtggacatttaaacatacataagtacatatgtatataaacagagagggagagagatctcaacacagaaacgagatatataacctacgctttccatcatcaaatcaattacaaagaacttacattttctaccttgaaagaagcagcctaatttaaactggagtatctattgtctataacatgtaatataattataacaatgtctatactgaggataactaacgatacatccataggataagaaacataaatactgatgaagtaagataagttaataaaagcttctatcctccaagtctcaaacctttcaaaacggtttaaaagtttcagtacatatgccaaaattagaagttaagtagaaaactatatccaacaataaaaaatattcagttagcaacacaatcatgaattaaggatttttgactaacagaccagagaactgagttttaaggtttctacacatacttcctccaccaatttctggcttacccaactctggaaaatcaaccagctatattagaacttatttattgaaatgaagttcaaaatagaaaggaaacaacaccttgttgtgcaacatagctctgccaacgactcgatgctgtgaacattgatgctaaaggttctgaaaaccatcagaacacaagcgagcccacaatcccaagaatataactgatttacatgcggaacctataagcagcatagcaccttactcaattaaaacatgtgttacaatccatattaacattccataatattgaacaagaaaaagttaatagccactatacagggtatcattcagaaagataaaggcagaatcactggcactcacatcaacaatatacgaactaggcaaaacagaaacagagcattttccattggtagataacttctcatgtgggtaggattctaagaaacttgaacgttctctctttgataatgctgcttcctcttctgccttaagattcttattaaacagaatatataaaggccacatgagtgacaaacttaactgtagtgttgacacttcggaacttgtaaacacaatttcagatgctgttttaactcaacacgtattgtttggacaatttcccaaatagtgtttgaaacgtctttagcatcagaacctattgcaatttcaatagaaaaaagaaataaggtttctccatttttgaatgtgcaatgctgtgagcataacaattccatttaattcaagtcatattctatttcattcaacaaacaacaccccatcgcttttcttgcattcaatagaaccaaagcttgtacctttatgccagaaaaatatgtaataacttaaaaaagcagggaaacttttaacaagtgtaattgaaaatttacaacatagagctgggaaaagaaaagattactaaattgatcaataagcccaagatcaataaaaataaaactaatcaccaacaaacaattttcaaacagattatccaaccaaatagtaaagataacaagaaagagatgaaaagatcataacaaatggaacaaattagcattaataataaccaggaatctttacaccctcgccaaatcctacatgcccagatagagttttggatcaaaaaccaaaaattcaaatccaaaataacaaacccatacatatagatatataaaagaaaaagaaataaataggaaaaaagaaaacatgtatagcgcatgagtattaggaaaaatgaaagaatggaaagaaatattcatacctttttagtgggaaagaaaagaagagttagttgtacagaatgagttcaaaggctttcatttattctttttcgttctacaaatttctgaagaaaaaggtttcggaattattcggatgatggaagcttattgggtggatcgtggttagctttggttgttcgcctacctgtcccaagtcaaattcctgctttctttattacttttccgttcgctctttcaaagattttacttttttttttatttagcggtgattctgataagttgtttccatttcttcagataagtcctcttttttttttttaatagataataaaaaattataatacatacaaattaataaatatatatatatatacataataattattaatggaaacttttagtcaaaatctaccaattatatcaaagagaaaactacaattaatgtcatttatttaaaaaaaatattaaaaagttaaaatttaaaaaattaatataaggtaagaataaataaattaatataagttaaatatgagaataaatatagactaaaaaattggaaaaaaaataatatattgtacaataaacagctcatcagctcctcaattttgaatagtatgaaaagatcaaaagaattaatcgataaagtaattgctaaaaagttgacttataataaaaataaaattaatttcttccaaaataataataataataataactaattattaagtaattaatgtagaaaatctactttctcaaaaaaaaaaaagtagaaaatctataacgtgaaatgcggctatcaccgccaatatttcagcttcctcacacctccgacacggcagcgcttttagtaagttctttaacaaacgagactccattttctgaagtctaaccatcacaacacctcaaaagcccaaagagaatatcttctccgacatagaattccacaggaaaatttggagttggtgaaataatggcttagaaattagctgtctcaaatatgaagcttcgaactcattgtagcctgaaatgttaagtatcatagcctgatgtaaagtaatctcttaagaagacatggttgaacaattcctaaaatcagtattacttaaacagtaacttaaaggaacattagtaaaaaggtgataaagaaaatccaacaaagccaatataagaaacaaaaaatagtaaaataaaataaaaagtaaaaaatataatgaaaacttatggatgattatgatttgattcatcgcatttgtacagaacaccgaagctatatgaacgttggctgatattcatccacggtggcaggagtgatttttcagtcgttgaatggataagaggctatacaactaagactctgagttttcataatacattatttcacttatactggaagtattattgattaatttacaataatacttgttgtgaattactctattattttaataagcttaaaatagcattattattttaatttcataatttgtcacttatattgaaaccatt

SEQ ID NO: 15797 - DNA, 14619 bp, Cannabis sativa
actgatatgataatctacaacatggtttacttgcaccttggataagtattgtgtcctttccagggcattggtttaagtaaaacttgggttggatgcatggagtatgcattggaagggaccgattggataagatatgtttttgataacaaaatctaggcttttctttgtcgtaattgagttcattggtttttcctctgtccaattcgtgtaataatcaaccacgactatagcatgtttgactccaccctttcccgttgggaaggacctaatcaaatctataccccacactgcaaatggtcacggacttgtcatcgacgtgatttcatttagggggccctcaggacgtttgcaaatctttggcatgggttgcacttccagacgtaatcaatccagtccttttccatggtgggccaagaatatccttgccaaatctggcttctattttactcacataaaaccacacttcatcgtttttcacctcactgaattttttttcctcataacagtttatgcacaatcaccccgaaaaatttcaaataactgacattccaaaaaactccaaagggagttttcttgaccttgtcggtcaacttaaaagcttcgaacttagcctttattgaagtaaagtacatgttccctctgtaagtgatacgccttggaaaatgtccagacaatgagagaatgagttctggagccatctgcatttacaaacaaaagaatgattattaattggaatataaatcgcacaaactcgcaaaataacacatacaaattgcatagaatcgcaaaacaacatgtatacatcgaacaaagatcgcacaaacgtcgcttaaaattgcttaagcactgtttaaagtttatgcaacaaaatcacaaataatatcatatgtacatcgcacaatatcgccaaatatcactcaatagtacaaacacaaaatctatactagctactcgcacaaaattgctcaaaaaattgctcaacaatacaacacacaaaatctatgttgattactcgcataaaatcacacgatgtcgcctaaaatcacaaatcaacatgaacacaaaaatcactttaacttggcatgattggtcacgcaaaattgcacataaaccgtctaatgtcgcaaaaatattcaaaccccaaaaaattatattctgaaatccaaattcttccttaaacataaaaaattagtaatcgaaagtttaatcattaacatatttcagtttaatcacagattgtgaatttaaagattttttttaaaaaaaaaacaaacattgttcgagtgggtgtagtggaccgtggcggggacagcgatcagaggctagtttgagtaggtctcgtgggtcgttggggttcaagtgagtcttgtgggtctcgtttgttgcttgggtctcatttgtcactgtgggtcgagatggtctcctgggtcgagtgttgccgtgggtcaagtgtcaccgtgggtcgagtggttcaaatgaaaggggtggttcgagtggtcaccgatcctagagggtgggtttggtgcggtggtgagaagaaagaactgagaaaatgggagagagaaagaggggagagaaaatgagagaattaaaaaaaaaaaaaagtaactttagaagaaaattcaaatttactatgtgtaatatttgagtttaattaaacacataattaattgtttagcatggtttatcaaattttctcttaaaaagaattttcctataatataaatttatataatctgataggctgagagaagagaagggcaagaacaagaagaatggctaggagcatctcatacataacaggctcccagcttctctcactcaaacgtcgcccaaacatagccatcatagatgtccggtaagccttatatatacatatacttcatatatatattttgtaaatttatcaaataattgattttagtctgtaatttagggatgatgaaagaagttacgatggccatatagctgggtctctccactacgccagtgactccttttctgataagatctccaatctcgttcagcaagtcaaaggcaaagatacccttgtcttccattgtgctctaagccaggtttttctttttattcgttgattttaatctaatgggtattcctttgtttgattgaactctagagttttcaattcatccttttatcttagttaatgattagtcatcaaaattggttctttgcttttcatatagagttcaatatgtcccaaaaagttactatttcaattcaatttctaattgatctacttgtaattgaactacccttcgtgaaaaaaatataggggttgatattctaataagttttggacaagagttcaatagtttgcaattattttttatcaaactctattcttaggcattagccgttgacacattgaaatcaaaagcctcattctctcataacatctgaaagaattgtcaaattttcatgaattggctacttgaggctactagactggttaggctaagtgtatgtgagaaaagaatgtgtggttcaaactgcctttggacaaagggctaactgtgttgttagagcccctttattggaaaagtcaagttgcaatatgctgtattatggtataaatcttgattgtttatgactgaatttttcctgaatggttatcaaacccgggatgtcctggattcaaagatcaaagttatgtaagttgctttggtagaaaactctaatatatttatgtgatgattgtgcttgatatactaaaagtaatcagatcatagactagctgctatagtattctgtcgtatcctaagcctcataattagtggttatactttagattgatatatttcaaagtttcttataataattcgatctaaatccatgtctaacttgttctataaggtgtcgaaaggcaacgggaaatttatataaactactatttttggtaaatttcttacacattcaagtttaaagtttttttgttacatttctaccgtattcataaaaataacaaaaaaaccatatgaaaataataggataataacattctaacagtatcaaaacaatataaaaaaaataatatgcaaataacaaaaaactaacaacaaaatagcataaaaatatattaaaggaccgtaaaaatatttaaaatttgttgttgtgttttttttttgaaataatcccaaaaggcaaaccatcaagcattttggaaagttatatgaaataattgattttgactgaccaacaatcattcttacctagagtttgttggtaatgttgtaggttcgtggcccaagttgtgctaggaagttagtgaattatttggaggacgtgaaggatgatgctggtataaaaaatgtcatggttcttgaacgtggcttcaatggctgggaagcttctggtcgaccagtttgtcgctgtaacaaagtgccctgcaacggcgagaatgcatcaggagtttcttaaatgacatctgtgctgataacgaagacatttagatacattgtatcggtttaaacaaccatatccatcttcgcttataaccattaagcttcaatagataaacagatgccttattttgataagatcccaaacataataaacaaatataacgaatgagaaatgttggacaaagtttcaatcccccttttcattgcattgttctttttctcttttatcatctaaaaatcttcaagttattgttagctagcagcaatatctgacataaactatattggataccctttgtattctagtgaaattatcattttcattctaaaaaaccaatgaaaaataaagaaatacaattatacccgtttcgattacaatttaataaagcttaatttctcatatactattcaaaacattagacctagaaacaattttgagggttatattattaatgtaaatatcaaagtattaagagtatgagtaatgattcatgcacacactcaaatttatgtataatttgtaatttgtgtatatcaccataaagagtgttgctattagtacatcttaattttctattcacactgttgtcgatacaatcaatattggatgccacatactgttgttgtagagaaagagaatttttgagagtgtatcactgtgtggaagagatatgctcactactctaagataaccagtctgtatcttactgtatacattttgtaactgtgttcttgattcatatcggatgagctcaagatagtgctcaacaattccaatcaagcctccaatcttatggccataatacttgggcatacaaaaaaatgggtagattatggaattgaagccaaagaaaggctatttcaaactcaagttttttgaaatccccaataccaaccggttttgcaataagagtaatattgttattaataagccacagactagctggaaacaccagtcttgtttttcgactcacaccaaatcagaataaattctgaattttccccacatttttgtttccaaaacatgttaaccattgcgaccaaatgatcttgtgcacttggaagtcaaaacttacctaactaaggttttcaccacactttccgcaccttccatttggtcgatgagtttcaattgcatatgggggatatcatccccatcctcttgatccattgaagaagatgaagagaagaaacaaatggaaaaaacaactaccaacactcacctcaaagaaaggagagagaagtggtagaaaaaaatacttcttttttttttttttatttatttatttattttatattaaaagtttgggacttctatcaaaaaaagtttggtacttaagtgctataataacaaaacaactggtactttaaccacaaattagctaattatttaatataattaaagaactaactaataatcagtcaacagttctgttaatgaaattggattaaaatgcagtaatacattgacagaatattgtagtcctatttctctgttttttacaactttatcaaggtgcaatcctaaataggaaaatatcatgtccctctaaagataaaagatgatccagctcggggtactaaacacaccctaattcagtgtttctgagatttagcattacatacatgaatatgtgacctaatataaatagaaactcagagtgttatgataaatcaagtaatgaaaaaataaaataaaaaatagcaatataattattgatccttcaaaatttatcttctctgtcctctatgtcccaaattcccttttcttgctgaggccatgtatcgaccttggttcctggtagtagcagtactcccaaacttgagaggtacaatttgctcaatgtataattttccaggaaagtttcttttatcttttgggagtgattgcaattgtggcaaccaatacgctgcatactcaccttcaggatcatatgtctgcgcctaaacataaattaagagtaaaagatgtttcaatctcttctcatttaattaagccacaaatttcattttctagcttatcttttcaaatgctaaaagcacaccaattattatttcaaaactaaagcataagagacttacttgtttggggatgctgaagtaacgatcttctctgggatcatttccaactcctaaaattaaaatgcatgttttagaatatgcattcaattatgttacaaaagtacaccatgagaaaatgcagtataaatgtttggaactttccaaggttatattatggattgcgcttgataattaagttggacgattgtctttatcaaagaaatatgaagtaaaaagattctgagtttctcaacaacaatgtagatttgtatttgacatttaatggagagcttttttgacattttagtatgcctcatcttaaaacaaaaacatgtttgttctttgaaataaaaagtgtagacaatttcaagtttcaactaacgttgtatgatgttaggcgagcattcataaaaaacatattcatgaaaaagatccccccatatattcaggaacccaatctagtacttttgcagacacacatgaatgattcaaaaatatgaacaaagaattttctcaacagaaatatatgtgaagttaaggtacatacctgccccataggtccaatttccataattagagcatggatcataatccaaaaggcatgtctcaaaccattcagctcccattcgccaatcaattcccatatctcgaacaagaaaggaacacacaatctgcataaaatttctaatcattttttaatgctcgtcaggctacataaaactttgcactattagtcttctaattagaatcttgcaaaccatcaaggttacctgtcgtccccgattcgacataaacccagttgttgccaattctttcatgttggcatctatgatagggtacctagagatttaaccaccttatagtcagtacataagtaagaagcttaaagtaaaggtagcgtaagaaccaaaatctattaaaatataacacaaaggagagagagagagagagagagagagagaatggaaatatcactgttggtggtttatctttatcatgcatatctaaattgaacattcactttcatcttgttagagaatcccacattgacaatgtgtgaaaactaaataacatacataaaatacatggattactcctctcattaaaaattagttttaaaataaaatccatacatcttacattctaacacgtcatctgttttactttttataaataaataactggtagggatagcatgttgtttggaaattatctatcatcttccactcaccaaagaaaacaacaaaaaattctgcttgcataaaaagtaggactccatctatggtaacacaatttaaaataaatgcccatttacagaaatctgagttaagcgatatactcagtactgtggaggaaagatcttaaagaaaaactaccctgtagtgccatctctccaggattcaaacaatttgatgtcttgactccatcttttctccacattccttggtcctcctaagagaaaaaagtaatgtgacacaagcaagagacaatgaagcgaagaaaaatttaaatttttttcacttcaatagtagttgattttatggccaacaagcactaaattactgtataaacagttagcaagcagtattttaacttttaaacacattaaacattgtataaatcaaatgagaactatatctacctaaatggaacagggcattcccgtatttgacagatagaaacctgaagtagtccctccatattagttcaaataaaaccctgttaatattaaaaaatcaattaaccaacaatcagtccatgtcaactattgttcctaaggaacgaatttaggggctttcatttcaattttcgcctgaaataaatatattgacagttcaaaatctccaaactaagttaagcttgtaaactgattgccaacattttaaatgggatagcgaagctattaccagtatgtagagtcatttgctagcctctccttttcatatcttttgacctggggacatcaactgaaacctcatcaaaaatcagtttcgattttcagtattctaagtcataatgcagaatctgtaaacatataaagaaaacgaacaaatcctgacttcttcatgaattaagcgaggggagacacttccagaagcaagccatggagaaaattttgttgaataatcaggtcctaacatcccatttctggtctctttgtatttcttgagcaaatcctggaaatacatggagaagatgatacattattgctacaactaatggtccattgaatcaggtttccagaatctaaagtttttaatatattctacagtattatgttttaattctaaactcccctctttggcctgaacatggttctgaaaaagcttatttatgaattgaaaattgtagtactgaaatattcttttatctcatcaatgatgctaccaaaagccaaaacaaaacacaaataaagaagaagattgatcaacaattatagtttatgagataggatctattgaggattgcccttcctattgaggatttcaccggccgtgtcaggcggttgaaatacttcagcaccaaatccaatgacatcattaggtaagtatcattttattttatcatgttgtattcatttatttttgtcagtatcaatgtcttctatagcaacatcaccattctaaccatatcaaataagaaacgaaaaatctattaacaaaaccaagtataatcagaaatatagtgcaatatatttctcataccttcttccagaagtactcgtacactcggctcagtgcggcactttcacccccaacaaacttcattcctttactgacctgcataaagtggggaaaacttcagcaatttggcattttcattctttttcagtaaagttaccaaggcttttcaacatttctaaacagaaatctaattctagacaaatgttcatgcaataaatagctcggcctataaaattacatcttgtgagcttaatccaagactctccgttgaaggaatacatccccaatcaccaatgctgggtggtggtggcccaagagatgctggcatttttatgcagccacggatagagcattttgattcgactgcctgcattttacttcccacaaacaagattagacataataacaacacctgctcgatctggaaattcagaaagctaggagtgcaaattattaatttttcaaaacgtaataagaaatataattggcatgccttacgaaattgcgtataaacatctggtaaactactggtggaaaatggaagatcatcaatgtggtacatagtggcaccccaaacaagttgtaacttggccttgttggatcgctctgaagatgattctaagacaactttctcaagacctttgctcaccaacctttcaacaatcagctcctcactacaagtttctttttgggcatatacctgactcgatcaaataaaatagaaatacccacattctaacacatcaaaaacttatctcaaaaataacatcagatcagagctgagctataaaaccaatttaagtctgaaaatcacttaacaatatgtgctccataagttttggcaagactgggtaaaatttcctccggttttccatgctttattagcaagttaagtccccgcttggttaaattctttctcaaatcggccaagcattctatgagaaattgtgctctcaaagctgccaaaacattatacaacacgacattgcatttttaatgttttgaaaagaccgatttggaaactgtggattcaagcacttaatattccatttcatttttcataattctctcatctataagtttcaatttgcagaaaataagaacaatttcgaaaacacaaaacggttacatacgtacccccagttttagggaacccaaagtaatgagtagcaccaaaaagccgaggatcgacacagtagacaggcaaaactgactcagaagacacccatgctttatacaaagcctcattgtctaaaactctaagatcattcctgaaccaaacaacggcgactccattgccgctcctcctccttgtagacgaagacaaaaagtacctctgaaaactctggtccgcgattaggtccacttgatcggtttccaggtccggaaccttgaaaattttagcagagctagccctcctgaccgggccgggatcagagccggaactcatcggattcgatttgacgaagtgtacgagtatcgaagtcctagagtttagctttggatgtgaatttctgataaaatatgggaaagagacgggagtgagttgaagcagagaaatggccatttttgtagctactgaagagagtgaaaggagggaactttttctttaatcacttagaaagatgacacgtggcattaagacattccatgctacgtggttctctaccagcccaatatgagacttacctgcgatttgtaagaatttagaccacacgttaagtcgttttcataagtttgactttttaatttgtaggaaacttttatctttattaatttttagtgggaaatttgaggaatatgaaagaagaatcacttaataaattgaaaaaatatattttaaaaatttacaaaatttttaaaaatgttacataaaattaacctattaaatttctcttaccaccctcacttgaaatatcccctcatttcctccccatttatttttatttcaaatttctttttataaaactaagacaacgcatgacttcaacatttcaagaagattgtatttgttctttcccaattcccacctagaattaattaagctccttaaaagaaaaatgttgtacgtatttttttccaacttaaattcaaaatttggcgggaatgaatttaaattagtttgttgattatagaaaaaaacattctatgtatggattagattaaattaacttatattttgatgaagaatttgaggtttttatatatggccatttgatggacatcgaaaattgactataaattcgttgcattaatttggtatatgttattttcaggtcagttaatttttattattattattattattatatgctagttaatgcaatttttgtgtgtgtggactgtttactataacttaacatatatacatatatacttcaaactgtgttgtatatatacatgttttgctattattcgttatttgttatagttggctgagaaagactaagtacaaaccgcaccaagatcaagaaacgcgtcgttttgtgccagctcatcaacttgtctaatgtctgggatcgattctcaagagcccaagaaaatcaagatcaaggaggcacccaccactgccacggcaacgtcgaccaccacctccggcgccggaaaggaagaaaaaactgatcataaagaaaaagacaataagttggaccccgaaacgacgtcttccggcgatggtgatcctcaacgccttccttttgtttctgagttttatgcttatcttcgcgaaatggaggtatatatatatatatggttttttttcttctttagtttgtgtacttttgatgtgtatattaatgtattatatatatatttataataatatgaataaggttgacccaaagaggagacccttacctgattacatgaggagagttcagaatgacaatattacccctaatatgagagcaattttggttgattggcttgtggaggttgcaaacggattcgacctcacatccctagaaactctgttcgttaccgtttcatatattgataaatttttatcaatcaagattctcaatcggaaaaagcttcagttactaggagtttcttcaatcatcatagcctcgtacgtttagcctcattcttctgaaaaactacattattcttattattatttcaaacttaattgtatatatatgtttaaattagtaatattgcattggctgatgatatatatacattgtactggtgagaagaaagtataatgacgagattatcccaccacacgttcaagatatgtgtcgtgcaacagatcatgcttacactgtcgaagaggtaaattataaattaattaatccaaagtactattttgaatgagttaattataattttgttttaattattacatttaattagtttttttatatatatatatataatattgtgaagatagtgaagatggaagctgagatacgtaagactttggaattggataatgaattgaggagcggccaccctaccttaataacatttatacggtacgagaaatatgtgaaaaaatatctgttaattaaacaatattttaactgttagccttttgtatctatatatagaacctattctaagtgctagactgattgtggtttctttcaatttttcggtttgcaggagatttatgagtgttgatgaagaaagtttagaagtcagtttaatcagacattatattgatctataaatattatgtatatatggatgtctgatcatatattaacatattatacacatgcaggacaaacccaagtatgaattcctgtgcgtgtatctttctaagctagcattattggattatgattgtactgtgaaattcctaccttctttggtggcagcatcagttatctttcttgcaagactcattgttaagccacaagctcatccttgggtaaatataatagaacttttttactataattatattcgtacttggaactgtaattatattttgttatattaattaccagacattatccctgcaaaaatattcgagatacaagccgcccgagttacagcaatgtgttgttagtttaagaaatgtgtatcttggtataaaatggaaatctctggtggctataagagaggaatacaagcaggtacaatatatatatatatatatattctatttcgtgttataattgtttatatatgtatatatattatatatgatttgcttaatttgtctagataaatgaaagttaactaataaacaactatatatgtatattttggaacagtctgcggaagacgtgtctactgttgcagagataccagcacactatttcggagacattattattagctagctagaaataaacagtgacagaagaaatgaagtaatttttggatcatgatgacttggaaaatagggtttgtcaatacaaaatacaaggcctttgtgctcatgcatgtagccacgggtattagtatttttgatctgaaatacattattggaatttatatatatatatatatatatatatatatatatgctgatctacatgaaacatgtttgtaatttttgtaatgatgattttcttcatttgtcttgtgtatgttctcacgattttattgactgaaatctagctagtctctctccaaataaattaatatcaagaatgatttcggatctaactgtaatttcagatctgagccgaacaatttttcattgagttaatattaagatcaaaattaaattttgggtgtcaattttattcattttacagatacagtatttaaattttgtcaaaagaatttgaatgagaggaatatccagcctaagaatattcagtggtcccatttctggtacaggttgttaggattaaagatctcgaaaagatttagtgtaacttttatgctacagtagcatttgtttttgtgtttttagtttacacgtgtaatgacctgaaaggtccctttcccgttgtatgctatgcctatatattaatgaatgcactcacagtctcatttgagttatgttttctatttctataaatttttaatttcttcacttggtatcagagcttttttgccttcgcctgagaaaatcatgtataccaactagagccaaacccctaaaaatgtcgaccctaatgttcagacacctaccaacaacacagctccaaataaaactaccataaactcagttggtttgcaaattacaacagtttcgaatgctctagttgagtgaaaccctttaacaataccttaagtcagccattttcttcgaatggactatgaatttcaccctatggaaaaccatggtgtttaccatcattcgtcccaccaattggatggttacttgaatggtgagagagcttgcccacctgagtttcttctagaggaggttggagttgatgactcatcaagctttggtttacaaccaaatccaaactctgaaagttggattgttcacgatcatctactgatggagtggctatacaaattgatgacataaagtatagcttctgaggctatatgggatgtaaagcaattgcatcactttggacaaccttagaagatctctatggagctcattcgagggctcatgctgatgacatttgaaataaaattcaaactgcaaagaaagggactatgaatatgactgactatcttagacaaaagagggtttaggcagattctcttgctttgactggtgagccacatcctgaaaggcatcttgtctccaatgtgcttttcgggctttacattagctatttgccagttgttcttcagattgaagacataccacaaagaacatgacaggaattgtagagcatttctgtgggttttgatggtagattagagtgattgaatgaattgattcctcatatgaaacttctcgataatgtttcaacttctccatctgctaatatggcacaaaaacctcaaaatcccaactatcctcaaaagccatacaatcccaacaactctggaagaagaggtttaagtggttatgggaattgaggaggaggaacttccagtggtggaggtaaaaactcgaagccaatttgccaaatctgtggtaagtatgggcattctacaactatctgctacaacatgcatggtgattcttacatggggcaagttctaggcatggataacagctagaaaaacaataataatttcaagctatagtgacgacactagatcttgtcaaggatgattacttttacattaatagtggagcaagcaaccatctaactttggatggtgacaaactgtcacacaaagctgagtatggtggtaaggaaaaaggaacagttgcaaatggtagctgttatacccatattttaagtaataactgaataggtctatctatgcaacgtgtgtactaaagaaaggcattaaatgatcctttcgcaataaaagacatacactacaagaaaatcatcttttgccggcgcattgttgcgccggcaaaagtaacctgccggcgcagttgtgcgccggca

SEQ ID NO: 15798 - DNA, 7068 bp, Cannabis sativa
atatatatatatattttaaattatgagttttttaaaagttacttattgtaatgaaaatttaaatttgcgtaaaatttgcagttgacaggcagagttgaagagaaaagaagatggtctgatgggattcatcaggcagtagaggctaaagaaggtctcaaaattcaggtctcacaaaattttacacaaaaatttccattcttgtaatttgtttgttggaatagatttatctgattcaatgctctaatatatggcatatcttaggctgattcagttgttgtggcacaaataacatatcaatcactattcaagctctatccaaagctttccgggatgaccgggactgcaaaaactgaagtaaggatgtttacttatacactaatacttcattcaactcttctgtcgttatgtagaatgcactccctttctgatgtcccatgctgttttttaggagaaagaattcctgaagatgtttcacattcctgttatcgaagtacccacaaatctggcaaacattcgaaaagatttacctatccaagcttttgccgtgagctatctttaaatgcattatgttttttatttgatacttaatcttcaagcatgtctttacagactacagtcagcttgatttacatgttgagttttgcaatgatgtagactgctcgagggaaatgggactatgttcgtcaagaagttgaatacatgtttggacagggtcgtcctgttctagttggtactacaaggtaaatgtcatttactctgtctgtggattgtggaccaagatatggtgagattagtcctagcatatgctgttttattatagcattctggtacatatattcgagtatgtcatgtatgtgctacacatgatattttaaatgcataatttcatactccatcttgtttcaatgtgtagacgcacaatatgtcactatatggtcgtataaaaatgcataatttactcaatgaaaattcttttatttttaaatgataataaaaggaatattgacatgtatatgtttaagccacgcaaaatggaatttcgtggataacattgaatatttactggtgaataacaccatcagctccatacttcccaaaggttaccaacttgagctcgctatgaatgttcaatggatttatgggaaatgaaagaaatgcattatgcatgttaccaatcaaatttttagacagtgactgtgcaacttttataatatatacacatgttaagttagtcaatgccattgttaatttttactctaattaacattataattattcttcatgatgtagtgttgagaattctgaatacttgtctgatctactgaaggaacacaatattccccacaatgtcctaaatgctaggtcaaaggtatatagatctaagagatttaatagactttatgttggattatttgaaatgatatatagattttctttgcacaagtgttattctaatctctcttttgaaaaaaaaaaaaaagtatgctgcaatggaggctgaaattgttgcccaagcaggacgaaaatacgccatcactatttctacaaatatggctggtagaggcactgacataatcctgggaggaaatccaagggtatgatgcttgctcatttaatgaatgtaccacgaaaagaagtgttatctttgaattatgtctggtagttggtcacagttagtaatgtcaatattcatatatgtatatatatttctcttcttaaaatctaatgtctttattctaaagctatgaggatgggacttactccatttttttttggctgtaacaaaaatagatgcttgcaagagagattattgaggatagcttgctttcatttattgcaaaggaagcctctgataatgaagttgatcgagatgcagttaaccaaaaggtgatactttgggtttctaacttaataagcagtttgttataaaaaaaataattccacactcctaacaagtagcttttgtttctaattaaccttctaatgtaggtcttgctgaagataaaggttggaccatcatcactagctttgttggctaagacagcactcatgggtttgttatcctcctcctcttcatcttgtctacgaatatatatgtgtgtggtggataagttgtaatgatttacaatatagttacggaggatctcccataaattttgaagaattttggatgtcaaaatcaggattgaaacatctgttgcataagcaaataaatattgaaataaacacgcgtagagctatttgaattctgatttggtattctatatcaattggaatatcctaaaaaagtgtgggaggtccctgtaactacactatacatcatcatttaaaagcatatataattaaaaacaatcactaaccaacaattttctatatatagtaaagctcattactagtattttatttgtacattgtttgttgtgtaatataggcattgccagtcttgtatatgattgtgacaatttgtaacataacatatgaatttttcagctaaatatgtatgcaaaagtgaaggtaagagctggacgtatgaggaggcaaaatctatgatatcagaatctgtggaaatgagtcagtcacatagtttggaagagctggagaagttagtcaatgaacagtctgagacttatcctcttggccctactatagcacttgcttactcgtcagttttgatagactgtgaggtccactgtttgcatgaagggtctgaagtgaaaaggcttgggggccttcatgtaattggcacttctttgcatgagtcccgaagaatagataaccaggtttggcaatttgcatttagtttaaaataaatgaatattgctagaataagtcatcatttttaccatgcttgttaagattacttgggcataaaagatgtttctccaggaataaagaatttagatggagttggatctattaattttttttgttatctgtacttgtgtatttttctttctcttcacctttttaagcatctacctaatatgaaattcatcatatcatttctttagaactctttcttttcgttttgtttttatttgcttatactacacaatttatacttgtaatgtctaaaatgttggctgtaataggaaagtcttacttggtgttggcacaaaatgaatctaccactatgggttacccatctctgtagctacaaaattttattctatagataatacagtaaattttaattttttaatttttaaaatttttctacctatgcctcttctcctttccactcttgcttaatagaaaatagagtattttggttgatccctggcactattactctatttctagctgtggttctttcacatagccagtttttatcttataagtatagtctgattatccatatgaatgtaaaatataaaacaaaagtttatgccatgaaaataaaaccacagcatcgtcaacgataagagactgccctcgtgaaaaaaaaaaaggaactgcagtttatgcaagtatcttatgatcattttaaacagtaaatacatttgtcatctgacattgctattcattctcaccacatgactgtacttccacgaaatattttggagttggattttgtagattatttttttttacgaagtcttctgttttatagctccgtggcagagcagggcgacaaggtgatcctggttcaacaagatttatggtgaggtaatgtcaaatatattttactctagcaccagaccaaacatctgatgtttagggataattagtggagtttcctcaatatatcttttattgctcagattctatatctggcagatatttacagtatatattagcaacactcatctctctctccctctctctatttatatttgtgtatatatataaatagtcactcataatacgtctaagacaattttagtacttttattcatgtaattattatttgtattgtagtttaccaaaatttttactccatttttgttaacagcttgcaggatgagatgtttcagaagtttaactttgacactgagtgggctgttaggcttatttcaagaattacaaacgatgaggatattcctatcgaaggtgatgcaatagtaaatcaggtaaatgtcagttggatgtccttttttgtttttcttactttaatgaagtggctttcattttttttcttacatttgttgatttgggtagctattggcactacaaattaatgcggagaaatacttctttaacataagaaagagcttggttgagtttgatgaagtattagaggtatgtttttgagagtaaactgggattcttacaaaacataaaagtatctgcatttagttgattgttttcatttctttttttttccaatcaggtacagagaaagcatgtttatgagcttaggcagtcaattttaactggtgataatgccagttgttcccaacacatattccagtaagtgcctctttacattttcacaacttcatttcactcctagccaattttagacaccaatgttacagcttcataaatcaggaaaaaaaaatgctgcattgttttttaccagacaaaaaaaaaactgcatttttacttgtttgaaattgcatgaactctaaacaatatgtgcaagaggatacgtgaactttgtcgcatcacctatccttgctagtttgtcgtttccaaataataataatagtagtagtttaccttggtacctcaaattcttagagttagagcagcttttgttggttcacatttataactgaaaggaaattttgattttgatttaaaattattattattattttgctgtccttttacatgaaattattgtcatgcaaacgattcacatggggatatcacaaggttaattgttttttcatgtgtaatgcttgtgaagttgtgagtgtacgtcaatgagaagagaaagaaaccgagagaaagagataaggaaagaacattaggaagaggaattgatcaagaacagggtatattgcattggctagagaaatggtataggaacattagtaagatgattgttaccttatttgcttcgtgctttattatttttagtttgtgtggattgtgttgattggtataatactatatagattttgtatccgtcaaatattcaattgttacttcttatgctgttttgtatatgcactcaagaaggtttttttataggtatatgcaagcagtggtagacgaaattgtctttgcaaatgttgatccgctaaaggtagtatggttaccatatggtattttcttaccaatattttctctatgatgagaagttagtttgatcatttgtctactgattttgatagcacccaagaagctggagtttggacaagctcttaaaagagttcactatagttggggggaagcgcttggatggtgagcacattgggaataattttcgttcttgtcccaaggatttcagttacattacacaagaattctgaaatgatacctttgcagattctttcacaggaatcaccacggaaacattattgaaatccctcgaacaattgaaggaactgagttcaataggctgtaatgaaactcatcttccagagttaccaacacctccgaatgtctttagaggaatacacaagaagacttcctcattgaaacgatggttatccatatgctctgatgatttaaccacgtgagtaaagttttgtgctcgtcaatattattaaatttcaataaagtcaattacttgactcattttctgtcaaatataggaatggtaggtaccgcgctaccagcaatatcctccgcaagtatctcggtgattttctcattgcctcatatttggatgttgtacaagaatctggttatgatgatgcttatatagcagaagttgaggtaaaataaaatgaacaattaaaaccctttcttcaagaactcctattatatttggctcagttgcccatacatggttgtggattattgcttttgattacagaaagcagttcttgtgaagacactagattgtttttggagggatcatctgataaacatgaacagactgaattcagcggtattcatctgctcattattttttgttctttacttaatagattcatttagcaatgaatgtagttggtgaaaatgacaggtgaatgtaaggagttttgggcacagaaatccgcttgaagagtacaaaatcgatgggtgtcgattcttcatatcaatgcttagcacaactcggaggctgactgtggaatcactcttgcagtattggtcttctcctatggagtcccaagacatctttttatcataattatgttaccatatcctcccattatttgaaagttaataattgttttattaaaattttgtaacatttaagttgattaaatccccccaaaaaataagaaaagatgtattaaacccaccctaagctcgtcctcccacttttgggaaatttgtacaggggttgaaaattcccaagtttaaattggaaaagtaactcattctcaaatccttgagtataaaatgtcatatttatgtaaatggggtactttctttctacataacacattatttttttttttatgtcaagtcgcggcatattatggaggtaatgaaacggaatagaaatgaattaatttttattttttatttggttgaaatttaaaatattgaaatattattctaacaaaatgttatttttacaattttggtgaaatgatcattctattttaaaattaaaagtataatcattttaattaaggggattttttttttaatttttttattatgtattttaaattttatttcattatattcttatttatattttcatttattaatattttgtgtttttattctttccaatcaacaaaataatattattttacataatgatatcttaaaaaagaaaagtgaattgcaaaacacttccaaatacatatttgggttgaaatgtaaaatgaccctaaatttgaaaactaagttagtaaatgtctactttttagaaaaattaagaaaatggtcaaatcttataaattagcttaaaaattataaaaatgcatttatcacatattttttttttaaaaaaatatataaataataataaaattaaattatgtaatt

SEQ ID NO: 15799 - DNA, 4867 bp, Cannabis sativa
actattaataccttttaacatttctctaatacataatagcaatgcttattataatttactaagacttctagttgtgcatatcgcgtgaatattattcccttcacatcttataacacggtgttaaggagtaagtagttagtacttcttagattagattggttatgtacagctgtatattgttgtgattctgttatgaacagctgtactctgctagtatatatgtagtagtcagtaactcaattataataataataatatcatagatttaatcaaaaacataaaataataacatatcatagattcattctcattcatttcgttgtataattcttcaatacacataacggccttatcagtggccacaagattgtttctactcaaattagtaaccagataagagatagagaatgataaagcttcatgctttattttgaaacataaagacaatgacacatgcaataagacccacatatgaagcaaaaaggcaattgatagatgctatgctacaaaggaacattatcacacacaatagggtggttttaaagcttaataataaaaacaaaaatcaaaaacaaagaataaacaataaatcgatttaagcatgggcaaatcagccatttttgcatgtgtattttattagaatcatttactctcataatgttgttgctccatctctacacatgcctttattcaatcattttctgggactggtgtagatgctgcttctgcttctgctttgtcatggtgaaactttaccacaatgcatgtaatattgtctgcactgccacgagtgaaagcaacttcggttaactttcgagctgctgcctctggttcttcttctgtacgagcaagcgaaacagcatcctgacacaatgcaatgtataatttatgtggtgctactaggctgaattggagtgatttgaaagttacagatggatcaaatgttgtggattttcattttctcaccattgttcaagtctaaatattgttttaacaccaatttacccgtaatcagaatatgctatgtagacataataggaagagaaggagcatgcttacctcatttgctaccacatcccacaatccatcacttgcgagcacaagcatttcaatttcttcatcaatctctaaatcctataaagagtagcaacacaattattagcttttttcaaatggcacgagtagaaattttacatttgaaatgctctatagcctatgataacattcaatgcataaagatacatctcacatattgctacagatacaatactgttaacgacacgtgtgcatcatttggacccatttacatgaagattcccacgagaaaacaggaaaaggagtgtagtgtacttcatgatttttttaaaaagattgacaagttggttcatacttctacaagtattaacttagaaacactctacgaattttgagtggtttccaagaggaaattaatagggaaaaaaaataatcacattaatagaataatttgtctttgtttaaaggacaccttgatctctggttctgccacaacatattgcttcagcatacggttgccaaaagcccgggacatagctaacacacctcctactctccaagtacctgacaagacaaccaggagaagaaatcccactcagattcatgaatatttatttccacattctcataaaatgagttcacagatttctgtacacattggctagcctaaaaccaagcattgtgcacacttagtgaatgacaaggcataagtaataatttataggttgtagggactgaccaaggcacttcaaaattgagctgcaacatgcatgtattcttattcaaagacacaaactaataacaagcaatacaactaataagagactctacagaaacaaatttgaaagttctaaatcaacattataagagtttcgatagaagaacggccaatcttgcaatatgtaatggaaatccgcttgtaaatttacagggacaataaattggttcaactaacgtgaattattggcttaaacaatttaaaagagccaactgcgaagttaagataactcagtgatccaaattagagagtagcagcatcttacagaacagaaataccaacatagggaaaagaaaaagtatttcatttagttatgggaagcacagtacacacctgcccacattaccacaccccctgcattttcaattctcctcctctcatcacttcgatttggtttatgatcatcagatagaggaatagctgctcaaaagaaaatgcaacttatttttaggcacattaacagttccaaatttctcagtttcaactttacatgagtaggcaatagaacatagtcaatatgcttatcattgtctaatgtcaattgatatttaacacattgtgaaatataatattgcatacctagtccatccttcgagataatggtacgtgaatctccaacattggcaacatatagatggttaccaactaagactgcagttgaagcagtagagccatcatcccgataagtatccctttcggaatccaaaaaatcactatcagtctgcttatatgattcacctgcaaatttaatcaaattacaaattagaacagaaaaagcccacaatacagggtggtaaacaagtctcttgtagaatcccacaccttagaagcagtttatataaacttaaaaaccaatctatggagttaagccagtaccaaacaggtatttgattaacatttaaaagatatacagtcctgcatctaagcaaagaaacagcaaattaaatgactgtatagagcaaaaaacaaggtatcaaataattgaacatacttatagccgctttggtatctgtcataaattgcgggtgcttcatgagattctcaaaaagatgtccttttaaatattcagcagcacgagctccaccatgtcctgcaaaacaatgaaataacaattagactactccatactaggtacatcggctttaaaataaaaatggtaataattagccaatagcaaattgtcagtgccactttatcttataaatatattcacaaagttgaattagaaccccggaagtgtagagaagccaatatcaacctccgtatatgcattcagtaatgtttagcttgttcttgtctttctacgccatatctctaataataatatagctctcaaatagcaattgtctgaccttcccagatgaggtaaaagataagcatcaacatgaaaggccacctattttcaaacccctaaggtcattcaacatgtctcaacatgcagctagtagatcataatttccacaatggcaacaaagactgattgttttcaaataccatgacttgataatttgatacatatccaaataaaacactgcctcctaatcctatacagcagtattagtctcatttggatacccattttaggaacttcttgcatgtcttcataaatatttttttaatgattctagcgtgtcatttaactctatcaaaaataagaataaatttgtttggtcaatccaatatacactcttgagaaaaataatctaaccatcaaatattccaaacaggcagactgttcggccgtcaatctttgttgtcttaacatcataaaaatcctccatagtcattctctttcctctgaaacttgagtatccccagctcaattttccatcttcactgtcaacaaagcaaaaacagaaaataaatttagtccaaaacaaaataactttactacattagaacaatcaaataaaaaatttgggtatgcagaaaataacatgattctagagtaaaattggaaaaggatgtgacgtaataaactcaagtattatccctgtccactacattctgcaattgcaacccagcatgaccaaataatatctatgtggaaaaaaactcacccaaataatatccttagccactaaattatgcatttgccacctgacccgacccaagattaaaatctatgcttagaagagaaagaaggttactcttctttgtgtttggtgctgaaggaaggagaaaagaccaaaattgtctcttgtttggtatgagagaggagtgaacgaaaggaagatatgtaagttgtagaatgaccctctaccatttgagtggctaactctctcatgaaacttttcaataccggcaggactgaaactggataaagatgatggtttgaagtccattataagtgcgttcccacccaaaagtcattcatatcaaacaatccctacccaataatctctttccttatacttacccctcctaccggaaacactctgaccaatagtgaactgaaaaaatgctcccaaaatataagataatattttagaaaaagaattttaggtgttgtttaaaccttttccatcctccagtggcaaatccaccttcatctttctctggcaacatatcaataatggtcccctgtttcgttgatgaccctgtatcaaccatcatccttaagcttgttttaaaatgcctattccaccaagtcgttaagctgaagccttcattcaatctctttccagtactgcttacttgcaacaaccccttttgcggaaatgcccctagatgcccagcttgaacaatcacattcctcaaacagcctttgcataacatttaagtagaccgccttggccttcaaagccagatctttcgtaaaaagaaaacttcccctgttcaacaaaacaagtaaggaccttgatcgatatgacgccataaagatgacataaacaaaaattcaaattccaatatatataaatacatttcagtcgccatcgagatatcattacacagcaattttgactaatcgcacaataaatgaagattaggtactcaaaacgaagaagaaagatcaaaaatcgaagttgactttaagagaactactttttgaca

SEQ ID NO: 15800 - DNA, 8422 bp, Cannabis sativa
  modified_base (4010)..(4027): a, c, t, g, unknown or other
  modified_base (4056)..(4056): a, c, t, g, unknown or other
cagacgacaacttaaaaatgtaaaggaaacagtactttggagggttttcccactaaaatatgaggttggatggttttttgcaagtaaattgatagttagggggttttgccgcaaattactcagaaaaaattataaaattggctaaaaaattttaaaataaatatacaatgtagtataggaaaattttatttttgaatttttttatttataaaaatatatcttcaataaaaatgataaaatattttttagttatttatagttgttataaaattatttttttaattatttcatagtttatttatagttattttataaatataatgagattgatttttaattattttttaattatttttttactttttgatgaataaagtatatttttattaattttaaaactttaaaagtatatttttataaataaaaaacataataaagaattttttaaaaaaattaccaaaattcaaatttacttaaaaacataagtttaatgcactttttttttttttttttgaaatatgaatgcaaattattcttaatttttagcattaaaataaataacttataaattaagatggctggctccatctttagtcaacttcatactcaataatttatttgatttgtcttaattagttctcatctctatattttttttaaaaaaaataattttattaaggaatagctttagccattacaatgttctcatctctatattaaaaacatgtacaactaatttattgataattatactcatatttaatccactccattagaaacacatacaagtttaataataaatttacaatatactttaaaatagataatgactcattacaatatataaatctctcttaagaatggaggaatcaaatccaaacaataaactaggtgaaatatttgatcatttttattttgttacaataacatttagtttttttttttttttttgagtttttatcttttattctttcaaattatttaattgcattatttactattaaattttaaaatatatttataagatatatttattaatttttggttaatttttctttttttcgtaaaatcaaagaataatttaaaaactatcttcttcttttttaatacatcaactatatagatttttatgctctaaataaacttcattcctacaccaccatatgtgatatattgttgccgcaagtgttgttgaaaaaactttgtgcctcaaacctattaattttagctctagaaagccattgcaacgaaccaagggcgatggccaaggcagtagtccaaagcaactattgtttaattccattcaacacctgaaaactcaaatgaccattccaaagagaatgctcagagcttaattgacatttgggtgatcgaaactagtgcaccaggttgattatcaacctaggcgatgggcccagcaccaggttaacctcggcactggactcagtttccaagcccttgtggttgttattttctcacagagttttcttgtatcttcattatttgagatgacgaaaaaattcccaaaatactttttgtgaaactgattggaactgacatgggttgacaatatgtcaacctgggcgctagggccagtgccaggtgtcaacttgggagctaggtcccagttttggcctcttggaagttccatttggtccctaaaaatagttaaatcttatctttgctgaaaataaagaatatgcctagaagagttctcagaaaattgggcgctgggccttgcttctggcacccaggaagtgttatttcttccctgtaagtacttgtttctctactttttatgaagacgaagaagatgcatgactcaaatttttaatctaacacttggaaggggtcttgattgacaaaatgacaacctgagtgctgggtgcccaagcaccgggtgctcaaaaatgaattttttctgaatctgattctgatgcctcgaatatgtccatgaagcaaagttttacccattttcactaagacaatcccaaaaactaaaaccctagatgaagatgtcaaattgggtgctgggtgaagccctaggtgtccaggttgatttttggagtgtaggttcatgtaatttcagctcccggggcctgaatttgattgcttcatgtcttcatggtacataatactgaaagatagtgagttagaaacgagttattaaaattctggagtttctaaagtcatcctcggcgcaaggctatggacccatcctaggtcgactgctatgactcgagactactcaacttcaagtggtcatctttcttgccacttgttacacattgatgtccacgtctctaggaaaagttttttggttaacaagacttaccctaaaatttatattcatttataactcaataatttgtattttatattatttgctagggtttctcttcctaaatccttagccacctgaggttattttttttttctccgatcctccttgggtttaggcgtggcttggttagagtttgtattttgctactgcgattagtcttgtctctgtgacatagttttattttattttattttgctgttggttcgtctttttgttcttcgatgccttgccatcaaattattgttagtggttggaaataacaagttctttacggttggaggggttgttagtggtgcaattacgtaccttgctcagtagttgaatgtccaagttaaggggttgaatgaacttgctacaacagatctactatcgtgtgttttgagcggtagagtaaactaaatataggtattgttaaggtcactgtgatgttgtaatctttttcatttgattttattttagtttcttttgtaaaatgatcagggaattagatggctgattagttggctcgtttttgtgattctaattcctagttgtgttttcaattgatgagatatccaaattgggttgtagattaataaaattgcataataaatatagaatgataagaatatttaggtcaaagttacaataataaattatgagaaaattgtagcactttataaaaggaatgtacgaatgcatcttaacctgttttggcatttgaaataatttttcagtcaaaatttttctcatggtcatgtaagttacaattatttaagacatcttgtaaaattttaagaaattcaaaaaaatttaacacattaaaaacaaggttcaaacagtatattgcacacgtaactattttattttatgtgtaaaataaattatttaaacattatttttcacattgtaaattattttaaatttcttaaataattataacgtacataaaaataaaaataaaatatgattttttttttaaataccaaaataaatatatttataatctttataaaaaggtgctttattacataatacatatatagcaaaatacatagcattttccgtgtgtattgtagtgaatgaaaaggacgaaatctcttgtactatatggacaaaaaaaaaaaagataaattcttttaaatttttaatatcacatgccaatgccatgaacaattattgtcctctcaaaaaaaaaaaaaagttgaaccattatcttttttaccatattatttatttatttatttattttgtaaatgaatctctactatcaacttgctcataaacatctaaaacccacatgctatcattgacaaaagttcattcgtggactaaataaaaaagaataataaaataatgaataacttcatttgaagtcaataatattcccttaaaataatttaatatgaataattattatttttgtttattttttactttattgatttgtgtttctattctataaggctctttaataatacctcttatatggtagtttttcattaattttttttattttattgttacatgagtaatacaataaataatagggatttttttatttttacatttcaaactaattttttttttacattgttacgaaattctacatggaaatttctattgcaaatagcgctgcaacataaattgcaacaaaaaatcatatagaaacccctattgcaactannnnnnnnnnnnnnnnnnaaactcaaaccgtaaattttttaaaaaanaaattaaaaaaatagtatatgagataattttccattaatttgagtaaaaagtaaatgggataagttgaaaattatctttttttattatacattaactaaatataattataaaataattttaattcttttttataattaaaatattaaatataacttcacatcatttatcaaaattagtctctagtagatataatggaaatatgatatataaaattgagtataaattaattaataataatagaaaagaaaaaataaaaaataaaaaataaaaaatgaatatggagtgtaagtttttcaaaatcatttataaagtccaataaataccaaagtaagatgcctccacatagagttccccctaataggaatgctcaaaaatatataacccattttaaagagaataacattatgaatacactatgcattaacacgtatataaaaagacatgatatggtttttcacaattaaaattacattcattttacttctaattatattgattatatatgtatacactttttgtcttttaattgttttggttaattaattaatatatacgaaacaaaaagtatcaaaatcatatgcaagagaatgttatatagcataggtagtacttattattgactacgtaatattattctacacctctttgttcttttcttcttttgattttttgtgttgtttattattttatgttatatgtttgttcattagtagatgatattttgttcatctatacctatctatagtatactactttatagaatataaacatatcttttttatatatgtttatgtttttttaataacaaaaagtaaaaataacggtaaaagtaaaaagggtatcaagaaaacaatatgttatttatttataaatgaaaataaaaaggtctagtatagtatatgcttatagaatcaagctttttcaacttaaaaaagctatggatacaaacttaaattgattattccaactttaatatattaattagtgttttagtggattatgacatttgcttaatgcaatacccaaaaatattcttcttcaaaggagaatggaattatttgcaagtaatgccctaaaaggttaaaacttttatgtttataatattaatataattaatatatatcaataattaattattgcattataataatgtttgtttgttgaaaagataaacttatattagaagcatttcaaacgtttatgatggtggttgtatcatttatgtatatattttagtatatacttgtcttagaataatatgctttattatatctaaagatatttttttggcttattatgaaattgaggggtgtgatctcatcaagggctttgagtttgggccttcattttcatgaacaattagcccaaatattaggcccaataataggatagtgaatttgatcattgttttcaaaaatatacaagtcatataaaataataatttttcaaaataatgtatttctaaaactttgtctatcttaaatatagcacctttttaacctcgttttggattttgttcactaccaaaatactatcatttgttgacaattttgagtcgcaacataaatgttactcacaacaaaatttatttgtgactaaaacttaactttatttacaatttattatttatcgatataaaatatatttttttgaaaaaaaacatttatgcataaaaaattatacttttagccacaaatattttgatgagaacacaagtattggttacaattttctttttccattcacttctagttacaaacaaattttaatgtgactatttttcttaaaaaaatgtggtgtatgttacaaaataaagccaactaaatataatttctcacctttctgcaaagaataataatatatatatttatataatatctcacccaccaaattgtttagcagctttacactaaaaaattgtgatgttgcttatcttcagtcttgcctaatttccaattttattaacactcttatttgtaagatatttaacttcgaaatagttgggtaaaaagtgaaaaatggattgtttggcaacaaagataggatagagatcttgcccaccaaaataaataatttcatctttggatggatggaaaaaaaaggaaaaaatcataattatgcctatataaaatcacacacaaagactatagtttatttggttttatcgtttatttgggatgcgttttctcgtgctagtttttgtctatagtttttacttatagttttttattgtggtgttttttggtttgttatattttcaggtagtatctctgtattacaagtggagactttggcccttttggttagacttaattgggctatttcatgtgaaatctaaattaaagagattttttcacagctataaacaaaggaagggtctttttcaacgagctgggtgtgttacttgaggatgtcatagctttattgtctaaactcccgggagcagttttgtcccatgtggctcgagatgcgaattctgcagcacatggtttggcaaaacatgctcttcggttagacaatgagctattttggttcgaggaggtgccgccgccgattgtgaattgctgccttgttaatcatgtgtgatttagatcaccgcgtcaaaaaaaaatcacacacaaagactcatagacataatgaaagttctcattcatgaaaatgagtatttctattaatagtccataactaataaattataaatagaaaaatgagtagttcatgatttttttaagtgattgcagtccccaagcaatgtagacatccacaaaatttatatcaattattagaacataataaagaataaattatattatagtaatgatagatcttgaaacttagtaatggtgtgatgtaaccagagtttgatatttgcttttatagcattgctaatagacattagtggtgcctagcaattctgtatatgtcgtcttacgattagctaacgatactccttaaaagttattacatcaaactatataggactcgatatttaattaaaccaatagcgataataacgcatagaaaggtgttagacaccactaatacttttttagcatttttcttgcttttactacacaaatgatttcttaaatgggctattaatatcacacaagcccaataaagactcctagattgggattagttaataaactataattgttttaattgttgtggtaatcacccaaaaactttttttttttctatagaaattactttagctaagaattcactgagtcatgattaattcataatgtaaaataatagatattataagattttttttaattatgccactttaacatttatagtctgcaaaagtatgagaattacattttttccccaaattttaggagaaaattttaaaagacaaataaccactaaaacataattaatagtacagtaagttatgaattttctttttaaaaaaataaaatatagtaaagttattactaaaaacatttttgtataaaaatatgagaaattaaaccccacaatttaagaattgtattaaaagccataaaatctatactatagtaaacatttttataatatgaaaaagctaataatttaaaaaatatatatgaaaaagctaataatagagtaaacatttttataaatttatattcaaaaaaccttattttcattaaaaaaaagaatatactttttatagtaaaacgaaaaaatggtataaatctgtaattgtaattaggttaagtgttaagttaatgttgagcccagtagatttcgaagcccattttggcccacatactagttactcaaaggtcggttcattgaatttccacattagtccccattcaaaaacatacataactttcataaaagggctcttctgtaatttcatttgaaattcaagattttattttttaattttttttttaaaacagaaaaagaaaaccctttcatctcttcttctcttctaagctttctctctcaaaatatccctctgaaaatcctcagcaaaaaagtgataattttcagagtgctatacatataattctatatatatatatatatatatatatatagttgtattcacatatatatatattgacggaggagagaagcatataatatatataatcaaaatgaggggttcatcatcatcagatacgaagtttttacaggaactgattttgtacgcggcaagcgctgctttaagttgcttggtcttgttcgcggggctccgacaactcgaccccaaccgtgaggcggcaaagaaagctttggagcacaagaaggagatcgctaaacgattgggtcgtcctcttattcagacgaattcttacgaggtaatcatgggttttggttttgaacaacttttatgtcataattattatatgggtt

SEQ ID NO: 15801 - DNA, 6495 bp, Cannabis sativa
  modified_base (2630)..(2632): a, c, t, g, unknown or other
  modified_base (2824)..(2824): a, c, t, g, unknown or other
  modified_base (3707)..(3720): a, c, t, g, unknown or other
gaattactaccaccagtttcctcaagagaatctacgcaaggagaaccatctaaaggccttttcatcttaagaagaagactcattagagttttccttggttacaataaccttacctttgcctttgtttgctggcacaagctaggcaggtctcactgactcttatcccttaggcctaataaaaaattaggcatcgccaactataccaccctgttcaagttaactccgaagggctcgatccctcctcgtctctctacgggaaatctcagccagaggaacctcatcatcgaacttacttttctccttttcagtcgcatgcctctctttcttgtccttctcctcatcaagagcatcgcttggatccttaggaggattgcctaaagccttaacatccttgcaggaaaggtacataccgtactttctaaagttctcttcataagccaacctataaatgttgcaccgctcaacaaaaaaagacagaatttggttggccctatcccttatcttcattgtggggattggccagctataagtggggactctttggaagaattggttagcaccttttatctcataagccacgaaataacccttaacatgacccttgatttttgatatggctgcgtcattggtgccacccaacccctagtagtcttgatggcaaaaataaaagtatcaagtactattctggtgtggactagattttagttccacgtaatagcttacttcaaaaggtgaaggctgtagccaacctgattcggcgtacaagaagaagagtgttgaaaggtattttatacccttcagtgtaatttgggttggatatagcctgaagaagtttgttatattgttaaagtatgggtgcaaatggggaccaaaccttgttatctagcttggctaaggacaattagcagggtggcttagtgttggcctaatacaggggacttcaccaacaagtccactttcgataatgctgaaaagtgtggcagtagataccgtggatgaaggggatacccatatctctctccatcctgatgttttagaatccaaggcacgacgtcctcatcctcaatgtggtaaactccaacctcaaaaggttgacccgtgctatttagaggttgtctagcctgaccttacgaacccaattagttaccctagatcacattacagtccctaggatgcgtctgggcagccctgagccttatttcaggcttagcctattcgacttctagatcctcttctggaccagccataagctctttagcctggctcacctcaggtcgttcagcctactcagcatggtgggtttttcctcttgccatgagtttgacaatatgaggattggttggaggtgcctggcagtatgtctgcctagtactaggtaggatcggatatttcttagagtactaagcaactgtcacaacaacctctactacagaaagatgtctaagtacaaaagatgcatgtccaacaggcaaggtttcaggcacaccttttttgaaaatgtaggtctaagacattacgaggaatcgcctccacccctagttcagttcccagatgaaccttccatagatttcaccatcgactcgctcagaatagttgtgatgcttcattttaggttttgaagaaccactactcttcaaagtcactcaaagagctacccgctgagctcccaaaggaggaaccaactgtccggactgagcgctgatcttcgtacagaaggctaaaaaagtcttagtcgatcttgttatcacctccccaatagtcgcgtgggttcatctttggagaaagacataaggaggtgaaaattagagagcataaaaagacttggacaaaaaatgggttaatcggccaacctaaacctaaggttacaaccaaataacctagtcatgaaaagccgttaatcggccagcctaaaactaggaattgttaaccgaacatcctagagacggaaggtgatgaactagccaagacaaaataagactaaggtgttgggcaaggtccctaaatagataaaacagtcctatttctaagttcaaagctatgggacaatgtgttcttcgtgttcttgaaccttgaagtttagagtactaaaatacaacccaatatttgattttttttatcaaaaagtcacgaattgtacatcctaaagctatttaacagattacaacaggtaaaacttctctataacatgagaattaaaaagttcaaaagtttagaaactcatcaatggtagaaacttaagaaaaaaaaagggggttcgaaacttattcactaaagaatggcgcaaaggtagctcaaacttgatcggtgagatagattctccaacaaatgatgattgaagttttaagaaaatcaaacctccagggagggtccaagagtggcatcaaagctccagggagggtctaagagtggcagcctttgaagagtgacgagttccagaaaagtttggaagagtttttaagtttaaagaggctttaaagtaaaagaaaatgataaaaaagagggaagtggcctcatataggttttggaaaattaaattcccccccaaaaattttaatggggagttaattccaccaatataggcacacatggaagagggaagactaggttgctctctttaagacgttcgcggnnntgcccaggagtgtgcaagcagtcaaaatttaccggtcgtccccaagataaaacaacccaatcgtactgtatcagaaccccactacactgtagagcaccgtccaatacacccaatgatttttgatatcgtagatggaattttaatttttatgaaaactgtatttttctgatatgaaaaagatgtattcttccnatcagttcaatcgcattatatagacgaatggattgagaaatcataacgggaagaagaaagttttttctgaatcgtgtggtgagttagttgaacatgttgcattaattgatatgactaagtaatcagttccaattaaacacgtttcttaattaaattaaaaaataaaaaataattattttattaaataatttttctataaaaataatagagtgtcacaccacaccaaccaaccaaacccagctcagacagacggcgcgcgtgtgtggtgggtcaagtgtgtgagtcctcacccattcgcacaaaatggggtatcctttggggcccaaacccaaatgccaaagttgtagtctctatacccttgtaaataagggtttatatcccatgtgagattctttccacttcacacagaacacttctatattttgttaaaagattcatgaatgttccaacatattccattcatgtctatgcaatacaatcacgttagtatcacttctatatattgttaaggtaaacactttctaacaaataaaatttttatgtgtccatttttccaaaaaagaaaaaataaaaatcgttacgctgagctaagtcaaaatgccactagaagttcgttattttgtgctttattttgatacttttgttatttcattatcaaatatgatatttctatctacacataaaaaagttttgggtgattctacaatgcacccccttaaatgagatgtattgatgtattcttaatttctttcagtatcaagaagaattttttagtgtaatttttttttttatattcatgtacgttatagctatttaagatatcttgcaaaattttgagaaattctgaataatttacaacatagaaaacaatgttcaaacagtnnnnnnnnnnnnnntataaaataaaatagtcacgcatgtaatacattgtttgaacgtagttttgggtgtgttaaacttttccaaatttcttaaaattttgtaaaatgtcttaaataactataacttacataactatgagataaaatttgactaaaaaattatttcggatgctaaaatagataggggtgcatcaatatatctattttaaggagatgtattatagaattttctaaaagtttttatacgatgatctacatcataataaaattattaggttagtttggtaggctgtataaaagtcttattgtattaattaataaatactactactttggataaaacaatattaatttagttagttaaagttaatgttaaatgtaattactgaggcttaacagccacttgtataatagattaacacattataaacttctactctttgactaatgaaaccattcacattcattcttgaaattctttgctctatgaactgatagatcaataagttgattattacaaggagattcgatataaatgtattacacacatatatatttttgtatagatgtttgagccatggatgcaaaaaagaaggcttgaattcgtgttaaggaaatacataagaaagaagttagtgcagagtcttctcactgcagggggtaggcctaatatacctgcgataaaggagtaagtatttggtctcaaaatcccaaatttaagagataataatgatcttcatgaaaaactgtgtagcaatgtcagatatacaatattcttgtgtggcttccaaaattaacatgcgatacaattcattaagtgacactccgtacgttcaaccataataaataattttttcatttaaaatgatctgcaataagtggtacatatctgatttatgtgtaactaataattttatgaacattttcttatttgtttgcagaatatttcataggatcgatgagaatagaaattcttacatatctactgctgaactaaaaacattaatattaggaatacaaatcgaaaactctggattggacgagcaggattttgtggcaaaggttttaaaagagtttgatagttctaatgattctcaaataaatgaggcagagtttatcaatgggctctcaaactggctaatttcagctaataaggatgctttcaagttcgtttctcaggctaaacaaaagttcttcaacctcacttctgaggtatatatatatatatttacataaattttcttcagttgtttccttgtattttactggcttattagtactatatgtttgtatatatatataatacaacttaactattgcaaactgtagaaatctttaaccaaggaagaggaaagattgctcgtggtggctccaaatatgaccagtattaccaccaaggccactaaagaagtttggttcaactacattaaagcttctctttttatacttttcggggcaagtattacactttttcttgctgcgccacttatggaaactgttcaaaaattctctactgctgcaaatattccttcattcttgggttcatatgttatgctgcctttggctttgacttacagtcaggcattcaatgtcattacctcagccaaacataaaacagagaacgctatttctttaacattatctgaggttagtctcctacaataattactttataatttatcagtaattttgtaagcaaatgggacttctcttcaaaattctttatatttgatgctcttttgaattatctatactaacctacatatatgttatcgttatgtgcagatttataatggagtattcttaaacaacatgatgggtttgatcatactgttggggcttgtttattgtcgaaacttgtcgtgggatgtctcatctcatgttttagttgttctaatcatttgtgcaatcatgggtttttatacgagcttttgctccaagttcccagtttggacaagtattatagcctttgctctctaccccttctcgctacttactatttattatgttacttctgttctagacctgtcttaagtgtttcagtttaccactttttatataggaaacattttcgtcaggagtataatattttttagcatttccaggaattaaatttttatttctctttatttattttatgtatgacatcttatattatgtaatggttgactattcaattcaatggttacattttttttaacctgtaataacaggttatcaataagtaaataaatagttaaaataaataattaactaattataattaactattttttaagtaattaaataaatatttaacaaaaccttttttagccattaaaatttataaataattttttttatttatatataaatctctttgattaattattttaacaattaagttatttaattataatatttacaatttttttttacaaaaattaaaattatttttgtataaattaaaattttgtccttataatgaatttttttacaagaacacaccctgcttcttttttgcaggatgtgttcttgtgatgattgtctgggggaatcggtgtagtaaatccgaacttggcacaaatgttcaactgtttttgttcctaaaatgctcaaattttctgttttcgtcctatagctaacctctcattcactttcttcttttgcaattctcaatggccttcacccgagttctcgccttactcttcctcctcctcgcactctatagtgccactgacccatttaaacatagcgccatctccgatttccctgactttcaagctcacatgatcgaattgtgctctgcta

SEQ ID NO: 15802 - DNA, 4353 bp, Cannabis sativa
ttttacatttgtctttcaaaaaatcaaattattaaatgctgtatgactatttgctgagttgacaccataatgatttttttgtcaagttagagaggagttgagatggactataatatgccaagatagtcttgagtttcttacatctctttactatttttttttttccagggaggttttactgatcaacatttcgatcaagatctgaactttcatgctacagaagaggatcccgttaccaaaaaggtatattttgctctttgatttatgttgtattttttggagtggtacattacttgtaaaaagtgtactttataaaccatttttctcttccatgtttaagttggcttttccctttgcagactatcaagcgattgattctcaacataaagccaaaagatattgggtcaatcattttgggttctcctggtgaggatccaaagatgttggccgactttaaagatcttcttgataaaatgtttgttttggatccagataagaggttgactgtgtcacaggcactgagccatccattcatcactggcaagtgaaacctgttgctgattttctcactcaagattcctgttcagctagatatttgttgattatgtcctaatttatgttcatatctaatcattggacattatgtcttctctatgatggcatgagagcttgacacagcttgggattactgaagtcaaaacggttgatgtttgattgaggagtactcattttggctggttctttcagtggagtgtactgtttctattgtaagacaactagccgaaggcgattcttttcccttgtaacccccattaatgatagctgatgtcaaaattcattgtctctactatgaatttatttacttccataattttatctgtagtttgaacattgatctgttccatatattaattcccttgagctggtaaatttttactcctgacaaaattgtggggtttgtttttgtcctcaattctttattttattttatttgctcatcaccatcgttatatgattcttatgttggatggtcatttcttttgtgttgtatctggtatatgggcacatatcctataattagaaggtttgctgtgccattgtccaactctatattactgaatttgctcattcttttattttgaataataataatttgggttctgggaaatctaatttaatctttcattcaggatgtcttctgctgcttttgggcaacccttcagtccttagatgctttaaagaaggtaccttggtttgtttattgggagattatagtggcaccattgatagtagatattattattatctttcctgttctttgtttgttctgatctagaaacagtttcttggcctatagaagttgaagccctaagatattttcttcctttttagaaggtaccttggtttggttattgggagattatagtggcactattgatagtagatatattatgtttcctgttctttatttgttctgatctagccatactttcttcgcctatagaagttgaagccctaagatattttcttcctttttatgtattttttctatggcttgttccactggtagttctttaaatgtgtgtgcttttttagttcattaggtagtttttgagtaattacttgcatctttatcctagaatatgtttgttgagtaaatatgttgcagatagtggccattagatttttcagttccgttaatattttaccttttagtttctctctcgataaatttgattttcctatcttcaaattttagatgttagtatcggttgttttttgcatctttattttttgcccccgcctttgctcaagtacatctcctaatgaaagtgcattacatctgattctgatccccatatggtgtttcaatttggaggcacgtgcattggaggcgtgtggctgctgcaaggatgtttgagttgagtggtaagtttgcttttcaaccttgtcatttatctattatattacttcacgtggttgtcgtttttaacgcttccttggaaaatatatgttgacttgatactgtttttttggttttgttaggatatggccccatgtgcgtgcaacactttgtaagtttttcaaccataattcttcattcattattttgaattgaagtgtgatgtgaagtagcgtagaaaaggttcttaagtatatcctactgtgtgtaatagattttattatcgatctagcatgaggagatatagaaagctaaggtttacaaactgtgtattcaatttttagtaggtgatttggttgagtagagaaaaccaggagggatagatagagtgggtcaaactcttggtttacatatttgatcttcgtatagacctatctagcaatatgtatttctttttgcctattaagcttctaggttgctcccaggttattggtgtagcggcaagtccttgagttaggtctgacataggcagacttccaaggttagaaccccggcaactacaaaaaatgttcagttgtctcctaggaccttggatgtgttgggcctgctgggtatcctaatttttttttttggaaaaaaagagagcctactaggtttactcccatggcgtctgggattcgatttattatacgggacctacatagcaatgagcaactttttataaattaaaaaacaaaattagtgttcaactgatcatcaagtattaagaaaggtaagtaactcatgtattattctttttaaaaaaggggaaactcatgtattatttaagcaagattgacataaacatacaaaataagtgagcagtgaagtcatttctgtggttgtcaatagattatgtactttactgagcaggttttttttatttttcttttttgctatttaaatgaaacttaagttgccaagtgttttttttttctcatcccgttgaaggtataggtattagagggcgatataaattagatgtggttatatgatcatatccgcctttttaagtgaatagcattgtagtgatttcattttatcaaataatcagaaaagaattttatccttgaaaataaataattaagaatcagaaatctgacttgaagctgagttacatagctgatgtatatattgttagtggctgctaggctggatttatctgctgactatgatctttacaatttataataaaagatgatcttgggtggaaaagttcttaggaattcaacatttaagtgcatttcttaaaggtcttgtaatgcgtagtctccctttttatgtgatgagtttttgtagatatggatgttcgtgtttgaaattatcgttttgctgcttacatttctcaaaataagtgactaagaaattcattcttcatatgggcttgggaaactggaatccctcgtttgttttctagatgcacttaataggctggacttagtttagtataatttagtttttatttctttttcgaaatttgctcgagtttgccccttttctttaatgtgtacttttataatatatgaaaggaaatatggttataaggccatcattcatcactatttttttttttttcaattccaactaccaaactaaaaattacactaaaattttgtttaattattatattattttattaatataataagaatattttaatattaaatatttatcaaatctaataagttatattactaagtattaaaatatattatttaattattaaaaaaatatatatcgtagtctagacacggtagagtttcatgaaaataggttggctttcccagtgtggagcattttgagggaaaaataacagcatataggtttttgccgccccattgcagatggcctgtaaagagagattttattggatcttgtattttaatactagtattttggtattttgtcttaattctaagtactcttattattttaatcaataccaatgataaatcaaatttcaggtggagcgtagttacaattttggtacaaaatatttcgattagttctttgaaatatatttttttccttatacttaacaaaattgtaaataaataatatggtactaattattattatatttatttattgtagttattttttttatcatatttgtttaatgtgattttttcaaccaaaaaaataaataagaaatgaatttaaaaaacaaagtggattattttgttcataaaatatttaatccaatttgcatgattcaattcgttaactgcgcacttgtgtggatcgaattgaaaataaatgttaattacatataaaagtagttaatttacactcttaatgggtattacttataagtagttaatttttctatttaattaaaaaaatctcttatttttataatatatagactgagattgttccatcggtaaaaaaattaaaaaaaaaaagtt

SEQ ID NO: 15803 - DNA, 4671 bp, Cannabis sativa
ttatagaagaacttaaaaattgccaacaagctctgtccaaatataattttctaaactagtaacagatgttattagtgtgtgagtacactattttccaattacggaatagtactgtaagaattactaccaaacaacagttaataaagaataaatatctaatgaaatagattaaaaaaaataaaattgatattaggaaaacacaattttaaattcaaatttacaaatcgtttatgaattcataattagttatttgtgtatatttttggtgtaaaaaaattggctaaaatattagaacacacctttaccgcttgagttggtttgagctttgaacatgtctttatttgtttatttatttcctcacatttttacgttgagatagagatgaccaccataaatatcttaatcatctttggaaattgacaattgggttttattttaccattacaaaactacaaattcaaaatgttgttaatatcaattatctcattattatctattgaaagttgtaagtggatactaagtaaccggacaacacaaagaaaatactattgtattgactcatccgcagttgtaaacaaaaatttcttccaagtcaaacaagtaagaaaccaataatttttttcccaataaactaaagaaaaattcaatctttctttttctttattattaaatttattctgtcgttatagccattggtccattgtatcaaactcgattctttcaataaactattttagtagccattttgttaaagcaagccaggaatcacgtgcccttttagtttagtttgttttcttaaggaaataatagataagaaattttgtatataaataaggagaattatgtaaaaggaatgaatagaagaaaggttgtgtttttggtttgtgagaatcttgggattctccaaaatgggtgttggtggtgttgtgttgagctgtgtttgtgtttggttgattgtggttggagttgaggcgtacccagttgaggatctggtggtgggattaccaggacagcccaaagttgggtttagacaatatgcagggtatgttgatgtggatgtcaaagctggaaggagcttgttttattactttgttgaagcagataaggtgcctgataaaaagccccttacactctggctcaatggaggtttgatttttcttcctcctgttcaattgaatttcatgccttttcaactagtttcaaatctgaataggcaaaaaagaaaaggacagtttttggtttttgtttcttttggaccttggttgtggagttattggttcctttcattcttcattttcttttccttgttggagtgtgtgcttatctctattatttcaccttctcattcatttctttctctgagatgttcatgttccctatgcatttgtatcttgttctctctctctctctctcatttcaaagtttgtgcctttattttttttttttattttatctatagtacatctggttttgaattttgaaatggagctaattttgggtggttggttttgggaaattaacagcagtctggacctgagctccaaatcttattagaaaaccggtcaagaaaagaatcttgcgccatatgatttctctcaaaacagttaaagaagaaaactttttaccaaaagaaaatgccaattacaaaatgttaaatatgggagaaagacaaaggaaatgaaggtgtttcaacaaatttaaactgatgggattgtaaaaaagcttctttttttctgcatcaaagacattctagttggaacaattgttaagaatgtaatgctattgattgttgaccctttagctattgggatggattattggtaatctaacttggtattggggtaatcttacaatacaacaagatatgaaatctcttagtttagccagtgatagttactttcttcgtgttcaggtcctggttgttcatctataggtggaggagcatttacagaattgggtccattctatccgaaaggcaatggccgaggacttcgcagaaattcaatgtcatggaacagaggtatgatatgaaggattgtagcttggacacataaattgcaaagactgatatacatgtataatcgtagtggaatgaatcccatctgtatttattattgtccttatgttttgcagcatcaaatctcctctttattgagtctcctgctggtgtgggatggtcatactcgaacacatcttcagattataatgccggtgatgcttccactggtaatcttacaagcatctattgtgcttctcagctttgtttttcggtgtctgttatttggctttgaagtatctagttgttccttttgattacagcgaatgacatgcgtgtattcttcttgaaatggtacgagaaattcccgtctttcagatctagagatttgtttcttacaggagaaagctatgcaggtttgacaatagctaagatcatttatttttaaaaattttgtgctttgttttcttcatgatatacatttatatatatatctgtgtaacttttcattatagggcactacataccacaattagctattgctttattggattacaatgaacattcaactggtttcaagttcaatattaaaggaattgctgtaagacattctttagcttttttatatactctgcttagcttctttcaacattttctttattaatttcatctgaaatttttcataccaacttctcttgtcttgtttgtcttgttagattgggaatcctctactcagacttgatagggatgttccagctacatatgaattcttttggtcacatggaatgatttctgatgaagtcggtctcaccatcatgaacgaatgtgatttcgacgattatgtctttgcaagtccccacaatgtaacacagtcttgcaacacagccttatctgaagccaatgacatagttggtcagtacataaacaattacgacgtgatccttgatgtttgttatccatccatagtcgagcaagagctgaggttgcgaaaattggtattccaactgattcttttcattcattgctttcttccatttgattttttttttcaaaaaaataaaagtaatcatctttgtgtcccatctcttcttctgcaggctactaagataagcgtcggtgttgatgtgtgcatgacttacgaaaggcgtttctattttaaccttcccgaggttcagaaagctcttcatgccaaccgaacaaatttaccttacagctggtccatgtgtagtgggtaagtggccataattcatggttcactaactcccaaaagcaaactcacttgggtgaccatgtcattgtcttatatgtcttgaccaatcttttcatgtttcttgtgttattacagagttttgaattacagtgacacagatggtaacataaacatcctaccattgctcaaaagaatagttcaaaatcacattccagtttgggtttttaggtaaagtttctacctttgtacaaatgaataaaaaaatgaaagtcccaaactcagttttatctaccattcttccattactaaacattatcactaaccataaccaaatgcagtggcgatcaagattccgtggtgcctttactaggttcaagaacactcatccgtgaactagcacacgatctgaatttcaagattacagtaccatatggagcttggtttcacaaaggccaggtaacccaatgctgcaacaaacttcttgatttttttggtgttcatgttcgagtcatgaatcttatgagtggtgttaatgcgtgccatgtttttcgacaggttggaggctgggctaccgagtatggaaatctgctgacttttgccacagtaagaggggctgcacatatggtgccatatgcacagccttccagagcattgcatctgttcagctcgttcgtcagcggccgaaggctgccaaacaatacccgtccttctattgatgattgagaagagttactattgagtggaagattagtagcttttttctttttagttgaagaatatagaaaatttgcttttcataaaggcaataaggaaagatgataatagtgattggttagttttcatggaatatttatcaaagaaagaaagggaaaacaattgattgtattttgcaaaattgttaaaatgtgattaagcaatttctacattccttctttgtgtagttggacagacttgccacgaggttcttgattaactgttcttcttatggaatattttggaatttttgttttaaacttgaagaagataattaggttgcacttgcagataaaatgatggttgtatttataatataaggttctctttacaattttttcaacccttttacaaattgtctagaaaactatttatagtagagctctattagctctaatttacaagctattattttattttactttcctttttgctatgttgaagtaagaacttgtgcaaatgaatttactctagttataaatacgagtcctccaatggaggttttggtttgtaatcttagatagtgaagttcatttccctctagttatgcatttgggtgtgttcgtttacagtttatgtatgggtattattgatgaattttcatagtaccacatcattcatttggttgtggaattaataaccatcgacttatttacatggaagtttaggacaaccaacttgtaacataccaagtcttaattgggttaggcac

SEQ ID NO: 15804 - DNA, 2418 bp, Cannabis sativa
atataattatattttttgtgaacaaaaaaattactgtaatttctataataattacgttttagtagcatttttattcaattacagaatatcattagagttaatggcatgaaagcacaaaattgtaaatccttcctttttttttaaaaaaaaaactatcaatgggaaagggacaaaatcaaaaaaaaaaaaaaaagaaaacagatcattcaaattgcagaaatcgaagaatttttttttaataaatataaaatccaacagataatatttgatcagattgttttgtgtcacagccaaagctttgacttggccatgttaccttggctttcttcgaattaaggggcccataaaagcataacaaaagcaagttggtgtgccattgtatttgtgcctataagctaacttcctttctttctgtttatgtttctctctctggttccttcacttgtccataaattctgtcattgatgttttgataacaaatttatataataacccatctccctcattttcaattttttctgctccctcaactgtgggttttgtttattttttctctaaattctttttttctttacagtatatgcaattctgggtttgtcataatttccatggctactgaaagagaaccagctgttaaagaaaataaagaatgcatttttaccatcacagccgattctccactcccaaaggtactttctttttttttggttcacttcttaactataactctcaactcttctttagtgcttcttttgatatttcttggctgttcttaccaatttttttgaattgggtatgattttaatttgatattgtttggtggctatttgaagttttttttcttgttcagttaattcatttcaccaagtcagaagagattgctataactcctaactcttctgtagtgtttcttttgacatttcttcaatagggtatttattttatttgatattgtttggtgggcatttgagaattaattcctgttcggtaaattcattggtccaagttagattagattgcctgaagtgattgttctcccatgattttaggtgttgaatttgaatacttggtttactgttttggttttctcttgtaacagattggaaattcacctgaaataagtgaagaaactcagtcaagtttagacaattcaggtcaacatcttgttttacagataccatctagggatattgaggatgctagagaagagtttgtaagaataaacatgaacacacaaactccaagtccacctcccagaagagtgaacttttccccattacctagtcctagttttggcagacatactaggtccccaggcccctcttcatctaaaactaaatctaacatgaaaaaccttcttccaaaactaagttttaagaatcgaaactctagctctgagattcaaaaagctgttcttctagctctggaaagctcaccagaagagagacaagagaagagaacattctcaagaactttgtccttgacaaagcttttcactcccagatcgaaaaatacttcatcattgccagtaacacctattgctcattcgaatccggagtctatgcatggaggaaacatgactgagttgctatatctggttgtgagtattaacttcctgtttttagcttgggattgattatttaattactacaataataaattaaatcaatttaaaagtcaatttgggacattatgctgcagttgtgttattttatgtatagttctatggtttgcatatttttctatgtatttggattttaaattctgtagattatgcttagttctttcatatttttctctgtactagaaaggagggacacgaatacctattcaccgttcgcattctgttcctgtccttaccaaagatggaagtgtatctctacgtggtgtttttcgagtaattccttccactccacgagcttctgagaagactgtcttgacagcacctagcacgccccaaaaagatgacagtggtaaaatatgtcatagttgtctttgttcatatgctcaaacaccaacacttgtatactacataagactacaaccgtttcattcccttaattttaaaatctgagggttttaggtatttaactggtccagtgagaaaagtgagtcgtgaccaagcaaatctggagcaatttccagaatctttgcaaaccagaaatgataattttgcatagttaaggtgtctcattagatccacaacaatttataggtgctgatatgtcttaagtattagtcatacaccattttggagctaagggtacgtttggttgcaatcgaaaacaatggaatggcttttccaccattttggtggaatggctattccttccaaagttggaggaaaggcaattctaatgcataatgaacgaaaataactttttcctcgtatataatgtcatttctattcatctattt

SEQ ID NO: 15805 - DNA, 5534 bp, Cannabis sativa
ttcgccattagatcaaaatttaatggtttaatatttttaaaattaatatttatatttaaatttgtttagtaccatcaatgtgtaatacgcattgagaagtgtttcttatagttttataatatacctatgttacagtaaaattgaaaaaaaaagtaaaatttcagtagtcaatgtaaaaatcccttatattaaacaccaatttttatatttttacgtttaatttttttttaatattgttacgttattttataaaaatacaaaaaaacaaaaagaaaattaaatgaaaataacaagaaaacaacataaaaaataatataaaaaaaatcaaaaattaataacaaaataataaatgtacaacataaaaatacaccaaaagaacttattttatgtaaataaattgtaaaaaattataaaaatattaaaaactctgtacaaaccttatttttgttttgttttatttttatgttttattttttttttaattatccctttatttatttatttattttaataaaaagccgaacttgctgttaggatttctctttaaaaaaaaactaaatatttggaagtttgggtcgacctaatcgcgcgccaaaatgctagttagacagagcgtagttcccctttctcttgggactttcttcaaacaccttccgattcttaggccaacgacgttttctccacgcacactcaaacgcagaaccttatccacctccacaattctctcctcttcctacttcgaaacgctaactcccacccagaaggatcaaatccatctctacgttgacgttcttcttcaatggaaccaggtcaatctctctctctccgtcattagttttatttaattatattgaggaaaagagtactcggaaatatgtgattgggtaaaacgaacatttacgatttcattgaattgcagaaaatgaatttgacagccattaaagaggttaacgaagtcatggaaagacatgtggaagactcgcttgctgtcgtacctcctatacgaaactcttacatctctcattgtagctcatcgtgcaataaacttaaccttgttgatgttgggagtggtgccggtcttcctggagttgttttagcgattgcttgtcctggtaactgttggtttctattaggtccactaatcttttggacaagttctgctcttcttatggaatcttatgatattatgtattatatgtgtttggaggacaggttgggaagttacccttatggagtctatgaagaagcgttgtgttttcttagagcatgtggttggtcaaattggtttgtcaaatgttcaagttgtgagaggaagagcggaggtacagtaacttaagccttaattacatggttctaacttctcagaaatcattaggtgatgttctctttgctttatatgtataaatattatgaaactaggatccctgcctatcgggtatccctacaacatttgaggaccagtaaactattgaaattgttaaggtatctaggagggacttgaacctcagatcttttgagctacccacccctcttagctttgtatgaaatctaacttccacccaatatgggaatttcacaaatattttggttttgcatgttatctgtactagaaagattgttcaagtatctcttctagatagtcaaatgaaactaagctctctcaaatggagtttatttgctaaagaaaaattggcattttacattagaaaatacagaatgaacatgcatgtacttatatgcactttttggaacctttagatttagatatcttcatcagtgtccttttccttcagacatgaatgttattagctttgttataggacaggatttgggccagaatctgttatttagagagcaatttgatgtagcagtggccagagcagttgcggaaatgagaatcttaggtaatcataaaacacaattgtactggttccctttgtgtattttacaataatataaatcagtttttcgtttaatgatggtcagccgaatactgccttcctcttgttcgtgtcggtggcttgtttgtagctgccaagggccacaatcctgaggtgtgtttatattttagaataacttcatcttgctttttctacactatttatttaattttatttagctaatgtatctaaaagattaatttctgatttgacttgcttgcacaggcagaagttatgaatgcagagagagcaattggaacgatgggtgcatccattttgcaagtatgctctggtatgtttgtacatgtgagaagagcctaacatttattccttaagagttttatagctgctgtttagttttggggtaatgaaaacagaagaatgagaatgaaaataagaatagaatgtaattttattttcaatgcaagtaaaaggaaaaatataaaagtaggaatgaaacttcttcttacttttatattttggtattaatgcaaatagtcgttccttctattttttttttttggaggaataaccattccaccaaactagtggaaaagtcattcctgtatgttaaattgtaaccaaataaaagaatgaaatgcaaattgaatatttttataccattctctttcttccatccaagcatgacttgggtattttttgtctgccttttccaagcaaggccttttttttttctaccagcaactaattaaacaacatgatttgctgccattttataaggctactaactaacaagttattcattaattattttaaccgtttaaaattatctagtgctcagtattctgaatgataataaaatttgatgttgcttgggcttatggctaaatattaaatcatgttgttttgacaagttatcaaataaaaaggtttttcagtttttttcctcttacaaaatatttggactcttttagacttaaaatgcttgggcttatgtgtaatattgtcatgtctgcctgatttctccttgacttaagtatgtaggttagatttccttaattctaagatgagaacttcatacaattcttgagatattgctcgggttattgccagacttttatatagatgcatcgaaacagcttctttatttatattctccttttctactcagtggaatctcaaagtccacatggacagagaacagccgttgtatgtctgaaagcacgtcccacaccaagaaagtaccctcgtgatccaggtacaccagcgaaagttccgctgtaaattatttgtatgcaatttttttttttaaaaataatgatatctgtatctatttctttccacctttattaaccttttttatgacaatttctaacctgaagatcacaagttttttatttgtaatgtgagtaattgtaaatgaagcagtggaacttaccttttcatcaactatattgggtggtgagctttacatgcattgttcatttattcgtccatattactacttgtggcaaaacaatgcttattgggagacattgttatcgtgtaaggtaaagaaaaagctaaatgattgagaagaaaaagctattgccactttgattatccataataagtgatgctgcaaaatatgagtgttaaatggaccaaaatgaggaaaataagacataaaaacaggaatgagttcttgccctgcttgagaaataacctgaaaactattattggttgtagtgttgcttattatgaactaggaatagcaactgcatgacgacaaaattgtttcacgaaaagttttgcatatgaatgagtaaatgtgtaatatatttccaatcattgaaccctaaatttaagggttggatgacacatgtttggtgtcaaagaagcatactttaacatagaagactgaaaattgattagataaaacatagaagatttgctcgtcatctttttaatattccaggaaattatgaaaggttgagtaatgtgatttctggtttgcacatggataatggtcatatacgaattatttagttgtttaatttatacattagtttctgattggttctagtttgctagttttgtttgtcttcgataatatctttgattatatacagcgaacaagtacaactgcatcttaatatatacatatatctatattcatgccttgttagatatatgaccaagatccgcatttggcaacattattggattccagctattaagctactccacacggtttaggtctatcatccattgtagctacaacaataactcttatacatataaatgtatacatatattatacgtacacgtgcctgtgcatcagaggttcatagacttattttactaatatgttccactttatgccaaatattctactgggatattttctgtggtttcgaagcacaaaaagggccagtaattcaattacttttctggcattaaagaaacaaccttttcttaatataaaattcagaagataaaactttttttcagataaatctgtaatatcacatgcataaggagttctctacaaccttattcactttcgagctatacatagggaaggggggagtggagggtaggttttgctttttcattttagtaaactagtcatttaattcgcctaaaataatataaaactagtaatttaatattttatagggtatagaatattaaatccatcagtttcaaaatatatatatatataaatagatatattaaaatcatcttctacctttttctatgtcgggtgttatgaattcaacattctttgcatatgtaaataattgtatgttgtcaatggcataaaagaaaaagacatttacctaactttcctataaatataaacaaagttaaagcctatagaattggaaaggttagattatagatatgttctttttatcaaggaaaaaaaaattcactatggatatgttttgattagagattaatggattttcttatattaaatgaaaatattctttcagcaaagaaaattactatagagtaagcaaatctgatataaaaaagtgaatgagcagcattgggtaaaaccgcattccttaaatggctgaaacattttggtgccgtttggtaatatttttgttttttaattttttaactacaaaatgaaagtacaatttttgttttaaaaagttttgtttttgaaaaataaaaatgtgttctgtaactatttttatatttcaattttaaaaacaaaaaacaaaagtgtgttttgtaaagttcattttcatttttattttttaattttatttaaatcgagtttaggtttggggttgcattcgggttcgggttagaggctgagttcagtgccagagtcgtaggagagatttggattcaagtctggttggagtctaaaatattgattaaggaaaaaaaaaactgtttaaaaaaatattaaaagtgattttttttttgtttttaaaattttgattctcaattaaaaaattgaaaaatgaaaatagttttataatcaaatgccacctttattaatcaaaacttccttagctaaacaatgagcaaagaccaaaacggttagtgcatgtttggcatcataattaaaaaactgttttttatttttaaaaacagaaaattgttttttgaaaacaatttggc

SEQ ID NO: 15806 - DNA, 7774 bp, Cannabis sativa
ttttttttatacattacattaactattttgattcgatataacaataacgataacaatcattaaaataacatattaccaaactaaagatttatcatatctttcaacaagacttttatgaagtcattcgaaaaattattcattaattaaattatgactaaaaaatagtataattttattttatcttggtattttaaatgcatattaaaaatttatactagctagagcatagaataaattcaaaggttagttttgatttcagtttaagggtattgttgtattctcataaatatattgttagaaaagttagtagaataaggtaataattagtgatatgttatgtaattgcatcaaactataacataataaaagaaatgttaatatgacatatcattattggtacttataattaagtattcatataataatataataattattattgaatattactcactattctttaaaccttcaccttcagtttcggattcaaaatgattttgttgtgtaggctttattattgtaaaaatgtttatgtttattttttttttaaaaaaaaaagaattataattacattttgtaattttttttaaaattgactaggacttaactgtaataaaaaatagttacgaggctttttgactattttcagtgtatgatataaaaagaaaaaaaaaataatttttatgtgcaattttttttcaagccaatttcaggctaagagtatgtttagattgtttgagccttttttattattttttaggagattaaatattctaattctttttaaaaaaaaatacaaaatatttaaataactttacgctttcatataaaaaaattaaaagtaaaagtatctaatctaaatataaaaaataaatgtacataaagatattcattcatatatatccatatttgatatttgtgaggaatagcatagaaaaaactaaaacgtggtcactactcactactagtttagtagtataccgacagcagcaataaaatataaaataaatatatataattaaatatttcttatacaataaataatgtggtccaatttagtactggtcctcacctggcaaccgtccaatctcaatcgtacggctacaaattgtccacaaacaaaatacaaacaagcattcctccaaaacaaaaacaaaaacaaaaacaatttgtggccccttcctacatttaatcatttaacagattttaatcatacttatttaattaccaaatttttatcaataaattctaatcgcacctactatttatttaattatcaaatttctattatagagttaaaaatgcttttatatgtgcaatataaagttcacaaatcatagagttaagaaacatgtacacactatattctaatttttataattttcaaaaaaaaaaaaaattatatacaatgcatagaaaaaaaaattatcaatgagcataattaacacatcatttataattaaagttaaacaccaaaacactgacgtgtggttgggagaaataaaaatataggaatagaaataggaatgaaaattggagtatgaatggaatggaataaaatttaaaatgcataaaaaaattgaaaaaaagattattaaattttttcaaatcttgcattggaatggtctttccttctatttcaaagtggaatagtcattccaccaaaataatagaaagattattctattagttggtattctaatggttttaaatgcaaccaaacaaaagaatagaataaaaattatttcctttctatttcattccatttaattacctctaaccaaactccaccacctattataggaatgcttttattcaaaatagcacatatttatgtaatttaaattttacggattttatgttcaaaaaaaaaaagttttacgaattttaaatgattaatataaaaaattgtttataagaccgtgtttggaaagttaattgtgtaattggagtgtttgtttaactaaataattacatactaattatgtaattaaaggtaattgaaaaatctcaattacacactctaatttacataattcctataaaaattgagtgtaattatataatattattacttttatataattaatattattaaattatgttattactaactcatttgtcaaacataaaaataaaaatctattgtaattactatttgagattcgaacacatattatattttaaaataaagtgtaattactaccataataattaaattagatagtatttttatattaagtattgttatttgacacctagtaccatctaaaagtgagatgttactattagttaactattgattaactattttttatattatttattaaattaaaatgtataaaatttaatattaaactacaccaaaaataacaatatgtgacctatgaatatgctacttagctttcttttatatttatgtatgcatatattgtatacgtacccgcaagtggtctagaacgacggggttgtcactcaagtatttgacagccaaggtcatggccatgggaaccgtttcctctcctgggatcatcatctctataatattccccgttatgaaatccaacggcagtcgtcgactctcgtcagaatcataactttcctgtagtagcacgtccaccacatcattccctacacctctttctttattattattattattatttctaatttccatcgttgcttttctttcctctactattcgtcccactatcttcaacaacctctcctttgcctgaaacccaacaccaaaaataaactttatatatattcagcaaaaaataaaaactttttatatataacacataatacatttatatatatatttatactatagtccacctttctaaaatcatatttatgtggactccctattttttttaaattttttttttataattatggatattataattatttatgattaaccgtaaattttttaaaaattttaaattatttataataatgaaaataaaatttaaatatttacacgtgcaattgtgtttttttatacgcatgataaattacgcgtggtaattaattgtgtcaatcttatatttgacactgtaatcttttaaaatttatatgtagttctaaaataattaagagataggccaaattttagacctaaagatataggagtctaccatatagtaatatgtatatatatatagatatatatttaccttgagagatttgtataatcttgttgtagggagcttgataggtaagcaaattaacccttttataaattcttcaaaatcttcttttaaggagtttaaatcttcaccaggatcaaggctcattaacactttcatcaacacttcaaaggtaatctacacataattttttttacgttagttatattgtatgaataaatgatttataatatattactctagaatagagatataggttctatttggctgaatttttgcttttagttactaaaattgacttttattaaaagaattttttagagctaaaagttaaaatttattggttacccaaccaaacagagtcataatacgatattactcgagaattaacgagagaaaaggcgagagctatatatagtgtacctttcgggcttggtcttggacgtaaaggagttggatgttggaccaagaagccaaattgagttgaacagaatgatgaatgacttgagtgattgtagctttgaaaattggggttcttagaaaaccaccaatgagtgcatggactctcttgtgaagtggtccattgatttgaagaatggagttttgacctaacaattctgtgatggattttggataagctggaatgaatgtgttgccttggttttgtaacactattttgttcacctctgagtctgttgatactattatggctcttcccaatatatgtgttttaaacaccttcccataccttaattaattacccgaaaaaactaaacaatcattatatatatatacctatgtaaaatattgcctaacaagacatcaaatattattaaggaaaaaaaaacatcgtttattatatttgagttcttatattttatgtacacacatttttcataaacacctttatatatatattttttatttgcattattaccatctaatttttttttacaattatataatttaatttttttaaaatacaattttaaagttttaaaaattataaaaatacgattttctcaaaaaaaaaaaatataagaaaacaattagaaaattaaaaaaaaatcaactttacaacaactataaataaacaaaaaaataactataaaatcaagcttatgataaatataaatcaattataaataaattataaaacaaaaaaaaaatcaaagagtttgttgtttttatttaagaatgtatttttgtaaaaaacaaaattgaaattgtaatttttcttgttaatatatttttgtaattttttttaaaaaaaatttagtgtattgtgtaaaaaaattcttaatttaggattggtccttaattaccaattactgggatcataaaaaaattaaaaaacattttttttttttaatttttgaggatttgtagatcacacccctaaatataactttgtttaaaataagtatttttgagaattttgttttaaaattaattagtagttattaagttctattattatattataaaaaataaagagaaaacatgttttcttttcctattttaggaaaaataaagatattaaatttattagtatatgggggaatatattttgatttatttcatggggagactgaaaatattgggagaatgagataaataggctgtggttactgtctgcacacgcaatagagtttcagagagtctaaggcctacttaggcacacacatctacccacgcttttataactcataatatcatcaaaatctgtattaccctattaattcgcaaagggaagaaatgtttcctttcagtataccttctaactattttggcattaagactttaatatgataaaatatgtttcggtacactactttttaactgttttggcattaaaaataagaatatttacggtgtgggtggtatagattgtagtcttttttttttttttaaatcaaaatacacatgcagtttttgtaatttttcagactcgcaccgcgagagtacgaaattttaaatccgcaaaaatcacatggtgaaaatacggtgtggtgcggtacaatttaagcaatttatactatcataattatcaaatgttgtaataaaaatttaatcaatctaacaaagtttttataattaaaaaaaattattaaaattttaacatcataatatataactaatcatcgatctattatattaatttgtctctaaaaaataatgtaatatacatattacatatatttgttttaatattaaagaaaactaaaataaaaattatattttataatacagtgtagttcgaactgcagttattaaatttaaaatcataaactgtatcccaccctataattcgacaaaaatacaaattacaatcacactataaaaaatttcaaatcatattttttttttatgaaatatgataccctataaacaatttatacaatatgagcagtttgattaatgccaaaatatagcacccgtgtcaacataataaatatgtacttcttttaaaacaaatttttttctttaagagagtttttaagtctagttttttatataattatgtattttataattaattaaaattatatgtaatttttttaaaattataaacaatttacgataattaaaatattttattatgtcaaaaaaaaatatttttttttagtttgaaacaattggggtataatggacaaaaatttgttctgccatataattgtttcaactttcaaacacgtgtgtatatattaatataataaatagttaatgtattgcagtatattattacttacatttttcagtcttatcttgtctttataaatcatatatatttatgtttttattctctgtttgacatagtccctctacgtgtacaaattactagttaaaaaagaaataagtactttaatttcgatcaatttaatcctttttcttaattcttattatttctaatattaaaaaaaaaaaatcaatttcttcaactctcttatggcactagaaaataatctaaaaatatattaatgtatttataattttatacttcacataaaatatttcctttttgatttatacatttttttctcattttttctacattctcatatatattaaaaatatatttataaataaaatatattttgaatattaaaattagaatataaaataagaataagagtaaattttatttttaatataataattaaatatataaattgtttattacatatatgaaataattattctatttaatttaaagaaaattattaatcaagaaaatacatgcaagctaattaacattataaaaaataatatttttcaatttttcaaaaattaaaacttatctcatcatcattatggtaaagtaacaaaaataacgtgataaaacattaacgtgatgattatcttcattaatttataaaaatattagaagcaataaagaaaaagtaactgattaattagtatgtatatacatgatgacttttacagcacacacactataatatatacacaagaatttattattctctatatatgattaaaaccacaactagctagacatgatacattatgatgacaattataaatattattattatactaattaacacaaataatatttactaattaataataataataataataattaagcttacatagatctgcgtttttccatgaagctgacaggttgagaagtgaagccagaagcaataaactcaatggtttctccaagaacaggccaacccttatttcctttaggaactttattattattattattaataatatgattatgatgaagaagtagtacttgcttattattattattattaatattattataccaaaaccaacacaaccaaaacgacgtcgttgcaataattagtcctattattattgaccaccaagctgatgaacaagtagtactactacaattcctaataataataataataaccttccataagtattctaattcctcacccatcttaataattaaatcaactacttatatataatgacctttcttttttctttcttcacttcaaaccctaatatataaccaagaacttgagaagaagaaactcagagaaataatgagagcaagtgatgatatgtataggtagttttctcactccttcatgcaaagctaagctaggaataggcatatttatgaatatataaagagattattaagagagaaattagctatagagagaagaagagatgggatacatatatatattgggatgaggtgaagggggaattgaatgtgtagagagaagtggcaaatgaatgtgttggtggctcataaaaagaaaaaggaaatatggtaattaattaattaataaaataataaataaatagaaaaaataaatgttgaatatgaaagagaaaagagaaaagagaaaagagaaaagagagagattgaggagatattgtaggtatagctagctagggctttggtagtatcatttaatgagttggccatgtttgggtgtactaataccacacgcttgcttactttgtctccactccattttggataataactcaaaaccaaaatatacttatattcattcatttccaatctctccctctctctctcactctctcactcttaccggtttacttagagcatctctaatggtagc

SEQ ID NO: 15807 - DNA, 3069 bp, Cannabis sativa
cagctttattagtagctatacataggcaaatgtcttttacaaacatataataatactaccactagtcgagaagggacaaaagagtaggaacaaacctggttggcataactgatacccatgtttgcccaagcacgaacataattgggcttcaaatccaaagcctagaaacacagtaagaggcgggagttgagaacattagtaacgaccccaaaaagaaaaaaaatatatcataacacttgtaaatatgaattttatctgtatctgtagatgttaacataatttctcattacgatttagactatcagaagtataggtatcaaatgttacatacaaataaatttcaaagttaaatcgtgcatttagtaattaccccgggagtatatgagggattaaaattaaagattacctgttgataagccaaaattgcatcagcactctgaacactattcgcttgtgttgcaccaagcttgttccaaagagagtagtcatgtggcttcagtttcaaagccgtttgaaaggattcgatggctttgtcatactctctcgataaattgtaaagaacacccaaaactatgtgaacatctgcatcctctggtgacatttgagcagcttcattgaataacctagatacctacaagcagcacaaagaaatcgcactaatgtttacacagatatttacattatttatgttcatattcatgcaaattgacatgaatagtcacgagaagatttccttgaaaacctaatgtatgaacttagatatttaaatgactttcacgcatttttatgttactacttgctactatggataacaaataatgcaaaaagataacacatacatctgcatagtacaatgaatcagccaacccaggagtcgcaagcgtcccatattttggatgattacgtaaccagccatataaatattttaatgctgcagcctgctccaactctgcatattgagaaagaagaaacatttcgacggagttaaaagtcatactcgttttgtcctctaccagtaacaaaatacttagaaatatatttccagtctaccgccaacttaactggctctcaatacataatcaatcattaacaaataaagcaattggtaaaaatacaaagtgaaaggaaaaagctactgaccatttgtatgactcacaccaagagcaagaagcacttccaaattagctggatcagcttcctgtgcccgcatcatagctgcaatagcctgaaaacattgaatttcaagaaaaatatgttactgtaaacctagagtacaagatattttctagcaataggcattttgtcatttaaaatacagaagtagtgtagaatcacctgttggtcgtcgtcattctccgcatttgctattccaagtagcctccaaccttcagcattttcaggatttttcaaaacttcagcctctagagcaagcacggcttcactcaaaaggcctttgcggaacagttcctgaccttcttttaaaggattcgggtgaccaacatagggattcatatcagagaagacatagacccctctagaagcatccgaccgctgcttggaagtaacttgctcattcaggtaactgtacatatggagtcatatagatacaaatcacattttccaaagaaagaaagaaaaattagttattatataagttctttggttttataatgaccaataagtatccatccaaggcaagtacaaccttcaaactttagactctagcaacaactaagtctaaaaaatttagttcttcattggaataaactaatgaaaaataaatatcaatatgccctctactagataaatatcatggtcaacagaaaagggaaaaaaaggcaatggtgatggtgatgaaaaataagtagagagaagcacacttctacattcaataaaataggctaccctattaaaagtagtaattgattgcattacgtttcttttgcttatttccaatattgctatgataaaaaatcatggaaaagcaggagtacttactcatcataagcattagcccaagcctcagcagagctctccccaaaagctccttcaccaacttgcttcccaaattcatctgcccagtcattggactcgttattaatttgcaaattagaaaactcatccacccactgatcatcagctgaagcatgcttttctccaccagacgcaaactcattcacccagcgatcagctccacgagaagcctataaacctcaagaaatcagtttacagaagttttactggagataaatcactcctcagtcaactaatagagctgggactgattattgacaaacacctttaacaatatttagaagaataaaaaatcttacaaaataagttgctttgatattaagggaaaagtgaggatttaggccccacttataatattagaagacatttcaaggactggtaatatagaatgtagtgaatactagagcaaatataattctacatcctaggaacaaattaaataacacaagtagggtaacaaggtcactactagcatctatcaatcacatgagtaaccacacaaactttagaagattataaatgctaacagcccaagaatcgcaaaagctctaatgccaagtagactcagaacaaacggggaatcagctaagcctacagatgaaaattgaagtccaaagatatgaaaaatagaggggaaaattgggattaagggcttctttactctttaatctgtaatgtagttagtgaaaaatgtaaaatgaaaattgcatgcgctacattaaattggtatgcaaatcagatattcaatgacaaaataagaagtttctcaagacatcagtattatgaagtaagcacaataatatacatacaaattcatcagcccaagcaggacccgcattgtacttctgttgatattctgttgcccagtcccccgatgatgatgcttgattatcattaatattaagttctccacgactcatctttgacacaaactgaagaaactttgaattctgcataaacaatgagttcgacgcttagttatatcagataaaaagacaattagtataactaatatgacttactaattttattatt

SEQ ID NO: 15808 - DNA, 7174 bp, Cannabis sativa
catttccaccgaaaatgggtgaactactataaaaccttatgtttgtcactgtcaattttcttttctacaaatcaattaattggcggtgaaattcccttacattttaattttatacacttgaccctttattttgttttgtggcaataccctctttaagttcacttttgtttgtaaatttgagacaccagttgaatttcaccattaaattctaactagattaccacttgtatacctgggtatacgtgacatgtttttattggtttgaggttttagtgtcatgtgtatacaagtgttcacaatgacaatttcagttaatatttagcgctagaatttaattggcggtccaaatttacaaataaaaataaacttaaggagtattgccacaaaaaataaaataaaataaaatcaggagattaaggtagttctggtcccaaagtggtagtgctaaggttatgtctattttcattgtgaagatgttctatgcttttgagagattgtattgggttgaaaactataaatgactgaaaagaatcataacttgtttggactataatgtgtactcaacctgtaacatgtaacatgatatttaaacaaaaagcacccttaatattgttctcttatttaattaagtataacaatatatttatatatatgacacgacaaagtatagactagagtagagtacccaaaaagcaacacatattgctaaagtttcatcacaaaaagcaattagaaagcaatgcatgtaagagttttctacttaaatcaattccatctatctttattatttgtaaactttaaataacaccaacaatcttaatataaggattaaaacttatggacctgaaataaacatacatataaaattaagtgtagtgatggtctatgaatatggttctcattacatcatgtaatccaactcacccttccaatccccactttacacataataaggaattaaattaagctaatctttattagtgtagctttcactagccatgatgacacccctcaaaagcactgcaactcttcccaaatcttgcagtattttctcaatctaaaaaccaaaaaccgtgtgaaaaaacagagaggagggtcactcattcactcactcactcactttgcctcaacacctttcaccgaaaagttataaaatgcaatgtacatttattgactttatatatattaaccaatttattttacatttataagcacctaactaaagtagtgtgctcctaaagtcatcacaaaccctccctttaaaccctcccttgcatgagttcatgagactttctcttcactccatccatggctttctagggaaagagagagaaagagaaatcctgtcagcagaataatgggactgaactgagaactgggttgttgttgttagaacagttgattgatgctattggcacttgtttcaaagaaatcttttttggagcagtgatgggagttgttactgttggtgagttgaagccaagcatttcagggaaaaggtcatttcgtccaagttcaagtataagacatgccactgaatggttataccttctctctcaattttccttccttgtttattattaatctctttttaggtgtttctttatttgcatatattatataatcaacccaattgcaaaaggaagaaggaaaaaaaatcagtacttctttttcagatttgccatcttttttaacatcccatgctcaactattttaaggtataagacagttttggcaatattacacatagagactcagagagtcccaccaccattttgatcagacttttgttttctttttcatgtgtttttgtgggagttgaattgtcacattcaaaagcttgcaagtaaattaggccgtgagatcccatttttgtcaaggtgtaatttccacaatttcacaacctcaagtttctctagtttggtaggccccttagataattgttttcacaataaaattgtatataattgaagaattgaaaacagcttgagctgatgaaataataaaacaacaattacaacaacggcacatcaaaaacctgtgacttaagacttcgacaaatccacatccaaacgacaagagcacgggattttaagctaagaatcaatgtttatattctatgttttcttgggtgtcaacgaaaagacaattcatgcttgcccatcaattatttttgtgtttttaccatctgtagctccatgaatatagagattataatattttataaaaagaactgtattgtacagtgaagctgtacgatagttcactgagtatgacaaacccaatagccttactttgaacacaacaacaaaccagccatgtaatcttctgaacaacctttttttttttctaacccttaaaggaatttatcttttttgcttgagtccacttattacacaattattgtttagttaatgtcccacctgaccacctggggtcattggtcacatcgttaaaactaggaggctcataatgtccatatacttaatctgctcaagccttcgagatagatagatttattttgaatgcttaagttttttgtgcatagtgatatgaaagtctgtaggaggaagagcacttgcaaagtttttgatatgttagaaatgaaaaacatgtatgtgtttgtagttttatgacttgttggattttcttgtctttctgccatatgaccccttaaatcagtttcttaatcttggatgtacttgcaggcctatctctgatgtttccagtgatattactgttgaagtaggaacttcaagctttccacttcacaaggtgaggaaaaacatggttttgttctgtctagaaaatgattgtttagtattaatcgaactactagcaatgacagtcttctgaaagtttgacttaaataatatgttttggtttatgggataagtaaatgatgtcatgagtttctttttgtacttcatgatgaacaaaaggaattgtggttgagttatggcttgtgtgttgttttctcttgtagttccctcttgtttctcgaagtggaaggattcgaaagttgttgttggatgccaaagattctaaaatttcgaggataaatcttgttgctgttcctggaggaccagaggcatttgagctagctgcaagattttgctatgggataaatactgagattacaatctccaatgtagccgtgctatgttgtgcagctcgttttctggaaatgacagaagacttcgccgagaaaaacttggaagcccgagttgaagcttatctaagggaaattgttctccccaacatagcaaactcgatagctgttcttcatcgttgtgaaactctcttaccatttgcagaagagatcaacttggtaagcaggcttatcaatgcgatcgcaagtaatgcctgcaaagagcagctcacctcaggtttgttgaaacttgaccataacttccctacaaaacttgtccaaagtatggaacccgaaactcctgctgattggtggggaaaatcacttgcagtactcagtcttgatttttttcaaagagttctatctgctgtgaaatccaagggtctaaaacaggacatgatcagcaagattttgataaattatgctcacaactctcttcaaggtcttgtagccagggattcacaaatggtcaaaggaagtcttcttgatttggaatttcaaaagaaacaaaggatcattgttgaagcaatagttaacttactaccaactcagtcaaggaagtgtccagttccaatggcatttctctcaagtttgttgaaaacagctatttcagcatcagcatctacttcttgcagatcagatttagaaagaaggatcggtctccaattggatcaggcgattcttgaagacatcctcattcctgcaaattcacatggaaacactcatagcaccatctatgacatagatactattgtgaggatcttttccatattcttgaacctggatgaggatgatgaagaagacaatcacttgagagatgaaagtgaaatgatatatgatttcgatagccctggatctccaaaacaaagttcaatcctcaaggtatcaaagttgcttgataactatctagcagaagttgcattggactcaaacttaatgccaactaaattcatagctctagctgaactacttccagaccatgctcgtattgtgagtgatggattgtatagagctgtagacattttcctcaaagtgagcaactctctatctctcattttatgttaataactgttcactgcatgattcaatgaagagtttgagcttaaatgtatgttcaatctctctacaggttcatccaaacattaaggattcagaacgctaccgcctatgcaaaaccattgattgccagaagctatctcaagaagcctgcagccatgcagcacagaacgaaaggctgccagttcaaatggcagttcaagtgttatactttgagcaaataaggctaagaaatgcaatgaatggaggtcacaatcagttcttttttggtgcaatgaatggtcaatatcctcagcgttcaggcagcggtgcagggagtggagccatctcgcctagagataactatgcgtccgtgagaagagagaatagggagctcaaactagaagttgctagaatgagaatgaggttgactgacttggaaaaagatcatgtttcaatgaaacaagagcttgtaaagactcaccctgcaaacaagctattcaaatcatttgccagaaagttgagtaaactcaacaacttgttcaggattaatagtattaagccaattgggggcaaggcaaattcagaaaccagattcccatttcagaagcgaaggcgtcattctgtttcatgactttgtgtaaaagtatcaatagttcaaacgagtgtatagtaatattttatatgtagtgagtgaatgtttctaatgtcaagagttgatttgattattggtttctattgtgtaaacgagatcactccctttgacttcttattactccaaaactctctttaagacagactttttaggattgaacagatatccatcctagtaaaatacaaaatcaacaaaaccccatttaaatatttactactactagcaataataggtagataagattagaccatgattgatcttcatgatgatgatgatgccaattccagatatcttcaaagtaaaggatgagaaccacatttcttttttgcctcaagaaaggtggacatgcttcatcataaaacttgcaaagagatagaattcatctatttttgccacaaacatattacatgcccttggtctagtgtttgtaacaccacagttatttgatatgactcttgtccataatgctgtcccatttgatgctttgagttattttggggttcattgtaacttacccaacttggtatctatcaattaaaaagagttgaaataaaaaaggaaaacaagtacacattattgaaacacacgcatgcgcaattagttttgtcaagaaaaatcatagtgatgcatagtgttactgtagtgactccactcacttatgtcatggcatggcttggggagatattagtcatattggaaagataatttggtttccaagaaagtaaaaagaaagatatgaaagtttaagaatctataattagaatttatatgtagtgttatattggagagattgtgtaattagatgtagtaattgatgcagaatctataattagatgtaataattgatacacactatttgtgattgtggagaaatattatgcgtgaggattattattaatcacttatgataagtcacatggtaccgattttattcaattgtattgttaaaaatattgtattatgttttgtcaaaagagtaaatattgtattatgcgaacaaacactgtgttaacatcacatgaaattattgtatttttctttatatttccataaaatgaactggcatgtaacaacagggcatagcatacattcaaaattagataaaataatttacttatgagtcaaaaaaaaaatatcaaaatagaaatattattggtcttgtatgaattgataccgaggttacatattttaatttaataacaaaattataaaaaaattaggactatctccaggataagatctgaaaaaaaaatttatatttggctcactatgtacaattatgcttcaatgcactagaaaatactattttggacactgtatttttcaaaatttactgattcgactctctattttgttaaatgtcaatttagaccatgtatttttcaagatggtataaaatagaccatgaacacaatttttggcattaatatgtttacactaaaactagcccagataatgtggacatcaaagtttgacacgtgaaaaaaagaaaaatattcatggagttaagtgtcttgagtcatagcagtcaactctaggaggatccctagacctgcgcccaggttgacttcaggggcttcagaatggatatttggatcccactaagttgttttcaaggcaccatcttttagtattctgaaccaacaagtctggaagactgcaagtccaaagctagagaattgaaaaatgtcaaatcgacatcacgaaagccaacctgggtgcttagggtttcacatagcgcccaagttaacatcatgggctagggttttagtttttaggtccgtcttagtgcatattgttcaaatctcatacttagatatgaataagacatgtcacaagcatgtaataggcaccagaatcaaaattggaacacttcccgtttgaggtacctgggcactcaatgtccaagtcaacttgttgatgcacccatcacccaagttgatatattgtcaacctaggacgctttcaactacattattgaagatatttcttaagaatttccttcattttcatccaaaatgaggaaacaatcgcgttcgggaaagaaatagattgacctgcaggccaaaactgggacccaatgccctagttgaccttgtgctaggtcccagtgccaaggttaactgtgccatttccaacaacaattctcacgaagtctttcgggtatattctccattttcatcaataattaagatacatgtgctttcgagaaacaaacagagttatttggtggtcaaaatagggccccagcacccaggttgacatacaacctagtttgcatgtttctgctcctcaaacacaaattttactatggacattcttcttattttggt

SEQ ID NO: 15809 - DNA, 4670 bp, Cannabis sativa
aacacatttactatacaaataatactacaatatggaaatttgttgttggtggggagaagtaataacataacattacatcactttggacaggttttatatcactttggagaagtaataaacttattttattaaattttattttaataaaaattataaaaaattgttaactaattataggacggacatcttttatagtggtgttagacacctcgatgctgtataacaatgtttctttttggcaccatacttgcatacattaatttttatactatttattcaaaatccccaacttacatttaattttgttgggtggtgacctaaactcttattttcatttttattttttgtattgataaccattaaccattggcatacttgccaataaagcacaacaagaatgaacaaaatgatacatgccagtaaaatcaagcatatcatagcaatcaaagaattagatatgttcaagtatagcgcctgtatgattgaatccgcatgatacttggaatgctttcacatcccctcccaagttgatcattgtaggtttcatatagtcaacatcatttccatgaccctacatgcaaaactaaaaattagatagattttttctgtttttttctttttattttaataaatacaaacaagttttctattattgcattgcgcacaacactaatatgagaagacagtggaaaattacgaataaaaaaagtataagcttataccagttgtcctcctgaagaatgcccatccacggaaaaagttccatgtgaacctccccaaccccatgtgaaaactttgccttctgctttcatgaaaatcaggttatttaacattcagcctccgtgcccaatgcattttaaattaacttacataactaagatttgttaccttaacaacaattatcttactgaaaaaaaaaaaaaaaagagcatactaatttaaaaaaaggggtttgggcttatttttccgttgctaacaaatatgtaatcatcattttcaatttttttttattcatcaagctagaaacaagaataaactaaatccgaaggtaaaaaaagaattaaagctcaccagaaatcgctgctgtgtgcttccaaccacaagatacctgtaaatgaacattatcaaagttccagataaagctacatatttttattggcacattttaataagattggttaatgaaggctctagtgtaattctttaacaatagcaccgagcaaaatgattaataatacattcattttctagtccctatacagttcttttacttcaaaaaaagtaaaagaacacaaatttcgagtccctatacagttctttttcatcaaggataaaacgtttagttgggacactatttcagaattgattacacaaaattattggtgatacttcatctgcttcattcaaaacaagtaaagtttgtatgtgcatttcccataaaaaaataatgtataaaaagtaatagaaaattattagattccttttgattttctttcaaggcatgtttggcccatgagactagacctatggaccttttggagtggacacatgatccctagttggaggctttatgttaaaaaatgttatatatccaggttttatttaagtataatttctttagttgaaaaacaatacaaaatacacactaaattcttttcaaatgtatttcatgtcaaaattattattctagtggtaaatttagtattgcatttcaaacgagccctcaatacataatccaatccacattaatcctattttaaaatccaatacaatccagtcttacctaccaagtgatcaatatgttcattagacctaactaagaaaataattcagacacttgagcttttgagaaaattctaccgttggagataagctcaaaatgaaatatgtatttctatcttcctcaatgaaagacctaccagaagcttttttgggaataggaataaggcaaagagatccattatcttctttcttgtttgctattgtgtaaatcttctcttttccaatgtcaaatttgaaagtaaacatttggtagcagggtgtggagactggaaactagcggaaatgtaatcttgtaagtcggcttttgagagatttagctctcatcatttggtagctgaggtaaaatgggcgaaatggaaaagttcaaaccatctagggctcgtttggaaagctactatgtaattggaactgagtgtaattcagagaaattacaaggtttggcgagtttgttgagccaggtactaacacagtgaccatttaattggacgtaattaagggatcactctccaatactcattcccctttatgagaattgggtgttacaaaacattaccatttttagctaattaatgttactaaactatgtaattaccaactcatttgccaaatatgaaaataagaattcatatgcaaacactacttgacattcacacacgttgtattttaaaattgagcgtagtgtaattactagggtagtaattaaacagttacttccaaatgcactctaaaataaaagtgtttgcatggttattagcattacgaaagttgaatggtcatgagaaactacaacacagacaccttatcagtggttgtctccaagggtggtgtttgttgtaagaaaagcggaggagaacacttcttttttaagaatgtccttttaatcaggtattgtggtataaaatgatcaatgaattcggagtggcgatgccccgctcatgcacctagttgtttgtgagctaattgaaaggagacgaggatttcattattgaggacaacaaccattattgctatcttgtgggctgtatggcttgaaagaaatagccgaatatttgaagataaagaatttgaagcagaagggctatgagaaagctcaggttttttatttctaaaaggttataaaggatgtcgttcttgtttacctgcttacattatgttgtttgtcattttgtgtgcttcagtggtttatgttcttgattgtaaccacagatttccacaaccaaaagtgagggctataaaaatcttgggaggaagtcactcatggacatgtggccttttgtctcttgtttttcttcttttttttttttcttgataaagagaaatatgtattcttcccatattaagaataaacaaattaaaactcacaagaaatgacagataccaatgaaaacaatagtggaaagagagcaatattaacctggcttacaatacattccgagaaaggaccttgaactctttctggttgatgaaagaccatcgtagtactggaagacaaaacattacaacattttaattttcataattatgcacacattttcatttctaagatgtaatttaaatcctggtgagaagtgtacccaataccaaggcatccattttcatttgaaccccaagtgtacaattttccaccacctatgtatcaaatatacatgtcagtagagaaaaagacatgtgtctgtgtttaagctatttttgaagacagtaaccagcatgaagaataacactaggccggaaaatcaaatgttaaggtaatagcttggccataatacttctactttgattctatatgatttcatactcggtaatttgttaggaaacagccaatagatttagttttgtttttttttttttggtgaatatataaaattagttacttccatttatttcgatagtaaagcataacaagtgaacagagattttaacattcacaagcatggccataagggaatttaaaatgcaccataggtctgcaacgcgtcttttctagactttgtaggctagtggaaaaagtatagacaagatgagggggattatccatgttcatatggatatatggaaatttttgagaaaatttgaagaaacggaatgtggaggtctctagagactttagatttatcaaaggagctactacaaccacctaggcagaattcactcttgaaataatagcagatgagaagaagatgtccaagtaataatgaactattaattaattatatacttagtttaggcatggaatataaacccagctgagagaagcactaccctgttggattaagttttccttgaattaacattgaggtaaactgtggggaggggcaccaccttgcataatagataagaaaattggttaggtttagttaagaaaaactcatgtgattcacaaaagttgatatggtgttttcgaatcatcgaccttaactacaaaagcttttggctcttgcccacctttaccatggtcctagttttatggtaacatacaagctacttttgtcttctgccaaaacaacccatcacttcaacgtacaatggagaacacgaccctttccttacaattacaagcactactcttgaccgaatttcaggttattgtagaaccaacgactgtgttagccactcaacaacaacaaagtgtgcaactgttgcttgttggaagttctatcaaagggtagagcatggctccctacaaagctacttggagaactttcagagcttacaattgcacagattcttaatttccatcttgcagacaaagatgtagagttcagaatggggcaatgatagaactccacttaagcatacacatgctaggcttaagcggttaccaagaggagatggtaatgtgtctataatagattcttttcagatgaaggaagagatgagtggcaacgaat

SEQ ID NO: 15810 - DNA, 1854 bp, Cannabis sativa
tgttattgaattaaattaaaatttgtgatgtttattttttcaaaaaaaaaaaaaaaaaagaacagcatttagaaagtaacttaaaagtatacataaacaatatacaataaagcatattgaataagattgcaaacagttaagaccatcttattatatctaaatccttaaagcttaaactaagaggaggtgggtcaacactgtttttcactttacattttaacaaaaccaaaacattcaaaggttcaatggagaggagttgcagacctccaaagtgagtcattttaaaattaaagtcccattactgctaactttccagtgaacttactgggataaacattgatcccaaaaatgaaaggtccaaaatttaaatttactattaccccattttaactcatagaacaagtcttgaacttcaaactttgtaagttagcattactattattgtatgacaataatgtaaccaagaattttgaaacacaagcttccaaaaaatcataaattgaattattttcaaatgtcaccaataagaaacacgtgagatctaaccagcatagtatcttcttgggttagcatcagggtgcaaagattcaagccgcctcactggtccccatagccttttatacaatcgactctgcaccacacacattagaattcaaaagaaaaacatatgttaataaatgctctatagggacaagcaaaaaagtacactcgagtatattgcaatagtatgatccacgtatcaaaaaattcaacattagtctcacacaatttcctaagatcaaaccccccaaaacaaaaaaaaaacgatatttttctcaaaacccagatggctaaaacatcacatttctctattcttggagcaaaaaccaatcttgagcgcataatatatcaacatggtaacaaaaaaacccagaagtaaaaaccgccatggaagcttccaaaacggagggaaaagacaaaaaaaacaaaaaactcaagtgtatgaaagaggacaggaaaatttaaacaagaaataaagaaacttaaatcaaaaaagagatctttcattggatgaaatagtcaaaactcacggttttggagaagtcttcaccaatggatcgtctagagaagattgtgattgttgactggtattctgaaatacccccatctgtaaatctagctaataatatgtgaacaaagagagaaatagcagagagaacaagcccaaccaaaccaacccatttcattttagacttaagcaccatctttgcttcccctttcatcaagaccaataatgagtaaaaccaaaaaaaaaaaaaaaaaaaccgaactccttccctctttctctctttctctcttaagaaattccccctctttctctctctaacaggaccagaagagagaggaagcaaagaacagagatagagtggtagtgtatactgtatagtaataatagaattagaagaaaaaaggaaaaacatgaacgaaagagagaagagaggaagagtggcacgtgcgaagacctgttttttcaagtgtgaaaattttagtctcagacatgttacgaagtatgagagactgtttttctcacttgtttgattgaattcacccaactccctactcggcgcgtggagagaaccgcttaatgtaatggtgttaacaaaatggagtacagtgctgcagagccctcagactcagtctaagccagctgggcctttttttttttccttttttggggttaaaacgaaaaagggtaaaataataaggttaattaagatttttgacacttaaattttagagcaatttgcggcgaaacccccttatgttttgatttttatacacttaacccccttatctttatttttggtggcaaaa

SEQ ID NO: 15811 - DNA, 5549 bp, Cannabis sativa
taccaggcaatcacagctcagatggcactcgatacacaccagagaaaacagtcacagttttctctctatcaacccgtgtacacccctttgttcttgaccctcttcaagaacagaactctcagcttagaaccctaagcaattctctcttcaatcctctctcttattctctctattctaccttctgttctctcacctttctaaaatgaaaatactagacttatatatatacccccaactcaaacaaggatcaccaactaactaactaacacaacccaaagttagttaagttagttggtttaaatgagttggataataagttggtttagaggatcaatttccacaatttctgatattaattagaatattaatatggtgattgcatccttaatcaaatatgcatttattagcagctatcaatagaacacatttatgctatcaatttctcattcacaggttagccaaaaatcgactatttatcatataataaattaaaatgactttccaacatcttgtttgttggtttgtttcagatacgctcaatggaaatggtgcgtaagcgttttgaaagttttccagaagcctttgtaaagaatcttgtctatccacaaacaaaaaggtgattaacagaaagagttttggaactacttaattgttacctaataattttattaattgtattgttcaatgtttgctcttttaggctgcccttcaacagacaattatctcaggtgagattcttaaatttatttcttgctatagcatgcagtacttcagatttctaggaggtatctgtattcttctgttttttgtggcttggatagtttacttgtatcacttgactatctgctgcttcttgttctgaattacaaaatgagctcgagctgtaattattacttggtctattcaggactctcaggatacggacaagaaatatgctgcgatgttttctccattttggaatgaaattatcaaaagtttgcgtgaagaagattatattagtaataggtaaacaaatttcaatttttatcaaagactaaaaatatgggtactgatcgtgtttatgttttatgtttttttatttttataaaaccgtgtttatgttttgtgattatatgatggattcttaatgatttctatgcattattcagggagatggacttgctttcttgtccaagcaacgcaggaagtcttggattagtgcagtggcctttgttccttctcagtagtaaggtggaagtttaatctgattttacttggcaaagattatgactacacatttcagtcccatactcggacgtcatttttgttttctttgcattagatttcgttggctattgatttagccatggattgtaaagatacacaaggagatctttggaatagcatatgcagagatgaatacatggcatatgcagttcgggattgctactacagtatcgaaaaactcttatgctctcttattgatggtgaaggaagactctggtatgattttgtcttcatcctccattatacattcatggattatatttactaaacccccacacatttgccatttccttcaccttttgtattagggttgaaaggatctaccgtgagataaacaacagtatattggaaggatcacttattataaccttatcgcttaagaagcttccggtggtgctaaaaaagtttacagctctaactgggctcctggtactttttcatcattgtaaccatgtttatgtttctgaagaaagcagatatgtgtaaagaaatatataagttgatcattacaacgttggtagtagtattacgatgccatgttttggcaccattattctgtagtatggtcatttccttcctttattacgtttatgctttcattataactcttggtaagagttaagggaaagctgctaaaatatgtttgacgagaagaatatttcctgtttaatagtccttgatgtgtctgtcagtcttttgcacgtgtatcaaaactttatattaagtggctcttctattgaaactaacattagtttgttgcttattttgatttggaatactggatctaggtatacatgtaatttcaattaatcttttttaatatcttatcaaacgtgtgctccagttacggaatgaagatcctgatctttctaaaggagcttcaaaagctgtgtatgaactatatgaagttgtcacacataatcttatgtcacctgatttaaggtatgtggtttgtacacatcagtttctcttttttattaccttggagatctttgaggttttcatttgtatccttgtgctgtgcattcgaccacagggagcaacttgatacctggaacattttagcaagagcaagaaatgaagggcgtctgttttctaggatagaatggcccaaagatacagaagctgtaagttttcttggtgaaatgcaaccatggacatctttctgttatttcctttgcatttatgctctgtttttgtctgtgtggtcaaagaaagagctagtgaagcggttgcatcttcttcttactgtgaaagattccgcagctaatattccgaagaaccttgaggcaagaagaagattagaatttttcactaattcattatttatggacatgccttcagccaggccagttagtgaaatagtccctttctggtacatatgagtttagttgttgtttgttataagccaattttgtttttctctgcatgaaattattaatttttcttcttctgcgtgtgcttgggaatagagtcttcaccccctactacagtgagactgtactctatagttcttctgaatttcaaaaggaaaataaagatggaatatcaactcttttctatcttcagaaaattttcccaggtaatctttcttcgctctaattattgtactataacgttgtattatttctcggtaattaggtcaactgttatggaaatatagaagctttttttcttatttaattccttatatttaataaattgtagccctcatagaataacagaaagattctgttaaaatgttagttgtaatagtttattgttagcttatggtccaaatagagagaatttattgtcttggcccaataggcttaccaaagacgttttagagtatgtctataggctctgagcgtgttagtacattatgactatctcattatagcccgatataccatacattacagattatatagttattattacatgctaatattgacactaagtgagcaacacttagttatgcttctccacatataactaaactatcatatgatgatcttttatgcatttgagtctctttctattactcatcttctgcttttttaataagttttattttttattatagatgagtggaagaattttttggaaagaattggttgggccgattcaactggttatgcagaattgcagaaaagttcaagtgatgctttggagctgcggttttgggtatcttaccgtggccagactttggctaggactggtttgattccttctattacaaccacatatataatataaccctcactgttttatgtttttcgatttgagggcggcttaatatctaattacgtacttttatccttttccacaattttttctaaattttaataaagaaatcctctcttataattctttgttcacttgcatattataagcagaataatggcttttatgattgtaattgcagtgcgtggtatgatgtattatagaagggctttaatgttacagagttatttggaaaagagatcgttccgaggtattttcttttaaaacttttaaatgcattaagttcctttcttacgataaatgacttactgccactttgtcacaattttcctgtacctgaagttgatggatactctcaaggcagcatccctacaagtcaaggttttgagttgtcacgtgaatcacgggcacaggcagatataaagttcacctatgttgtgtcatgccaaatttatggccaacagaagcaaaggaaagcacctcaggctgctgatatatctcttttattgcagaggtattgatctcatagacttttcttagattaaaaattgtctgacaataataatacacaagaataatgaaaccccactagaaattttgtttgggagttggattttattagaaaaagaaaacagtaaaaaaaacgtaaaaaaaataaaagcatggaatctaaataaaaaattaattttcatgttagatttggacggtttatcctatatattttctaatccaatttaaattttaggttgctaaaatttaagtgcaacctgcccagttttaaaaaaaaaaatctgtaaatcgattaacggttgcggtttggtcgggttaacccgcccaaataggccaaaccttttttttggtgccaaaatgtatcagaaatcctttttgtggaatcagtagcagcgggaacaatggccttctcagagatctgagtagtaacagcaagagataaagaacccgtaggacaacttgagaatgcgaactcatttgcggaggactcaatagaatgagtacccgtgaactcgctgaaagtcagatgagctcttgggattgaggctgagtcgtctacttctgagcccgagttagtagagacagcttgaaatgtagtaacgactttaagatcttgatgttgatcgttgaaataggccgagttgtggtcgtagatttgggagagggacgagtcatgggtctctgttttgctattggagtaccgaaccaaagacgatgagtctccaagaaagttgctggttgcgtgaagacatcgtgacgagggagagctcagaccgcctgagatggtgacgacgtgaaatgaatagaggaagcgagagaggatgagaatgagagagacgagtgagtagtcgtggggtgactcaggtctttagatttagggggttttttttttttaacttttactttttgataaaaatctgataattatttttagtaaaacctgccactttaggtttttttaataagataaaataaataatattttaaaaaaatttaaaattaaaaattaatagtgttattcaggttatttcgggttaagtcggtttaattggggggtgactttattttcaacccacccaatatacaaattgggcattttttttggtcagttttttcggtttggtttaggtgtgttattcagtttaggcggtttacgataatatatgtacagccctattagataccaaattttttgttcaatcaacttctcttcaatacaatcctttcaatacttttttttatatcccccaaaattctatttttgaaaaagggttattgaatcttcaagaattactcgaggggctttctcataaggcatctgctaagttcccttactttttttttttgaaacgaaaatgtgcattgataacattagacctcacggtcattacaaaggatattgtttgggagcgaagaaacacacaatcgcccatatcgattgttagtgaaagcccagttagccacattatgggccattaagttacaagatctgtcaacaaaagaaaaattacaaacatcataaaactgagagagttgtttacaaa

SEQ ID NO: 15812 - DNA, 3733 bp, Cannabis sativa
accacaaccacaaccacaaccatgccgtaaaatctccatcgccgaaacctaatcagaatttcctctcactcatcctcaaagccctcattatgatctttataacctcacttttcttcatcttcgtcggcgtagccgccatcctcttcctctgtctcgccggagaagcactacaccgtcgccgtcgccgaggcggtggtgagacccgtcccctcaattccacgtgtggattctcgcctcgtgacctaagaagacttccccaatttcgttgccgtaacgggaccgaaggcgagtgtgtggtctgtttggatgggtttagggaaaatcaatggtgtagaagactcgttgcttgtgatcacgtctttcaccgcaggtgtgtcgattcgtggctggttaaggtcccggcgtgtccgatttgccggacacgtgtagggttggattttggtgatacggtttcgtcgtcttcttcgctcgatttggctgaaggggctaaacagtggtggggattcaatgagtgacaccgaattcgagggtttggttaggcatgtaatgtaagttctgctaaaggctaaagctttggagatttttgtatgatatgttaacttaattgggtttttgctctaatgtataatatagtattagaatctaaattgaataagaatcgcagcatgtttttttgttcttcatgcttatttctttttcatatgtttactattataatttcctttcaattgaacttaatttgcttaaaatttgataaataaagggttttaccagatgtagctttgtatgtgattgtgtttagcactttactgcttaaagttaggatttttaggagtgattaaagtaatagtgttgtcagtggcaaatcttcgtgagtctttatttctttactcgtgtgtagtttatgaagtttcaatgagatatgaaatctttatgtggagaatgatgaagatggttgatgagagttgatgaatcattctactctttagtggatttagtctagtaagtatggatctgttgaagctgcagttatgattgaggatgtctgtaactaccgaaagggcaagggcttgtgtagtaccgagctctgtaataatcagcttctcattgtgcatttttgttttaatgttgaataggttaattgtgttatttggcggctagaagatccatactcagtttcttaatgatctcacacagtcacacccttaaggttgggtttaggtcgggtttgtttgttggatatcttgtaatcccgaagggcgagtgcttgtgtagtgccagagtgttctgtaaaaatcagtttttcattatgctttttagttttaatctggaataagttgattgtgtgtttttggctagaacattcataagggaatataccttgtatggatactcagtgtcttcataattctcacatacttacacccttaagatcgagcttatttgcataaggagatttgacataagtttttattagtgatcataaaaggctagcacagatggtaaggacaacactttagaggacaacggtcatgggtggtcctatttctacacttaaggatatctgtgattctgcaattcagagtttttgtcttctgattttctttctccatttcatcctgtgttctcacaacttgttctctctatcttatccaatctgccttgtgtatcttactatgatgatatcacattgattgtttgttggacattaatgccttacggtggctgagagaaatttttccctatttagattgtaattgttttgagtattaaagatatctggatatttcactagaacttttctgacaatgaaactgtgaccaatgtaccttacagctcgtactgtttgttggcaataattcatgaaccccgtgagcatagggagcatatcgtgaacatacatgaataattcgtactttccttctttaaatgagtcaaaccaatgagtaagtgcccataagccattgtcaacttgattagctagttttgttctaccatagttctcttctaaattatgtttgggaaactcagtagtctgaattatccattcgataagttagattacatatggtttggatctagtttcagaatattctcatttctacttgtctagaaaaattgaaggcatttagactgaatatgggtggcctctacactgagctgctgagataaccaagctacaataaatatcttccatcaagaacaaaatggttggtagagttaaagtcatttttggcttttcaatgaaatttattgttgtatattctgatctgtggacccaaaatttagtgatgggggagtgtgaaatagagacagagcaaatggtttaaagaaaaaccagggatacatttcaccctgtttctaagttgattaataaaatgatattattattttattatatattagttatttcataatagctattataatatatagctgtctttcctttaataaaaagaaaaggttgaagataaaatctgacctaattgattgaaaatggagaattagccattatgcaataaaatattgtctctttcagacataaacaagtatgagctgagaatcaagtgttatgcctaaaagaggatgtggtaaaccattttgatagaacttaatacttatctatgcagttgataatgtgagggaaaaaaaaaatcaagttgtgaatttacttgtattaatgttttttattatttaaaaaattatgtaattatgtaaagaagaaattatcaaaacaaattagtatgctcttaaaaacaattataaagaaaaaaagatacatcaaatatataaaacaaccattattagtatgttgtattgttttgacaatgaatttcaaacttttaattatgaagctatcttccatttctattattattaagttttcaatttcatacttataaaattatatatttgcgtcgtctttgcttaatgtaaattttcaagattcatgttgtgcaattcttcagtttgttcttcagaacttatcttgaatccaattcttcgtactcaaaccaagtatgtcgagattgatttttcaatttgtcggtgttgctgcctagtcctcaattgtttaatgttttgttaagtgatatatatcactatcaggttgtattgtggttattgttaagtaatgcatatgcaattttttgttttgtacaatgtaaattgagtgtaaataatcaatagaggtattacctcattgaatcatttcctaaagtattcaattgttgaagcttaaagttgtctcaacagcaaatttgattacaaaagaaaaaatctatcttgcaaaaattcagcaagataatacgcttttgagtgagtttagccaaaatgagagatgttgtgcgctatttatagaaaggggtaggagaatttgctctcattagtgcatgcgggacatttataattttacaatttaagtgtgagtaaaaaagttgaaaaattttccgaacaattgcccccagttatgaagtagtcaagataggaagaagtcgagtttggctgcttcgagaccaaattttttatcttgatcaccttcttaaaaaatacttaatggctttcctagagaagccaatttgtcttagctttaactataaattttgttgggattctctaccgctagtgtaactgagttctaccctagtgcaattgagcttctttacacccatatttaaaaatatgttaaaagcattataacaaaaagaaataaattcaatttggaccttatttt

SEQ ID NO: 15813 - DNA, 4398 bp, Cannabis sativa
  modified_base (4368)..(4371): a, c, t, g, unknown or other
catcaaatgtgttatacttccagtaacaaagtggaacaattatgtagataaacatgataaaaccaactccgacgttgagaatggaagagaaaggagtgacaagagggcttccatgataagcagaaatccctgcccaatcaagggtgaaggcacctatcccaagtccatgataacctgaaccaatctgttgagcagtgatactatgtggccaaacccagcaaacccatgagaagaatgtcaatattgggaagatatacccagggagggcatagtaggcaaaacttgctgccatggcgatgaggaaaaatttcattcttgaaatgcctttatttctagactcattttcatggagtgctctgtaataaaaataaaatttttatgttgtcagccaaaattgtatgactagaatactgattcgcatgcctaaaaagtttaggatcatgtacatttcaactccaaagataaaaatgactcagattcattcaaacacaaaggctcaaagatattggagaacaagcaaaaaagaaaagctaacagtgaaacaatacagtactttattttaaaaacaatatatttttattttgtgctgatttattaaaacttttagcttagatttttcacttttcaccttatgcaaattctccatccaatccattaataatcattttacagttgaccttaaatttagagaaaagaaataaaagtgaagggaataatattgcagtaactggccaaacactaaatggaacaaattctgaaccagtgaacatgcacttggttttgtgacatcatgtaaggaatgaactttttcataaaagatttcaaacttgtatgggacaatccagcttatatcttaggcttagctactacaaatggttccacacttttgtaccatacttttcaaatgatgatgtttatacttttcttttcaaaagcaccctatgcatctaggttattataataataatcaaagctagctttcacctatgcttgtttttttttttaaaaaaaaaaaaaatttatatatatatatatatatatattcatgtagcaagggcaagacccataatggtgtgacaatagagaataatatgataattaagagagtgggagtgaaggcaaaaacatctagttttatcaacatattaactttcactcaaatccttttcagtttgaaaaatgataaaagaaagaaaaagattgcaagttttcaccaactggaaaaagaattggcataaactacaacccaccttttggttggtctataaaatttggaatgaaaggtaaataagaaagtagagccaatttgagtagtgtttgttctgttattttgatagtgacaatcagtgaccaattggccaaaatatatgaccatattttgcttatttgagactagactagtgatggaatatattacttatctgtaatggtccatacaagtaactttaaacttatttttgatcctactttttcttgttaaccaaacagaaaatcgagttcatcagtacaataagaatggaggaatagtcaaacctaaacagagaaacttgggcaaggtttgctggccaccacatctcaagtggctcgaccaggtacctcctaagcattccagcccatccataccccaatatctgcaaattaagattgaccaatggattaacgccaataattcactgaattaagataaaataccatataatttatttatttgaattgttttttgctttttgtcactacttttcattcttctctgaaaaaaaaaaaaaaccttcaataaataaataaattaaactaattccccctctaacgaatatattaattagtataataatagatttcattgcaaattccaaaaccccctctaaactcaattattcattaataaataaattaagatatatcatttaagaaaaaaagaaaagaagaaagagtgagcaaaacctgagtggtcaagacgatgagaagcgcacaaagaaaattgacgttttgcttataataggctttcatgacagtaatggctccgatggaataagcgtcgccgccaccaaaagaaactccacagttggcaaaaatagtgatgatgacgtgttccttcatgttaaagggacctggattcaagctgaaccgccatcccaacaagctgtactcctttctgggaagagtagccgccatgaacttcccgatgggcaaaacggatatttgcatgagaatggcggaaatggtgaggggttgagtacggtaggtgaagaaggtgttgaggaagatgagtagaacacacgagcccagacccaaaacccatgcccggaaagtcaagacaggcatagttgggtcgtcggtttccggcaccactaaagccacttcctccactgaacatctctcctccgtggattcgccgttcggcttctccgtgtctgtatcgtttggaatttgggtcttggtcgccattgaagattcttttcctctgtttctctgtttcctgtcacataaaagagaagaaaaaagataacagagactgagactgagactgtatctttcttacaagttcgttgcttgtttgaaaaatgtgaagaccgtagctctgtctatctatatatacattctatataaaatacataaaatatgtacacataacagagagagcactgagaagggtaaaactaaagttttgtttatgacgaaaatgtccttcatttcattggtcgctgctgcttttaccaaaggggactctactctacactgtggactgaagtcacacactatagtctccccaaattcccacgtctactcttgcaacgttcattaggtttacttactaaaataccctttttaggaaaacaaatattagctgtaaaaatcttctaattgtcatattaggatttagtattattctatttgttttttattttgaaaaaaaccaaaaatttcattaaaaagcacaaaaatgtctcaacaaataagagagttcatgaaattaacaaactaaatttacagagagccagttacccgatatatttatctaaagttagagctaggtttgagtaatactatttttacaattaggcaagattatattgtcaaagaatttgttatggtggtgcaattagtggtaggttgtaattgtaaataattttactttttgtaaagattttttttttggtttgctttgtaaagagatattctaatttaaacaaaaaatgtgatcctacttttataagttttttaaaagaagtattgcagtttttaaaaaattaaaattaaattagaccaattaaatatacaaatcaaattgaactaaactgttccactcgaaatcatagtttttacctcgtaattttttttaattaattaactgttccatttttttttccatgccatttctcattagaaccagggtattatgttattgtaatttcgattaccttgtgattatggaagtaaatgataatggttaataggtttacgtgataagttaaccaaatatctatcaaatttatcaatatctcgttccaaaactaatctagctaataacagcttctttaattttcatcataatcattaattggagtgatgcagctgtaaataccttcccaagttttattttatgttaagaataaatttttgtttcaacgaacagtgatagaatcttaaattccaactggtttttgtgcagaataatgtcagttgatggctggctatattttggtataatatttgctgtgaagttatagctcttggtaatatggaataatagagcacgcatttgggctcaaatcctcatccagaatgtttatatgtctttttaactatattgtcggactttataatgatatctcagtttctctgcttttagctagtatgattactttatatgttctttgatcatataataaaaagaaaataaaaaaattccatctactctctgtcaccacaagttcttcaaatcataatctatcttaagatacataaatatatacttaattttttttgttacatatagttcatttatttggacgtacgttaaagagaaatattattatacagtgtaagcggtagaaaaggttattttatagtgttgtactttggcatctggcatgagagtggatcactaaatccgatttagaatttggtattttgtagggaagtttgtcagattagtgtaagctatataataataagtacttgtcaattacttactattgtaagttttgtccgcttgtcttcccaccaacattttgaaagagacaatagagtactgggtacatatataggtatgggagtttttaattaccgtgcactcttcaacatatatacacccatacaggggcggacccacattgtagcgaggggggcagtcgcccctcctgaaannnnaaatcgagaaaaaaatgtatatgtatt

SEQ ID NO: 15814 - DNA, 5339 bp, Cannabis sativa
gatattggccgatgtgcagggtgaacatcaattttgggcaattctggtagcctcatttcaaaactatcctgccttattattgatggttccttgtcggatgcatccaagggctggccattttccatcattttctctggcggtggactccgaatatttggtgattcatgtgagttaaaggccccatcagtgggccggaatacgccaggtactctctgaagtgagggtgatttcatcatttttggagaagatggttcatggtagctatgacttgctgaagaatccttttcaatttggaaggctgccgtctccttgtagtttctcactggcatcctgcatgaagaacatagccagtatgatgaacttgctaacagctagggaaattagttattaaagaaacattcttaatccacaaccccaaatagaataactaatttttgtcagataattataaacctttgatgatgtaagcaaaagcatagtgatagtattctcttgaatcatacctccgaggaagttttgcagcttcttcacatttaaggagctcagcatatagaccatcaagggttaataattcatcatgcgtgcccatttcaacaagttgtccctcttccatcacggctatgtaatcagcattctttataagactgagccgacgggctattattatagttgagcgcccaagcatgaggagatccaaagcctcctgaacagacctttcagcttcaaaatcgagtccaccagtgacctcatcaagcaaaagaattgaaggatttaaaagcacagccctagcaatcgaaagcttaatcttctgttcttctgtcagaggtaaaccagctctcccaacctgataataaacagaacctcaaaacatacaaaacaaatgccaaaaaccagaagaaaaagggaaaacacaatttttcaaaacaaagttactatgacatttatctgtcctccagattatacctgtgtttcgtatcctttctcaagtgagctaataaatgtatgtgcatgtgctatcttagcagcctcttcaatttgatcacatgtagcatcccgcccatatgcaatattatctcttatgctcaaacttagcaaagcaggctcctgagtgactagtcctatctggcttctaagccattctaatttcaagttttttatattttctccatccaaaagaacttcccctgcaccaacaaacaaaaagaagattgacatgtgcaacaagaaatttatcgctaatggtcttggaaaaaccttaaataatttaagcccaaagtaacaacatacctaatgtaggatcataaaatcgctccataagtgggataatactgctttttccagatccatttctgccaacaagtgccactgctttcttagcaggtacagtgaggtaaaaaccactcaaaatagggatctcgggacgagaaagataactgaaatatacattccgaaactcaatgtttccttgaacaggtggaagagtagttccttcttgattaacagtagaagatgaccgactaatcatctcataaagtctataagcagcaattctcccttgatcaaatgaatagaagtttgtcgctgcttgattcaacccgctacagataatcagaagagagtgcataaaataacatcagagacagtggttgtgcttgcaagaagaaaaataaaagtaggaaaagaattaagaggcttacaggccacttaaaattacagcaaacaaggctgttacaatttcaccaccatgagcttgtcctttcacaacaaggaacctcccaacccacagttgtagagcacacgaacaaattgcaagcccatacgtaaatccaagtccaagtccttggacaagacttataagtataccatatctcagagttgcttgtagtgatgtcgcataagaatacttagccagtgtttcatttgtaaatgcgtacaatgtcctaatatacgagacagcctaaataatggacaaatcattcacatttcagcaacataggatttccctactttgtcaatttatcacagctaaaataataactctctcaataattttgtccactggaataaaatctttatttctaagtaaacatttatctgcaaaagatataatgcacaaaaacaaacctgttcagcaatgctagctgcttcagcatatgcatcttgaatattctcagcaagcctgtggagaaatatgtttgatattcctccggccgcaacaataaatggaccagtggccaatgttatgagtgcaatctgccaacagttgacaaatccaataacaagaccagcaaaaaatgtagccatgttgtgaacataatttccaacctgtaatcaaagagaaacacagactttagacaagaaatttgaatcaacaaatcatatagaaagctgaaatttttcataacaaataaaaattcccaaaagggaacatgagctagctaatataaattagcataaaattaccttttcacttaaagcggactgaatgagcagcacatcactcaaaacttggctcacaatatctccattgttgccataggtatcaaaaaagctcatatcctggttgagtaatacttgcacatatttcgacctgatgacagcagtctgtcgttctccagtcaaaatccagcaagagacctctataacacagaagaaattagtacatgtggataacgcaaaaatcaactatgatacactagcacaaaggcagtaacacaactggtcttttgacaaagtttaaaccttaccaatccaaccggcacaaaaaacagccacagcaatgtgaacaatggttaacgcaagctgcaaacgaaacaaaattgagttgcggatataagattcgtaccttgcaattccagttcactcataaaaaaaaacattgactaataactaaaattccaataggacagaaagaaaaacatataaagaaggagaatctaaagctcatgtaaaattgaaaacacccatttctattagtaaacctatcagaatctaaatgattctacacgtaatcctttattaattgctagacatccacttgctttcgtcataaatttctacaaacatactattgcagactgacattttcacagattaataaaggccagctttcacaagcatgagttatatgctttctccctgcagccaccattaccctagctccacccatgaataatcaacctagaaaagactaaatgacaagataattactaagctttaataattacagggcccggacattactaaacaaaatgcttaatagttcatactgatttcctgccctcccaggctcccacccttaaaaatgctattatgtagaaacaattttcttttctagatatttgtgggtatattcaaactccaccgcgatttcaccaccgaaacgaacactatttcgaaataagtaataatatgtgtattacacagtggcgagacatttttctcaaccagttatgtttaattgtttatttgagatggacccgttatttcaaaaagagtaatgatatgtgcacacacaaattacacaaacttgacactcacttatgagcaaattattttaactaatcatattcattttatcaatcgaaccccctacatagcttaagtgtgtttttaaagaataaactttcaattcttccagagaatatgacaagcagaaccatagatttctctatgctaactactaatgtaagaagttctagtctgaacaagatcaatatacattcttaaaaaggaaaaaaaaaattaatagaaaggatgcttacacaaatgccactgtcgcccaagcaacattgcatttcatttaataaaacaatacacggccttaccaccagcagtaaatgtaatcatcagagggtaccacaatataagtttttaacttcaacaactaaccaaaaaactcatttttgagcacacaatactaatttctgatgatgcttctagctaagttgaaaagggtgaagtttctaatctgccaaacaacaagaacctagaaacgtcaaagtcttaaaatatatttccacttcatacatttcccagaaatcaaaccaaataattatgcaaaactaataactggaacggctaaacaaactccatttagaatacgatacagaaattgaggatactagtagcttagttaataaactttgaagtatttcacgtctaagtccaaaattatttctgcttaatatactttacacgaaaacaatagaaacccaaatgcaaaagcccaaaaggattaaatccataaggtttcagctaaaaaaaagaaaaaagaaaaagaaaaatatgagcttacgtcgatgaacttatcatgctgtagtgcagcgatttgcttctccgtcaagttggggtcatcgtggccgatccaaaggacctgaatgatcttagcgaagtagtgcaagtaaacaactaaagcggcaccatgagcagcagctgctaatgatccaacgaacataagcacccaatctagccggtcggcacaggcaaacaaacgcgagaaaggtacagcagctggcggaggctccatctcttctggctcctccatctcttcctccggctccatcggctgacccgacgtctcggcacttacgtccaagtacggcgacggagattccggcggttccgatacctccgagactggcgtcaacggctgtatatgaggaggggaccatccaaacagccccctcgagatcatcatcttgcttgaccaaataacgaaattctcactcgctcttcttcttcttcttcaagctcggaatcaaaattcgtacgaatcccgcccaaaagccctaattataatcctctctgtctctatatttagcggatctgctactaaattttagaggcacacagaattcggaaccctaaaaaaatttgaaaaaaaaaataaagaaaaaaaaaacgctttttgttcaatgagtgtattttgtgcgctgcttttttatttttcttttcattatttttaatttaattttatattttagagaacaaaaggttcgtttcgttgcaggtgggtggggactgagtcaaagaaggcagagagagagaaagctcaaacagaacaattgactcacctcagctccagccacacataaacaaaaatcacgaccaaattaaaataaataaataaatgtaattctttaggaattcttgttcttccttctactattctattattaattctctttgcttattttattacaataacaccttactatgtcaatataaattatttgagaaatgatatggccgatcaatatatctattcaattcttttttgtttcctttttttatcacatttatttagtaaaattattgttgttagaaaaaaaaaaaat

SEQ ID NO: 15815 - DNA, 2779 bp, Cannabis sativa
ttacataagtgttcaatgttagtaaaactgtgatttttgtccagtttcgtcagtacattttctgttagtatcaataaggcctagattctaaatcattagttctggactaaaacatgtagtatcagttaactctaaatttaagacactaacgaagttcgtagtgaagaaactgaacggaaattacagttttactaacattaggtacttatgccgctaaaaaaattattgggtctactttcatgaatcatgtttgttatgttgatcaacacatgttaaaaatttatccctcttctacaggtctttgtcgataacattgattttcggaaggagctagagtgacccccaaataacagcagccactacatttttttctgtagtgccatcaattaatccaagaaagcttaatgcatagagtaaaattatctaaaatcacaccatgaatgaacattcttgatcccaattcatagatatagatcaatctgtacatgattgtaaaagttgtaaaactggcttgctttcccaatgacatgtacatctaaggattatttactgcaaatttatttgattacagaagatcacaaagaatcatcataccacttaagataatgttacattggcatgacaattcaatatgtgctgtattccctctgtccacattagtttctcttctttatttttacattcaaactcaatggtcctttcaactgtctttatcccgaaatatgcctttgattctttgtcactgtctttctctcttccgggccatgctgggatatcacaacgaacttcagagactacacctgcaaccgaaaaaagcatgtttgagaatagcttacaaaagctttcttttaaggtaattagtatttgcttacattttgtctttttggtaaatgttcctgccatgtatttgcttttcaatttcgccacaacctgttgcaaagagaacttagaaatgataagataagcgaaaatatagcttagtacttcataaatgtgttatgctttttacctgccaatttgagttaatactgaaagaaacttgcttccaatggagatctcctgcagccaggtagagttaagatagttaatttagatatacagaactgcataccgacgtattttatagtgtatacctttcctcgtacgctttagaagttctcctcctctgcaaacaaagttcaatgctgtgaaagctttcgattcgtggccttcgcctttttcgtcagccaatgcaaatgtagtacttccacagcccctttgaagccttgtccttagaatagcagctcctcgtaaggctgtagtatacacaaagaaaactatccctcattattttattccaagaagctattgtttaatcggttttttccatgctaatctattgttatgagtaaaaataaataggattgtcctctcaaaactatgactattgtagtaaataatattttgatgtggcgctaacgtgacgttaatctagcgagtccagtttaaaaaaaaatacatagtagtagtatattgatgatgacttgcgagaatataaatatgtatttttagagctgatgtttgtatgttaatataaataaattggatttgggataacttaaagttgttaaaaagactttcaactctgcaaccatacatgtgagttgtgaccacataagaatttagtttttttaaggagcaaaatgtaattgaaaaggaatatttgcagtgatttttatagttcgggtagaatttttctaatagaataaagttcaggggcaaaactctataagggtcaagtttgggagaaaaactcttgtttattctaataatggagaatgttagagatgccaccccaccaatcaattcatgatgtttcatctcacttctcaattagaaagccccaaaaataaaataaaaaactggtttgtgtgtgctcaaaatcataagcaactagaaaagccattgataattaccagtagctgcagctgctgttaaggtcatgatatcgccattagtctttgcattaacagctgagttcaccacagctaagatatggtcatgatcggcgcccatttcctcagcaatctcgatgcaatgagatgccaccagaccagctgccgatgctagtgcagtggatgtctttgaaggagttgattttcggtgagcagctgatgttccaggcgatgcagctgaagctgcaagtgctgcaacagctgcagcaacccccgccacagaaactgctgcgtgcaactgagcattttgggttctgatttcctgtttctttctttccttctgatcttttaaccatctccccattgttttcttcctcataatgctcttatacagctgcatggtagtaatgattagtactgatatgatatgatattcatggcatgacataatagtgaggctgagatagattattaccccattttttatcaactgttgactggaaaggaactctggatttagtgcttgatgaagtagaaacaactcctgtgaaatataataacatgtaaaagaaacaattacatgattatggtaaagttctgtccttaaaagagatgaagccttgtacaggaacagagttggcactactgaaaaaaggttaatttgacatgtgttaaatcatgcctcctaacttttcagatcgtttgatttatgaatttttgttcaattttactaacgtaggcagaagtttggagggcatgatttgattcatgtcaatgttcggggaataaattgtaattaaccctttttaaaattgatcatatgtttgaagagagagagagagaga

SEQ ID NO: 15816 - DNA, 7988 bp, Cannabis sativa
cgtgtcaaaatattccaatttgatcagtgattgcagttactggtggttgatcagtgatcatcgcagaccagtagatgatccgatgaaccgaactatgctgacaaggattctttcgaatccaggtaatgtcaaaacaaagtttcaagctttacaacttcatgctcaaattatcataactggtaatacctcatcttcttctcacacatcaacactaatttcaatctactcaaacttcaacaatctcttacattacaccattcttctctttcacacacttcactctcctccttccttagtagcatggaaatccatcatcagagcctacacttcccatactctttttcatcaagctctctattcttttattcaaatgcgtggctttgggatatacccagatcataatatcttcccttctgtcctaaaatcatgtgctgtaatcatggatttgagattgggtcaatcggttcatgggtctattattcgttgtggtatgggttcggagttgtatacgtgtaatgctctcatgaatatgtattttaaatttcagggctttgttgctcttaatgtgtttgatgaaattcctcaacgaaagggagtttgttgtactaaagatctaagctttggttcttctgaaagtgaaataaaaataggatcttttgatgatagtgtgagaaaagtgtttgaattgatgccgaaaagggatgttgtttcgtggaatacagtgattgcggggaatgtacagaatggtatgtatgaagaggctttgataatgcttagggaaatggggaatgctaatctaaagcctcattctttcactttgtctagtgttgttcctatatttgctgaatatgtggatgttattaaaggtaaagagattcatggttatgccataaggagtgggtttgattcagatgtattcattggaagcagcttaattgacatgtatgcaaagtgtactagaatggaagattcacttcgtgttttcgatcttttacctcgtcgtgatgccatttcatggaattcgatcattgcaggttgtgtacagaatggagcatttgatgaaggtctgagattctttaggctgatgttaagtgctaaaattcagccaatgccggtaaccttttcgagtatcatgcctgcttgtgctcacttaacaactcttcatttaggtaagcaactccatggatacattattaggggtagattcgatgaaaatgtgtatatagctagctcacttgtagacatgtatggtaaatgtgggaacattaggatggctaggtggattttcgatagaatagagtcacatgacatagtgtcatggactgccatcattatgggatatgctttgaatggctatggaaatgatgccatttccctatttgaacaaatggaaaaagagggaataaaacctggttatgtctcatttatagctatattaactgcttgtagtcatgctggattgatcgatagagcgtgggagtattttaattctatgactgaaaattatgggattgctcctggtttggagcactatgctgcagttgcagaccttcttggtcgagctggaaggttagaggaagcttatgagcttattttgaatatgcatatagaaccaactggaagtgtatggcttacattgctggctggttgcagaattcataaaaaaaccgaattggctgtgaaagttgctgagaaaatatttggtgttgatcctgacaacatggctgcttacgtgcttttgtcaaatgtttacgctatttctgggagatggaaagaagtggcaaagctgagaatctgtatgaggaacaagggaatgagaaagaagccagcttgtagctggattgagattaaaaacaaggttcatgcttttagtgcaggagacaaatcacacccttactatgacagaattaatgaggctttgaaagttcttttggagaagatggaaagagaagggtatgttgctgacacaaatgaggttctccatgatgttgatgaggaacaaaagaaaacattgttgtttagccatagcgaaagactcgctattgcctttggggtcatcaactcgcctgctggtacaactattcgaatcacaaagaacattcgggtttgtgtggactgtcacacagcaatcaaatttatgtcgaaaattttagggagggagatcattgtgagagacaatagccgttttcaccattttaatggcgggcagtgttcatgtggagattactggtgatgaagtaagaaacacataatggaaggcatatgatttgatagagtgtttgttgataaattgcaaagcaaatacagtgactttgagaagtttgatgaggtaatttagtatacttgtaagtaggaaatggcacactttaatttggtaaatattgggttgatgaagttttggatttcaaaacagtaatttaatttagtttagttcataaatgagaaaagtggtagctttgcatgttctttagcttctccttctttcttgtttattgatcttattttcataatcataatgtagaattagtcatttgcttttgctatctatgtttgtgtgattaaacatgtggtaaaaatattagtattgactttccatttagtattaaatacattctcttacttaacatttttatcttatttgatgttaagcttattttattcattccattatttagattggaaacaatcaatttcataattaaaaaagacaacttatttcgttgcataagaaaagaaaagaaagaagaaaggacttatcctccatttttcttcttttttttttcttggaaatggggatattacattacattctccatataaaaactttgttgttttaggcattttcttctgaatttcttttttttattattataaatttcgatcacactcatagcatttattcaattatcagaaaacaaaaattgggttaacaaactcacaagtttctgatctcgaagaccaactcaaagccatggctactgacaaagctgaatcacctcaaacgtgagtctactcgctctacatcacaacatacattgtttatatttataattgtaatttacagttttcatgtatcttattttccaggaagaaggaatatgacaactcattcgattcgattcaaactagttagtatacactttctataaatctccaatcaatcaataaatactagttttaaggttgaatcgtagtaatttcatgctttagtgactcactattgttttttttactgaatattagatattaattttggaaaaacaagcaagttttggcagctaccagaggagttagtggagagaattttattgagtttggatgctgactctcttacaatttgtaagtttgtttgtaagtcttggttcaatatgattgaaagacgttattttgtaaacaaacaccttcttggcattgccaagatgaaaatggtgaacatctttatcggttgggttcatctagaagaatcagccaaaccccagttgtgctgtaccgcttttcaaagattcgcaatgatttctttttgcgagggtggccatgatgatgatgatgatgatgatgactacctttcttgtgtcattgaagaagtgaaatttccacctatatcgccgccggtaatggaggaagatgcagaggacttgccattaggttgcgttgtctttcattgtaatggcatcattcacatttttgatgaggaatctgcaacgtcggctattttgttcaacccagcactcaaagaattcaagtttctatctctacccgagattcatgaggaattcgatgaggtataggatgtggatttgggtatgatcccgaatctaatacttacaagtatgttaagattttcgattggggtgaggatttggtagatccaatagctgtggtgcacactttaggaactatttattggaagtttattactgatatagaagttaatgcatgtatgtttaccagagacaatggcatttactgtaaaggtgcttactattgggtgaataatttggctgatgggatgatttttcttgtttggtttgatatgtgtaatgagacatttcatagcatactatttccaaatgagatcataccatttccaagttttcttgtttggtttggtttgattttttttctccatacaatgcaactctcttttgtttgtaaggtctctcttattttaggagaacttgtgtgaaagatgtacatatctcgattgggtcagggccaagccaagggtgtgcgagataggcatgtgcttaaaagttcaaaaaaaaaaaaaaataagtcaattatttttcacatgataaaacttagtaaataatgatacaaaataaagtgttgaagtagtagcatagttagtggcaactacatttgttgaaagtgttccctagcatagtacccccattttctcccgcacgacactgcttggttggaagttggaagattttttatgaaaaatctttgttttcgtgtttatgttagcttacatgtgttgtgtacttaaattgtattcgagatcctgaatcaatgtttatcaaacttgttttaatttaatcaatttatattttaaataacacttttgatttattaattatcttttttttttaatagataatggaatttcattaatgacaatcaactgaaataatagcatgcaatttaatcgagacatctccttgttagaggcacgatcaagattagaattagaaaaacgagttaaataatcagccgcctaattctccaatcgtttgataaaaaataaaataaaatcagatgaaaaaaattacaacatcacaattaatcttatgaacatctatgtcttttcatccattgctcagaagatataacagtaaaaattgttgcaataagtttattcaacatcgtagcttgagcaattaattattgtataaggtacgtaactgcactactaataactcttttagtcgcagagaacttgttgttctcagccattaacaatgatttgatgatgagtaacaaaaaagaactaacaacaaaacaaaagcatgtcatacaaataagactaaaacactcaaaactatatcacagagacaagattaatcacagtaacaaaaatcgaattgcagtagcaaaatacaatcccgaccaaactgcacctaagcccaagcagggacggacccactagtaatcatgtgggggctatagccctactaacaaaaatattgcattttaaaaaattaaatatattttttttttaatttgataattatagactaaaatagtaaacccccacccctataaaattaaataaatttattaagagtgattataatgtaagtataaatatttttttaatagtaaataagcccccacaaagtaaaatttctggattcgtcattgaacttaagaaaggtcggcaggcatgaccaaaaaaaaaaaagataaccttcaataactataaatttataaacgagaaaatctaaattttttttttccctattattaatccttgagagagattgatttaaaatctatcttgagtagcatggttgacactttttattaaatcatatagcatatatgcttaagatatttagggctttactatagtggtcgtggtcacaatcaatatatgtgaatgtaatataatacaaattaagcacattgtgcaatatttattttggtgttaaataaaactagtaagatttaatcatcaaattgcttaaaagtttagtttttgttagttaaacttgatgtagtttgtcaaattggtcatcaacattggttacaacaactcccacttaaaataactaattgaaagaaagaaaaaaaaaaggcataattaattagtattgtgttggtgtttgcatcttaaacctatttatgtaatcttgtgttacaattacaaaattgaaagtttccatttttattttttatttacttttcaaaatttcttatttgcatgaaacatggattgattttggagcatgtcataatgtcccatgaacaacaaaccttaatgggtcatcatcattaattatgattgaaaaaaagttccttatttttctcattttgtataattattttagttcattaattatataaatttgtaatgattttcaaaatagttaaaagatattattatttctcaccgacttttcttgctattatttgataaaacttggtcatattttttgttgggaaaataaatatttagaaaaatagatgagtttctataaacaaaaatggaaaaaaaaatcccataaggaaggactaattttattatttagttttaaaattgacatactatattttatttaaaaacaaaattgctaattttgtacttaaatgattattgattaaacagctttaattcccagttcttcataaatataatttttttaaaaaagaatgtgaacaatgataaataaaaaatgacaatagagctactagctagtactacccaactttcataattcttttttatatatatatataaataatattaattaaaatagagaatcaaacatatgaaaaagaagtattacttataatattgatgctaactaacttaaaacttaaaaacaaatttaaataaaaaaaatacaaccacaaaaaaaagactttcaacctaattttgcttcttattttctttaatagtactttgacattaataaaaatgttgaaataagatccaattgaaaatgctaatttaggatttatgtggattgtggctatgttattggttttttttagctttagatataaaagtttaaaaggtaaatatatatgtacatactaatcataaatatttaagtgatttatgtattttggtttgtgtaaaaaatgtgttctaatgaattattaaatagctttatattaagaaaaaaattgatcaaatccagtgaattaaactaatccaaaatataaaatttatataaattgattagatgaacacagtacataaatttacaataacaaaccctaatcattcatctagattgtgtactaaattttattagtagaatagatgatgaggaccacatattaactcgaggtattgacataatttttatatgtattgaaatatttgaactcaacatgtatatattaataatttgatttaaattatatgaatggagaaatatcttttgatttttgagtgtagactaactaatagtgacacatcaaatcaatgatacttttcctaaaaggagaaaaaatatcaatgatactctcttaataactttctcttttgtttgctcatagaatagtgagagtggagttatagcttgacttacttattttctcttctcatttttggtgaacaaatcccacttatgctttaggtaaaagcctatcaaattggccttgttacaaactataatacatctaaaaaaatgtcatattggcctatctagtaggtgcttgaaataagcatcaaacctaagcaccaaatatatacaagaatattttgatctaggtatttttattttagtttaaaatcctcaattattaattattattgaataatatgtatgtatgtattgccctaacataaggttaaaaacaaataagggacacacatctattattggtccacataccccaataaatattatttaggtcaaatcatttaccaactatttatctctttgtaagcttatgaaagcaacacctcaaataccatgggacattttcataccccactcactcacaagacttattattattattattattctaaccctttatttaaagtgagattaaaaaaaaggcatgccatttgtctaatccaaaggtactaatcaaaaatcaaagaaagtataatagagagttatcactttcttattttcttttaaaatgatatttaacatttttctttatttattatatccaattaacatttaaggattcttttgtctttgtagggcacatttgtagtgatactatcacttaaaaacttttttgtcatatacttataccccattggattgaaaaactaataataataataa

SEQ ID NO: 15817 - DNA, 8628 bp, Cannabis sativa
  modified_base (566)..(589): a, c, t, g, unknown or other
gaggttttggttgagtatgagaaatgggaaattatgaggggatgggtgggaatgaaagagataattaactttaaggttttggtggttatccgttccatttgggagctgatcttggtctatggttaatgcaaacatctattttaagactttttgttatcacctctagttgttaaatatattttttgcgtatataaatttttgttttaagtaatattacaatacacgatatacacaagggaaattacttactatatttgtagaatggttttattgtaagaaataattgtaactaaatctgttgacgaatttcctctaagaaagttaacaagaaactacacaccaaaactatttcttattctcagtggaagtttcgttttgctaattatttcctcaaaaaacaatatatatctagagaaagtatggcgattatatacaatgtatttttatactgttagttaggaagaacaaaatatatataagaaaaccagaaatcccatttttatgtgatacaaaaacgttttttttctttcttttctttgtttgtttctttattattattattattnnnnnnnnnnnnnnnnnnnnnnnnattattattattattattttacatgtataacaattaataatgctgaataagatggatgctgcgagtgctgcactccaaatagctcctttgaaataactacactgggttgttttagtacgctatatttttttgtttagtacgcggcattatattgtattagattttatttctattgtactatttgtaagtatagaaatccaaaattaccttttttttcttaataaatcaaaaattacttggaagaaaatttccttaatttgttccccttcttacaaaactttgaagcttaaaacttgttcaagttggtcacttgtgacatctgccattttcactaatttaagtcgaagcccatgaaacttccttatgctaaaaactgtttgtagattgattacttatctctgcatatctttggttttcatctttcctttgagtgaatcctcagctcggctcagatctgcttcacttattctacctacatatgttccactcttccctttatgacttttctaaaatgccacgtcatcctcaccattagttgtgggatattatttaaatatttatattattatataaaattataataaactattaccagcagaaaaattctctaacacattaccttgtcaacgacttttcatttctgctaggctaagatcaagtaacatcaatcatttcaacatcaatattttcacatttttctcattattatttttgtctgattctgctcactcttatttttctgtgtaaatatcttcctaatctctatgctgacatgacatttagtttcttttttctaatttcttttgttacagtgacattagattttaaccatcgttcatctccctagttaatctttattagatctaatattaggcacgaataattatgttcacatgatattacaaaagctttacaccaaagtctaattgaacaacagtgcttaatagctagttttcttacttatatatgtaatattgtaatattctctcctgactgatatcaaatctcttcattcaacacatttggtaccaattatactctgtatttcgtcttttttctttttacactatctccatggcttcaataatctcgaattcaaatagtatgttctatcttcgaattatactaggagtactttcagctattcttggcttgttgtttttgtcccagagctccttcttcaatatgcaatttgatgatactaaaagctcagagctccttgttttcgccacaatctctgctctcctcgtttttcttgtttttgtggctccaatctggagtgatatcatgcagaaggtatggaagttgaacttttctgtaatatcaattattgaaattgtttttctaggggttgtttggatactggccttcttgatcaagtatcctcattttgatgttcattctaaatatagaaaatcttgtgttgaagaacaaggaagaaaaatatcacatggaagtcaatatagtctgtattccattggagcatttgctcttttagccttacttttatcttcagaaagccacagaactatagaacttggcttgtttagtgttctgataggcctgattatggacacttctatggaaattccagcatatgatgatgggcctaatctctggtatatgtatggggcagttctctactgtattgggttgatttttctaagacgttatatggaatccttgatgggaaataaatcagactatagtgatgaatatataatatcaccaaccattttgaagggccaaaaaatggagagattcaaaaacgtattgtttattagtttggaatttgtatcagccattgttggcattgtatgtctatttttgtcccccttcttcgaactacaatttacagaagctggaaatttgaagagcatttgctttatcatcttggctcttttgcttggctcttctttgttcagggcacctatattcattaacaaattggtaatgaaatgtcatggtcagtatttggtacgaaccatggttaaagctttcttcttcatgatggtttcagttatgattttcatgacaaagtatccaaggtttaaagtacattcaaagtacatggattcttgtaagtggaaaaatgaagggagagtttcccaagggaataaatttgatgtattcacaactggatcattttctctatttgctttgaccatatcatctgggagagaacagcctgtgaagcttggtatattcagctttcttcttgaattcaccatggacacttctattgaaatcttgggaaatgatggacccagctttttgtacatatttggtgctcttgtgtattgtgttttcttaattctcattaagagttatttggattctttgacaatgtctgaagacagctctattgagcaacaagaaagtaaacaagatcgagtagagaattctgtggcctcaaaagctcgacacatttctgttgaagtaacaaaaaacgagtagacttttctttgttttaaatgcaggagcagacaactgaaagcgaaaggggaaaggaagaaaaaacattgttgaaatctacaaatcatagaagtcaatattggtggccagcgtgggcaccctaaaattttaacattgtttattttatataacttatgtaaattttatttatgactaaacagttttgtaaatagaatacaaattacaaaagagggatataaatgcgaattgctttaaaagaaaatggaacttttttaattaacagttcttcaagatgtccttttaaagctatagactaccagcctattgctaatgtcctcctgattttactgagtcagaaccagggagcctttgtcaagggttgttctattgcttacaatatttttattcttcaggacatcttgaagaactacagaaggaagaactgctccctaagatgcactataaaaattgatatcagtaaagcttacgacacggttaattgggattttcttgagaagcttcttgtggcctatttgcttccctgctaagtttgtcaagtggatcatgaactgtgtgggaaacacttcttattctctgctcttgaatggtagatttcaggggacttttaagggagagcaggggctaagacaaggggatcccatttccccccttctctttgttcttgtcatggagtatttatcccaaagaatccaaaaagcagtcggagaaaagagattcaggtaccatcccttatgcaagaaattgaaactcactaatctatgtttcacagatgatttagtgatcttttgtaaagggaatgaggactctcttattgctatcaaggaagtgctcgatgagtttagcaagacttcgggtcttcctatcaattttgtaaaatatcaagttcactttggtggagtttctcagttgattcctcttactcaaaagattaatctttctcttggagagttccctcttaagtatttcaggatccctctaagactaacaaaatggagacttgatgattgtggtgctatcttgaagaaaatgaagcttaagctccactcttgggctaataagcacttatcctatgctagtcgaatccaattaatccaatctactttgattggattatggaattattggataagagtgtttcttttacctcaaagtgtgataaaagagattgagaaattatgctggggattcctttagggtttaaagataatcgaactagagttgatttggcaagttaagagagggtgtgccttccaaaagcttatagtggtcttgggtttaaggatggaacaaagcttctttagctagatttatatgggacttgatgaataaaaaaagacttgctttgggttaagtggattaacttggttatctcaaatggagagatttctggtcttataagttgagtatggatatgagccggtattggaggaagctttgtaggttgcgtacaactaacaacaaggttgatatcatagcagcaggtggagaggaattcaaagttgtcaatctgtatcgcatcatgttgcactaggttgcagaatcggctgctggtgcaatttggtgcggcttgaacatgcaaaaacatgcttttcagctttggcaagcagctcaatccaagttactcacgagggatatgctgtgtcgtttgaacataccaattgcgaacaaaaactgtgtggtgtgtgacaatgaaaccgagagccaccaccatatttttttttcagctgcaacttgtctcaacaggtgctgatttttctcttccaattgctagggtttgaaggttggtccaagaactatgatagctggattgtttggctgggcaccacaaggccgaaaatcattgacagaattagagttttaatgttgactgtcacgatttatcacatatggagaaattaaaacaattgcttgttttcctattattccaatactgttaattgtatagtgaacaaaattaaatgtgatgtgaaatataggcccatcttgattaaagataggaaagattcaagagaggagaagaatttacttcaaagattgatttataattattaggagcttgtttttgttgcttctctttagagaagtatagcttgtttgtattccgtgggttgattaatgaagttttcttcttctcttcttgataaaaaaaaaaaaaatgaaaattgccatatttgactccattaaagatggtacacccctaacaaatgagacaactatgatttgatgacttggggctatttcattgggttgtataggattattttgagttattgggtaatgtggggattgtttcaattgaaaggaggcttcaaaagcaagcaaagaggaaatttggactttgtagacatcgaaaaagatgattccatgatggtactccgatcagggtattttgaaggatatttttcttaaaaaggaaccacattgaggtgcttggattagcgcaaaaggtgttcttaaccattgaggaaagaagagtagatatctatgcacagggtgtatgttgaaacataaaactttattatgggtttgttgtttatgtgtttatgagatgctgttatgaattattgtctatgttagtattattagcatgagatcgagataaggtttttgactgcttttataagtgtagcacttccaggataggttttattgttgcttgtgtgagcatagcacttgaggatatccatttggctgcttgtatgggtttacttgtaggttatcttatcatgggtgagtaaaacttgtgataaggattgctccattggatgccaagtgtgagaatagcacaaggcagggcagattatacttcatgtctaatcaacatgagtgggagtagattattgtatgtgaggacaatgtacaataagatactgttgttagttttatggtactaaattaggtacgaagctgaagatttataaatttgattaccattgtaccatagccccaatggatctccatatgtataaacattaaatcaaaatataaattacatgaaaggaatatatacctcttaatgactatcagggtatcctcgaaaattctcataaattgaatccttttgggttgattagtaactcacactgtattctttcaaattgatccaccacacacaaggaatagtgtcagctattaggtaaactgattaacttgctcttgataaattctcaacacgtgagcaagaactaattgagagagaaaaaaagtttttccatttcgcctttgaattttgaaaatacaatgtcaaaagtttcttctaatttcttaaatcaggcttctatttatagtagttgatttcccattatataaattatatttaattaattaaataaatatttataaccgaattcatttactgatatgtcagatgagggaatatctcaaccaatttaaaatatctttaaccacatttcaaattcaaatatttatcttattgaattaattaatccaaaaagaaaaacaattagggacaccctactatggggtagacgtctaccttttctcaattaaaacaaggatggtgtcttttgtcctcacaacttttgttttaacaattcttgtcttgacaaattttatctcaacaacttttgtctttttcctatttaattaatttgaaacaattatttatttattagtatttaattaattactatttttttcaattcaaaatagattttttcaaaaaatattatacaactctttatccctatccttgatagtatttgaagttggcgattcggggaccatggacctataattctaagctctaataaactagattatttattgagtctcatcaaccaaataatcatgtttattaattctatgattattccactgtaaatatagaatttaactcatagttattgtagaattatatttactgagttttactaaagtgtctattaatacaatcaattccagtgattggccctccttgtgtcggttcataactagttttgatcatcaaaaaaattactattttacccttctaattacttctatatcctttagtaccattaattcactggtaaaagtatagttcagatcaaatctaaatttgtgcacaacttttcagtttcagaattaacacttaaagggaaccaacatttgatccattaggaaagttaggattccataattgtagatcatgtttctagccatccacattattagattacctacatagaagttgtaagaatcattttctctgagaaactttaataagtgaatcaaagaaactaataacatgaatatgagttcatgattactcaagatttaggatgatctactattaatcatcgttatgatatgaattaggtctttatagtaaacaacatgtttgataaagaaaactttattcataatgatcctttatatatatatattctattttatatacaatccttcacttagatgtcatactacatcaataatctgaactgagattacttgtaccaaagaatgagcatcgatgaaccatactagaaagcattgattaaagattccatctttaatatatttctaactgttttattcatagctaagtgatcttagttctgtgtacagctattagtcacaacatcatatatgaatatgattttttttatatatatttatataaattattcaaatataaatattaataacctaacattcatgcatatatctaaatgttcaagtcttctttaataatcaaaaatgtctttatagacttttcagggcataaaccctaacaatctctcacttggcctaaaagcaaattgggcatctcccttgatcccttcttttgctctagtgaacaaaaatttttggtgcaccgtcactttatattagatggggccaacaacaataattgatgttgatcagattttaatgaacatatgtaattgaatcattgatatccaattaaagcgcggtttcgaccctctttcccgtacaatttatagcaagggtataaatttatagaaacaattataatgtactctcttaaaagggatgcattgatgtatttctatcagctttgctatttgaaataattttttagttaaattttttctcatggtcatgtatgttataattatttaagacaatctaaaaaaattttaaattttgtgaaaaatttaacaaatagggttcaaacaggatgttgcaccaatgactattttaatttatacatttgtgaaagagactgtctgaatactgctctctatattattgtaaatttggcatcaacaacaccaagattctatagttaaacctataataaaagtgttaatatgagcagtagcaaatcacaaacatttgaacaacacaatgaaaaagaacataaattaataagagagaaaacaccaatttttatcctaattctggtcccagagataaagaatgatccctggccatactctagctgagaaacaccatcttgctttcattaataaagaataagagagtttacaaacaccaatgatagaggactaagctcttttgcactcgagaactcctagacaacagtcacagttctcacccctttaccctgattacaccctcagttcttgacccaccccccccccccccaaaca

SEQ ID NO: 15818 - DNA, 9291 bp, Cannabis sativa
  modified_base (5391)..(5405): a, c, t, g, unknown or other
  modified_base (9245)..(9265): a, c, t, g, unknown or other
atatttttaagtaactatttattaaattaataaatagctattttttattataatactaaaagaaattaaattagccgcgcgaagagcggctatattgcatagtttatgtgatagaataaaaaagatataaaataaagctaatttaattttttctacagaattgattggacaaattattagatcttctccttttgttttctttgctaaattttttttaggttatacatatgaaagtaaaaataaatgattatctctttgtctatattagttggacatgcttttttcaataaataaaataataatcacatatatttgttgtgactattcattttgctaaataattgtaaacatgtgctataattttgttttaaagaagttttttttttaatatatattcagggtcaaagctatttccaatgacactttaaaaatttatatttagtgtaatttttcccataaaatgtttcaatattctttttttttttaaaattaaatatttcatttatgaagtaaatatttttattatattaataaaataacattataaaaaagaatataaattttaatgtaatttttagtattgtgattattgaaaaaaaaaatagtactaaaatagtattcttttggttttgatttaatactaaatttaagttttagtattggagttgccctaagtaaaaaattagtgggttaattttattgtaatgacataattgtaataaggtaataatattatgtctagttattaagtacaaataaagtaatctcaaagaattacatttgtcactaaattataaagacagtgcaaaagagagtacaaaagagagtctccttagcactcctcaactgtgaaacatgcttttcctttacattcaccatgatcaggtttcttacagctaggacattttaggaaagtataagggccttcaaagtcacccaactgatttccttaaacatattttcctctagacgtattgtatggtgactttgtccgattatcagcaacaaaccgtcccgctggaaacattaaggtaggaacaacgggcaccagaggaagaggtgcagcaaaagaatcttactgccacaacctctaaatttcctcactttgcctttgaattttatcttttttgcaaaccttcactcccaacattgcgaattttatggtaaattaacataactttctctaagagccctccaatggcttctaatttgattatgagtgtaagggggaattctaatctctccaaccaccattagccttgaccatggtgtcttgacttcttatattgtgctaggtgtccattctataagacaaacctgccaattcataagttagtctggtcaagcagcggtctaagttataatcgtactaccgcatacatggaattttaggcaatgaactattcaactatcatattactaacatacttcctatcatgcttttctaatcacataaattactaaacaagtaaagacttactatactgtaagttaagcttgtttctgatgatgattgtacatatcttggcggtctttactaaacaatttagcagctctgacaccaaattataacgccttacataggcatgctacattgattttgtaattactgtgcacattttgcttatcaaagggtttctaaaaaaacgtgacaaattaaaattttaaaatttaaacttaaactttaataaatacataactgtacataatgtttgggatcccatttaaaagtctaaaacaacgtacaaaatatgtttttacaaaagtgtcgcaccgcgactacaaaatgcaagcccatgttgtcccgaaaccaaacactccaagcttatccatcttgatatgtacaatcactctcaagctctggaatcactgtagctcaaccccgcctctttttacctacacatgaaactatatctgtgagttgacaaactcagtaaaaaaacataaaacatataaatactttccgacttacatctaggaagccatacacctatctacaaggcttaacaaattaattaagaacattcttgcctttggtacaattgatcataatatcagccactgccaacactatagtcgcgttgcaaaccctccacgatagttgtaccattatgatagtatcagtctatatcaaaaagtaccattgatcataatatcactcttaaccagtactatacttgtattgtcaacccagtaccatagtttgtattgctatgacatcatcaattaatgctttatggaattaagtattagtcaaaactagtactatactcacattactgacccaacactatagtttgcgatgctattatgataccaattcattcattctaggatcataaacatgtatatcacatgcacaaacatatatgtatatacattttatactaatcttaccatgttttcgaattcaagtgtgccggtcaacctgaatggaaattttgtttgctcaatagaggcccaatgtcatatttacataaaatgggtaaataacttgataaaaccttctcggggacttcaactcaaaactaaaaatttccatatcgataaatagcatagaaatactctaaatgtcgaggaaatacaaaaagaataagacttcacaaaaactgcttgaaaatggtagtccatttctataaaaatggcagactatttttctaggccactgccaacaaaatggtggtctgccattttttgctgtagttttccacaaaacctcatttcaagcccaacagaaccccaagcttcaaaccaagctcctgagcacctaaatacacctccataaacatatcctaagtgataaaaatagttatagctcacaaaaacaaaaatcaccattgttgagccaagtttgagttcttaaactcaaacttgctcaactcctcatacaaccaacatattaactcaaagaagcttcataaaactcaacaataacctagaaactaatccacaactaaccctagctcggacagaaccatttctaacaatttttatgcttaaaccaacaaaattcttcaaaaaaaccaaaggaaaagggttctaagtaattggatcatagcttccaatattcctttaattctggctgaaaaactactaaaatttatgagaaaaatctctagttgttgatggttctcgtacggctaaaattggaggaaaaagcttgaagaggtggactttgtcttatgtttctaagtaacctattctaattcttctttattttatttaacatatttagaatataacaagacgtctaccaaatccactaaatgccaacactaatcctttaggaaaaataaccattttcccctttacttcaagcttaacttatcttaaggcttagggatgaaatgatcaaataccataatcctgcctaatctcgatattaaaatatcaaatatacttaccccactaattaaaaggttataaatcttacctatgtgactctattggccaaaccgtcacatttgcattgttaccgagcaaaaattataaaaatattattttacacatatgtcatatatattacacctagagtttaataaaatatctagaattgagaaattataattctaatgcccattcttaaaaatagggctcacataatccattattcatatatatcataaaatatatttaattaatgctaattatcttactaatctcatatcttaagtatgtggtgattacaagtcttcagaatacttggttaaagtgagtgggaagaaattgcatctttcgctgtcactgacctaagccaccatcatgaatttgttttagttggttaggttatccctggggtctgtgcgaccttcatacaattccatgttgggcatgcaaaaattgtctggctgaggcacttcttaaattctttggcttcgggttttcatcgtccaaataggacatggtgccaatttccttgcagaccaatcagtctgtgattttggttaaggtgacgatttgatcctccaactttccaatgttgtcgtctaggacttcacatccacaagctcaatcattgatactatttttgaggtcccctccgcgacgcttggccttcacacactttgaattttcccttttaacattcaagtgctccttaggtctaccattgacatgctatctttaagatccaagtcttctacatcgacactctagttaataaaattattaacgtggtttttccttccttaaactttaggctctggtacctaagtacagggcctttcattttgttcaactctgctctgcagatcgactagacaatcttaccctcgggctctagcggtcttctctttttgctggagtgggttggtcacatttgtgtttttttgtggagcattatgcgtggcctcagtggatggttctttttttggggttcaaccattttggctttacctttgttgttcacaagattagagggtccaacctcaggatgattatttccccctcgtaggtttttaccatggaggcttcccttagctaccaggttttgtagttgtatgagagtttcttgaatgtggtgtgtagctttttcctctttttcaatttcctttcctgatctaagactgcttgtcttagcctcaccacctcgaggtcttcctcatagcactcctcttcatagtcttgtcgtaaccctcttttttattctcatcaaggccttccctgttgtcctcttatagttgagggcctttccaaggcaaatgactttccacctctaatgcttcaccttccctcatgatgtcttcttgagcgtccgctggtgggggtcagttcatatcatcaacaactttatgttctcagtcttgacgagcatggggtctgaccaaggtgttttgagttacaacctttgccctagatgataatgatggagaatactttcttcaactctcaatgaaagcaccaaaatatataccaatatttttggaaactgaattaataaaagactaagctaaaaagagatgatttaggagtaaataagacaaatatgtttacatggttagggcgtcaacgagccttagtcacgagtcaatatcatataagctctttggctatggagtattttacacaattgttcttgccaattttctacaaagtttctagccaaagttcgtaaccctttgcatgaagggataaagtatatttataggctaaaattgggtttctgggtaaaacccaaacccgatagggtttgataccttgaaataatttcactaatggggtaaaatacaacataatatttgttgacctcaaaaagtgatcaatcgacagcgggctcgtatggatctgatgcttgctacatcttacacaaatagaatagaaaagtaataaacacacagatttgttataaaggtttgcccccttagttagcaggtaatgacctactcccctttnnnnnnnnnnnnnnnctagagataatactattcagattgttataggtgggagctgatatagctctctataaggatacaaaacatgaatcagtaggcagatctctaatgtgagagtgaaattgccttagaggcgtgtgagagatgaagagaggagagagcccttggggcgtgtagtagagagagagaaagagaaagagaggctagggtttctaacttagagtgacttggaggcttaacgacttaggtttctaggctatggttaaggcctttatataggaggcctaaaccctagattacaatttaaatccctagatatttgcataggttaatagataattataaaagactaaagtgcccttgaatctaaatattattcagtcattttgttggccttttaaggcccaattcgcagcccatgactttttgtccacattttaggatgtacatagagtcctgccatgttaatcctgtccgcccttagacctacaaggaggtctttaccacccaaggcctacaggatctggaaggtcaaggtcttgagggagacacgtagatgcaaatggtgtgactagtgttcttcttgtattaaccatgacatttgatcagatacgataaccatgctctcaatgaaagcaccaaactgtcgaccttaaaccatgatcaatcgatagtagggtcgtatggatttgatgcttcccacatgttacaaaaatagaatagaaaagtataaacacacatatttgttatagaggtttggcccccttagttagcatgtaatcctcttttggttgtattgataactagggataatactattcagatcgttacaggtgggatctgatatagttctctataaggatacaaaacatgaatcagtaggtagatctcaaatgtaagtgtgaaattgccttagaggcgtgtgagagatgaagagaagagagagcccctaggggcgtgtagcagagagagagaaagaaaaagagaggctagggtttctgacttagagagatttggaggcttagtgacttaggtttcaaggctatggttaaggcctttatataggaggcctaaaccctagattacagtttaaatccctacatatttgcataggtagttagataattacaaaagactaaagtgcccttgaatctagatattattcaaccattttgttgggcttttagggccaaattcgcagcctaatgacttgctgtccatattttgggctatacatagagtcctacgaggttagtcctggctgcccatagacctgcaggtgaggtctggccgcctaaggcctataggatctggcaggtcaaggtctacgagatctggcaggtcaaggcctgcaggacctggcaggtcactatagctctaccaagaggaggccaacctttgggtgtgaaagacagctttgtacatcatttccttgtagaaaccacccttggtcgaacagaagcttccttggtttggaagtcacttattagcaagccagcttgtgcacagatcccgattgccctatatataggctcaccctaactagcctgtaggcttctcttggtcgatcaggggtgttagtaaaactccttgagggctcacttcactccattcagttgctgcttgacaatttttctttatcttgcatggaggtcttgttctgaaattggcagggctgtacccttcctgtactctatctttgccttacgtggacatgccacatcaggtagataaaatttgagataacaatattgactttgggtttggtaggttgggtctaatggagggataaatgtcgtgcgtacaacaattattatctaatgtgggtaggtggccatacggtgttgatcatgtacattgcgagtcggaggagtgggcattggacaaaaaggttggttactttttgtgctacgcgcttttcccaattgtgatttgagtgacagaccccttattctgtgggcttcagcattagagacatgccacgttggacgaatcccaaaaggttagtttttgcgacaccctagaatattggcttccgtgacaaactttagactatccttccaggatacccgtggagtatccatttgtggctttttgtaaacttgataattcatctatgttagttctccagatttgtcagttcgacgtagccctcaatcaagacttaacaaaatccataccatatgcctttcgacttcgttattgggcaaaactgctatgtgtttgggccttgaaaatgggcccgcaaattgatttggggacaccaaacgaacacgtgttgcttaccgataacaatactttgcttttgctacacgatgaggatttattacaataattatggttacttttatgtttttttagcttgaaaattgaaaaatttagtatctctgatagaaaatacttgatgaagaatatgaagcgatattagaaaagttattaggtataactcatcataaaaaaattggcttgtattaacggaggatattcctcacctaattaagtggatagagtatatatttccagtcaatgtgagattttaatataacctttaacgaacaatatggactatgccaaacaattgtaaacaaattgatattggggcaccctttataaaattgaacccgctctgataatatattaggaaacttaggatgtatatctcacccttacaaaattggattgttactcgaggattaccctcaccttattaaatggatcaagaatacatttgtaaccaatgtgagactctaatatgcttacactgtaggtatcattttttctcctattagaatatgttattacctaaagaacttttaggcattaacttataaattttgtaacctccaattagtatgagtagagtttaggcaaaaattttaagcaattaaaaaattaatacaaaaatactttattttatttacttatattttttttttgtaagaataaaatatcttatttgacattattctttttctctactattagagcatttgaaatgtttgacgtcaatgctttaacttttttacttgccatgtcacttaatttggttttgtctcataccgtcttaattgagcacttacaaaatgataatataattgagtattgttattaaatattagtagtgtctggtgctttatgattggttggtgatatttcttaaaagttattattctaagttatatgagatgtgatacttaattacacaatatgagtatgatactgacgagggtggaaaatactaatagtgtgttttagcatttgtcaatgtaatatagggtgcctaattgattactcttaattaatatcttttaaattgtaatattttcattaatttaatcaagtattaaatattaaaaaatattactaataaatcgtaaaataacacatttagaaaaattaaaaacattagtgatgcttaatgctctataatacaaagtcaatttcaagcacatttatgatgacagacatgcggaaataaaaaaaaaaaagcacatttatgatgggctaattaatgtatagctctcaaaacactttgaatgtaaaatgaaacaattgttatggctctcaagcaagtaatacaacgtgattattgatattcacaacgtttcaacactttgttcaaatctctttgaaattaacatttatgaatgcgtgtgtttcgtacagtggaaatttggccaatgtcttggtgcctcgaggattgatttcccaattcccactaacattttcaaaacatttaccagcaataacctcatttttagggaaaaaaattgaatgtagatagataaattggactttcctcaggttgagttggatccgtctttatcgaatggctaattaggggtgttcatccgatcnnnnnnnnnnnnnnnnnnnnnaacaacatccaatccgcactaagtgc

SEQ ID NO: 15819 - DNA, 4446 bp, Cannabis sativa
gacgaagagagtgagagggggggaccttttttttttttttttttttttttttttttttttcagtttttgagtgtggtacgaagcttgattgtgtatatggaaaacgtctagggaattatttggatttaaatctataattttgtcaatagttgaatgagatattttgagtttcttatacactgccgcaatttatgcaattaaacattcagctaggaatttttctggggtaggttgccgaattaaataaatagaaaaatattgaataagccaacttgcttactcacatgtgttttttttttagatgaagcttacatgtgttttctcctcattggaatcaaccctatttaaatgttgttgtgctgtgttaatgtactatattcatcataattcttaatttattagtttaggaatgcacaagaccatctcttataaattgagtataatattgttgactattttttgtagtagtattaggtgtaaaccagtacctacagattgtggtctaataaattgagcagtgtggcctaacaagtatggtaaatttaacacattttgcattactattaaaagtattattttgttaaaagtagcttaagaaaataataatataccatttttatatataggattctattaatggtgatactctatcgtagacgtagttggagtggcttatttatagatttatatacaaattcatctattactttatctttttccaacccatcatttcattttatatctacatttgtctttttaagtgactacacacgaattgaagtgggattaaattatctatacatactagtactacataaaatcactgcttgaatagtcgctctctttcaagttccctacatacactactccttgtcggtggtcaacatgaattaccaattcttgacttgcacttttctcttttcatttttctaagaatcctcttgtataaaatgacctgtttatttctatatatacatacaaaatcatgcactagttgcgtttgcatttgatattttttaattcctactacaccacacgtgtttgaagtggagtcttatactagaccacattggtttatttattccataacatcaataatgagtggacctcgcagtttcctaccactatattattattattaaaaaaaataccattatcttggttttacacctatttaaggtttttttcttttattttctgagcactgtttttatttagtctttcttttactaataataataataattaaattaacgagagtttccatttaattatctatttaaatttggcaatttacacctcgcgcgcttctgtatttatttatgactaatattcatttggataatttttttctttgcaatgttcatttggataaatgttaattatttgtttctttaatcttttttctttctttctgctgtcggtggtttataagtggaagccatgaaaatcattgtaattggctagacaggaacaaaaatattcactaacacaaaataacatagaaatcaaagtgaaataaaaaacacgttagttaattatttacactaaaatggaaaatgaaataaaagaattgaagttgagtgtcggcaatcaccggaatgcatttattatacaaaacaacctaaagaaatattcgaaattctctttttgtactgtaactcatgaatttatttaaaactgggaaaaaaaattaataatatattaaaacctaattaattaagctaatttgaactgtacgtggttggcaagcgccgccaaagccacgtcgacggcgtcttcaaacccggttccagtggcgttcgggtgtgtatacgtcaacctcgggatcaaccctataactttctctctcatccgctccactctctctccaggaatcttggcaagctcttcctcgattctccggctgtcctcgctcttctcatcgaagaagaccgagtactcacttgtatcctccggcaaaaaccaccggtactggctatatgccgtgtgctgcgagaagaacacgggaatacaaccggcgaggaccgagtcaaacgttgaccgccgcgtgaacgagtccccgggcgcctggagacagaaaacggaccggctcatgacgccaatcacatgggccgggtcgtgacacttagacccgcatttcaagagctcgcaccgggtcgacccagcgcattgagtgatcaactcgtctcttatggccgccttctccagacccttcctgggcccaccgatgaacgagaacaggtggggccgcttcgaattcctaaccttttcctgccacgtaagcacctcttgccacgtggacgggtggaagtatgaagggtaaggaataccgtgctggttggacccttgccagggctgcctctccactgtcagcaccgtcatgtttttaacggcggggaggttgaggagacagttggcgccgaagtcgtttccctttgtattcctcatgaaatcccatgcggtgcggcctagagcaaggaagtggtccttaccgtggttccgtttccaccacggcttctcttggagaaagtcaaccaattggacggacagcgcgtcccgttccgtcagattggtttcacggaatttgctcgacgcgtcgagaccgccgtagaaaggaacgtagaagattgttgcccgctccggatcccacgtccggcacgcgtgattctccacgcgcgcgtggaagatcatctcggcgatgaactggtgggtggcgtaccagctgggcctagttgaggtggacggcgccgaagacgagcccagtggtgtgatgggccggcccagaccgcgattcgcgacgtgggggcacatgtcggtgtagacattgagttttcggcagcgttggagaagggcgatgttgaattctggtggcaaatcgtacacgtagatggacagattgccgttttggcaagtctggacccatggtagttcagcttgttttcgtaagaatctgttgtcgtttttggttagtatttcaactgggtgtaagattttgttgtcgtttttggtgagtgggaatcgaaaggagaggagaagaaaccatgccaagagaaagaggataacgaaaacaatgtatttgaggcggggattgttgttgagagtattagtaatgaagaaagttactgatggtgattgatctttgctgattttgctgttgtcgtaacagttcttcttcttctccgccgtccatgaagctggagggctttgctttctgaaaaacattaaaacgaagggtcgtatgacgtgtaggaggagcaatcaaaacaagaaaagtggtctttaatggcggtattagtgatagacagacaagggtgtgaacttttgtgatattgaagaagagctattaaagcagtcagcagtttttggtgagaaattcaggaaaatttaataaaaacaattcaaataaataaaactcccaaattatgtagggacggatgatgaagacgaaactactactatcgtacgcagatgacaaggttttggagtctttctaagtattctactcgaacaatacttttacaaacaattagataaagggatttaccatgttgccctttatattgctgtctgtattattattattaggtataataatttcgtatgggtacactggcattatacagcttaattaaaattcaaaattttatgcaaatattcttaaataatatatggtcttcaatcatgaaagcgctccaaatcaaagaaaatgttataagaaatacgtctgaggaatgacgactttaccgggcgaggtgtagactggcaaataggcactaagggtaattgtgtaaaatgcgaaaaaacaaaatgagaaaagtgtgtgaccacagcagagcataaggcagaaagtgcgtaataatggcaaattggtaattacagtgggaaattgaagttgagcgagacaaaagaggaggacttaagcacatgcagcttctacgtgttccaatccccaaagacatcggttactaaataagcattaacagttcaacgacaaacagtaacttaaaaactaggaacaataattaattagactaatacagatatgctgggccgactgggcggctgtgtatgaatattgtctatttatatttccaacaattttattttattaaaattatataaaaaaactgtgtatagaaataattatgaggtttaattgtatcgtagtaaatatagatgtttgaaaattggttcttaaacatttttttactaattaatccgcaaaacataacttttgacaaagtgtttagcaatactaaacgccaatttagtacagttgtcctgtgtgttgtgaagaaaaaaagctgtaggagaattgtggagaaaatttgaggtaagtgtttggtaaattataatttttaaagtgctgcgagttgttaaagttttattataataatgataatattttaatctagttcgttataatcacaaatatatatataa

SEQ ID NO: 15820 - DNA, 4561 bp, Cannabis sativa
aatttaaaaaatttacatttaattttttaaaaggcaatatttttgttcgtgggggctatagcccccacatcactcttaatgggtccgtccctgactacgtatattgtaattatttaagatcatttttaaatgtttaaaaaattctaaatagcttacaatactaaaaataaagtttaaataactacttaatatgtgtatattaaaaagattgagagtacagcaaaatatataaattttattttcggtattgtaaattactcggaattctcttaaaatttataaatggtcttaaataactataacatacacggtcataaaaaaaaaaaattagactaaaaacttcttttaggtactgaaatacttctttagataatgtactgtagacttatccaatattattttagagagttctatagtttttttcttttttgtattggcacgatataattttatttaattgcttaaattaattataattataattatttgtgatgtttaatgtatttatagcatatttttttgtaaatatttatataatttatagtgtcaaatttaaaagtatgatataatgtataaatatttattttttatatataggttgtaaagaaaaaattgaatctagtttggtatcctaaattatattgaattttttataaaaaaaaaaattattaatgagacttaatacaaagaagagaagcagttatttgtatgttcataaatttgttagagaagtaatgttaattttctattacaatcttttaattaattttcatatttgaatttgctttaaaaaaaaaaaaatcatgacaatttatgcttacaatattatttcttcaaaattttaaaaaaaattaaataatttataatattaaaagtacatttgaaattttttaacacgcataataaaaatatcaagaagtttatttttaaacgataaattatttaaaatttttaaaaattgtaattacaataaatattgttataaaaaaaaaaatatttcgacttatattttcgtgactcgagattgtaattactaattagctcaacttaactttttattaaaacaacttaaaaaaaaatatataaaaatgccacaaaatattttccctaaatattaattttgttgttgtatatttatatatcttatcttagttggagaggtgagtttgggttttggcaccaaaaaccctaaaaccctttcctttgaattgaatggataatccaggacagagccaacagcagcagatgaagaagaagaagccattgccgtcggcaaagcagctgatatcccactacgaatcgcagggtctggacacccaagaagcatcggtgaaggtgatagaggatctccaggccaccctcttcagagtcatcacctccggccgagccaagaaggacaagctcttagccgaagccaaccggaagctcgactcggcaaactcacgcctcgcccttatcgactccaagctcgattctaagcccggatatggagcaagcttggcaattggaatggcttctggtcttgccttgaatggactcggaactgttcttccccatctttcccagatttggagctctgttaggtctgttagtaaagattctccccaatgaattttattattgaattatgctctgtttctttctgggttttgtggattttttaaggtagtcaaacaaaaatgagttattattattattattattgcattattaaacctatatcagactcagagaaaatgaaacaaaatatactctaatattatcataaacatgacacataaaatccaaattctagacagaaatatcaataatttttaaattcaaaacaaaattcgtattaacaaaattaaaaaaaaaaaaaattataattgtatatacattaaatatttttgacgctaaaagaaattattaaatttataccgcttataaactcaaaattttaaatacttataccacaatttaccgtttaaataaatcagaaacagaattacacttttacaaagttccgagcacttttaacaaccgttgacaattttcaaaggcaaagtagcagttagtgtccattatcattacaagcaatcagaaatctcgaaagctcattttcgggtccacatacttcccgccaccacgccctcgtcccctacctcgacttgctcccttacctcttcctctcgagctcaaacgcctgaaaaacgatttcccatgtttcatctccaaaagtgaatgaagaaactcgtcacaaagaatgcaaccagcatacaacgtggttccatcttccaatggcgtcgtctttttattaaagtccacttctatgattgtagagttacaatcgagacacttatcttgagtagtggaaattcggtgagcaccttggggaagaaaaataagacagttacaagaattgcaatggagtcgccacttgggagcactgacagggtctaggactagtgttccgctacattcgggacaagcacatactccttgggttatcatggaatgttgacaagtcgggtgagggcagagaaagcaaggcatcccagctcccttacccaacttgttggaaccgccagtttttgcagcaccgaagagtgtagttataccttcgaatggaggactgttgtagcagtacgggcagagtgggaatgacttgccttcgggaccaggcatcgagcaaagtagaagctcaaaattgtctaaaggacaagtaagttccttgtaaagctgcaaatattagacacttttgttaagaaattttcaaaaatgacttttttttattgttttatgggaaaaattcaaaaaaaaaataatgagaaaatagtttaggttaaccaggtagccttaaagtaacgagatgggtaaccggtaacctccttaagttaatcagttaacttatgttatttttcctttttttgcgcacattatataaaaatccataaaatttgtaatttctacttattctcgatttgagttttaacaaaagctaaaaaaaaaatattttcgtgaaaatttttagggtaaataattaatattaagaaagaaaatagaatttgattgaagttagcataaatatgtaccttgattatacccttctggggtagataataaacctcctcacaggtaggacagtacaaacgtgatggttgactagatatgtgtttcatgtatcgaagacatttcccacatttactaaggactcgccccgagtcagcaactggcgagaattgcgcctcaaataacgcatccatgttatcgatctgcaaaaaatcagaaagcatcgaaacatattcaagaataacaacataacaacactctcattagagtttttgttttgttcttttggtgatatgtttggtctttaaaagttattgcttgcgtataaactcggggtactaaaattgtaacaaatgataaggaattctaacctgcttaacaaaataactgaatttttgcctgaattggagtagaacatgctgaacgacatgaacatgatcagcttgtcccttagcaacatgattaatctgttgttcgatgaaactacgaatatccggcaaacatagatctgggtcaatacattgatatcctcttatcaaggttatacctaagggagtcggaaccagctttctacccgcttgtacctgcaaattgatctcgtaaactaaatctcacaaaatattggagaaacaaagcaggtaataaattgagagaaacaagcatttaaataaattaaatcaactaataaccttcacgaaattgcgctcacaaatgttgttaatatgaacagaaatcgatgcatctgtgcctattccattcttctccataagggaaattagttcactctcacttaaataatctggaggcgatgtactcccctgcagacagtacagacccgaaatagatataatttttcactacatacatgatgagaagatgaatatgaaaacaatacgatatttttctagttacctcgtaaagttccactcttgcaacttctaacttctctccttttctaaactgtggcagatttttctcagctatacccaaccacggcataacgtctgtaaatcctttagtcaatacacgaatccctacacagtggaaagattccccgccagttgaaaattctacctttgttctgcaacgaaacaatagagttgatatattataaaagcacacaacaaatttagcattagaaatggccaaagcataaactgtataagctattgaaatttcagcacgaacagagctcaaccacaataaatcatacatacaatcatgttttcagtcccgtttcacatacttatacattatgaatttaataggttttaaactctattatgtgcaccaaaaaggttaccctttacttaaaaaaagaaaaagaaaacaattagaaaggaagatcgacttaattgaaccagcatgtaaatattagagaccgggtcacgcaggaaataagaggtcatcatgcaactgcaccaattataatgatgaaaggagggtattaatagaacaaatgaaggaaaagaaaatacccgcttcggttttacctcaaatatttgcagtc

SEQ ID NO: 15821 - DNA, 3169 bp, Cannabis sativa
aaacagaaaattgattaaaaaagtattatcaaacgccacctaagtaattaactatcttccattgtctaataagacacccatatttttgactctatcatttatatggtcataactaccggcataattacaaatgaagacatccaaccatctagcaaatatccatgtaccacacccacaacacattacttgaaccactatttcatcataatacacattcaaactcaactttctcccaatagtgttcttatgtaacccaaacatttcggtaaatctactattttccactcttacccagggtcggccttgagctaagacgaaggaggcagccgccttaggccccactcagggccccattttaaaaaaattaaaatatagttcgtaataatataaataataatacttttaatactaaatatgtgttgtagcctagtagtaatttgattagtttaacaactaagaggttgagagttcaaatctcaatagattaaccctgctcttacgtagacaatagtcttgatcgctttgaaaacttctgttagatctcataaccatgagtcattcaaattcctttcctcaaccattaatatcaaaaccctaatcgataatgatcagtagcttttgggaatccttcctaatgttactttcctttgcaatggatcctcggtcccttaggtgtcaactagacttcttgaacatatgactgtacaacctctaagtgattaatcatcacatttacatctcaaactttgtgcctttctaaacctcaattgagctttgtcttctttgagactcgcagtcactccatcatcactcctcagttagttagttgcttgagctagccttaagtgattttcttatttgttatttgatccccagaccccaggcatccatatcactaactttttatggtcaattgagctagccttagttttcccatttcttttattttttttatagaacccgttttttagaattggaaacacaacgtaaaagagaaaagagaacaatatcaaactttcaatttttcttactagtcttttctctttgatatagaaaatttcttatttgaacaaaattttcatttttcttttctttcttattagtttcttggtttaaatttgttggtcaccacatctgggccgggctctcgagagaccaatatgatcttaatttcacctcttttgcactatgaaagaaaaaagttcactgctgaaaataatctatgtatttggtgtatatttatatatatatagagagagagaaagagaaatggagttttattaatgatcaataataccatactcaattaactagcaaacattgctcaaatatgaaaataaaatattgaactaaagaaagtacaacatgacatatcttcatagttcataccatagatttgatttcatcatttggaactcaatgatattattatccaacaaccaaccataatacctgtcattgaatttcattatctctcttcaccaatgtaatcaaaagaccaaaacatatatagagaaagagagtgaggtttgaggttgaagagggtattatagaataacccttttcttcatttttcttcttttaatttcttttttggattttgggactattatgagggagctctatttaggggggagtgagtgagtgagtaaagattcatttccccctattttctcttgttacttcatttggaaaattgggaaaatgccctctctcaaacaaactcaaaccccatttttggtcatacaatcttactctttatatatacataaaaggttttttattaacttaaatgcaattactagttactagtaacttattagaatgtgtccaaaaaataataataaggaaaactataaatgcaaattggttttctttttggtatggtgttgttttggagttttgtatagcttcaacttatcttttacagtttaagaggctgaatttcaggttatccactgactaagcttatatcatattttttctataaatagaaaagttggtaatacaccaaaaaaaaactaagattttgtactaaaaacaaaagaaaaaggtgtcactcttaaatgtgaattggtcatctaatattattattattattattattataagtgtaggtgttctattttatcacctcttctttattttccagcccacacatttgattacacatcttatcttatggcaaatcaattattgaaaattatctttcttttatttattttgatactacaaaatttctcattttaggatgggaagtttgagggtgtaaattatttgacaaattcaatgtttaagatcaagataagacaaacttatatgatcaaataccagagtgtcatagacaaaattttagactttatttatagaaaaataaaactagcaccattctttaatggtcaatgatagcaccatttcatttttaaacccaagaaaaaaaatactaaatcacaacattatatgcatattaatggtaacttcttattaatttaaccaagtattaactaatcctcattctttttaggttagaattaaatgcttaatattaagggagcctttagaaaactctagtggaattggatttgaatataattagaagtaattacacaatttaatatatttatttgacgaataattacataacaaatgtcattagaagtaattgaagagcttcaatataattaaatatgtaaaaaaaaaggtgtaattactaaaagtttccattttaaatattatccaattaactaattattatctattttagattggaaatgaatctttgttggtaagatatgagaaatatttacattataagttactaaagaatactagtagtgtccaacactactagtagtgtccaacactactagtatcgaacctcatataatataatataataacatttataaaatatcgtgaacctcatataatataataacatttatgaaatttcgttaaccaatagtaagacgtcacttctaaacggcgcctaacaatctagtcaagcaccatattaacaacacccttttcttttggctctatttaactgtagaaaataactaagcatacatatagagaattgagactatataaaataagtttaattcaagggatagacatagagaacaacaaactatatagacatcatatctttgagcaaaaatcaact

SEQ ID NO: 15822 - DNA, 8473 bp, Cannabis sativa
  modified_base (8438)..(8438): a, c, t, g, unknown or other
atatgaattatttgaaaaataaatgtatttattttgtagcggatcttttacaaaatcaattcggaatggtgctagttcgtttagaaaatatgattaaaggaactatgaatgggacaattagtcataaattgatattgatccctcacaatttggtaaattcgactacattaacaacttttgaattttttttctgattatacccatctcttatttatataaatataaatataaatatgtgagttataaatttggaaattaaaaaaaaaaaatagtaattataattaatggtaattcgatatccttatatacaatatttcttaacagatatataattttagtggttatattttgataagaggagctatttattgcttgcttattgaaatttcccagaacatggtattaaaaagctataggcagcgggctgtatgtattatgttctccatggtcagttgacttgacctgaaagcaatcagagatacaatcatacaacactgctctttctctttttggtgatcgaatgaataagctcagcagaattttgattagcaatggatattgaggccaaccgatataggcctgtagtccccttattgggtctgcttctcctagccaacttcatacgtggagatgataccatatctgcaaatcaatccctgagtgggttttcaaccattgtttctgcaggtacgatttttgtactaggattctttaaactaggtaaggctgaaaactactatttaggcatatggtaccaagtagatccttcgcggactgtcgtttgggtggcaaatagagaaaaaccagtctccttttattcagagcttaagatttctgatggcaatctaattctgtacgacaaagaagtcccaatttggtcaacaaatgtcacctctgctacctctcctgatgttcaagcagttcttatggacagcggtaatctcgtactaacagatggatctagttcttcagaaccactgtggcaaagttttgatcatctttctcacacatggctgcctggaagtaaaattggatacgacaagataacaaaaacaagtaaacttctcacctcatggaaaagttcagaggatcctgctcctggcatttactccattgaattagatcccagagacaactcgtttataattagctggaacaggtcaaggtcatattggacaagtggttcgtggaacggaacaattttttccttgatccctgagatgcgtgactttgccgatttcaagttcctttttgtagaaaacgaaaacgaaagttacatcacttattctttttcaagctcatcatatacaacccggtatgcattggatgtttctgggcagctgcggcagctaatgtggcttttgtcgagtggttggaatttattttggtctcaaccgagacaacaatgtgaagtttatgctttctgtgggccatatggcagctgcaatgagaattccttgcctttttgtacttgtttgagcgaatttaagcccacgtctgaacttgactgggatttgggggactattctggtgggtgcgcaagagtaaccaaacttgaatgtggtaacaacagccttcctaatggtgagaaggacagatttctagcgatgcccaacatgttattacctgaaaataaacagtctttgcgtgtcggttctgatgaatgtgaatcacgctgcctaaaaaactgttcttgtacagcttatgcttatgaaaacaatgactgttcaatttggaaaggaaatctcttaaatctggagcaactatcggcggcaggtgacaacattggcactctttatgttaggcaagcagcttctgagagaaaaaaaggcacgattgtccaactagactggatcttttataatccatatcattaaaaaatgccatgctattatgctaatctccattgtaatgtcaatatttttttctacagagtctagcaaatcttcaaagtctaagatactatatgctgtcctaggaactatagcagctgcttttctcatcgcaagtattgctttttctatacatcgtagaagaagaaaacagaccaaaagcaaaggtaatgctaactattagtgtagaaaatggaaatattctctcgtacttacacttttaataccaaaatgcaaaaataaaacttttggatttcctctagctataacttactacttcaagtgtcttttaaaattaggtgaaagaatgaaacttcaaggaattcaggaagttcggctatatgacactgagaaacaaattgccaactttataaaatttggcaaattcagtgaagattcaagagaaggtatagatgtcccatatgttgttttggaaagtatagtaatggctacaaataacttttcagactcaaacaaacttggacaaggaggttttgggcctgtttataaggtaatactcatcctcatcttagtagacttctcaagtctcatttttaaactactactactatcaccactatcactttttattctttttctttttcttaaatttttcttttttaaaaaaaaattaaaaacagcaaaaaaataactaatacctgccttgaacccccaacagggaaaatttccaggaggccaagaaattgcaataaagaggctctcaagtggttcaggacaaggcttagaggaatttaagaatgaagttatgttgattgcgaaactccagcatagaaaccttgtaagacttttgggatattgtgtagaaggggaagaaaagttgctgctgtatgaatatatgcccaacaaaagtttagactcatttatgtttggtaagtttgtttttgtgaattgatgaaaattttcatctctttatcggaatgcttttatcttagtttagaatttttacagatcgaacactatccgtactgctaaactgggagctacgctttgacatcatactgggaattgctagaggtcttgtttacctccaccatgattcaagattaaggattatccatagagatttgaaaacaagcaatgttctattagatgaggagatgaaccctaaaatttcagacttcggcttggctaggatttttggagggaaacaaactgaaggaagcacaactagagttgttggaacatagtaagtaatgcataaggtcctaacctgaaattgctttgtttcttagttttctattaattttttactaataaacttgtttataaaatttaatctctaatagtcaattttttatgcacagtggttatatgtctccagaatatgcattagatggatttttttctatcaagtccgatgttttcagttttggtgttatggttttagaaatcctaagtggaaaaaaaaacacaggattttaccagtcagaagaagccttgagcctgttaggatatgtgagtgttgatgctatttcacatattaatttatattattgttcttattttgaataacctttttaatcaatacttgctcgcaggcatggaaaatgtggaaagataacaagacattggatttaatggatgcagcattaagtgagagttgcaatgcaagtgaattcttgaggtgtgtgaatgtggggctgttatgtgtacaagaggacccaagtgatcgacccaccatgccaaacgtgatcttcatgcttgggaatgtaacagcaagtttacaaagtcctaagcagccagcttttgtggcgagcagatctcttcctacctctgcctctcctagtaaatcatcaatatccgttaacgaaataacaaataccttagagaatgggcgataaattagttagaagtaattatttattgaactagccaactataccgcgctactagctgtttagattttttattataacacaactgttttgattttttattatttttatataaaaaaaattatatttaatatacaaaaagaaaaaaaaatattagtttaactggatataatttttttttgaataaaatttaaaatttcataaatttcacccattacaatagaatgaacttcagttaaacaatcagtccactaaagatcacgacctgtgaaaaaacaagagctccttgcaatacaatgagccatcttatttgcatctcgtttaacaaaacgtaatacaatattactagcagaagaaagtaaagcacgacaatcattcacaatcaagccaaactgagatagaagaatggcattactaagaatagattgaacacacagaagactgtcagtttcaagaacaacctgtggccatgagtgcttcttgatccaacttaaagcctccttaattccaacaatttcagccatcccagattgaactctgccaaacaagctagtgttaaaagcagcaacaaaaatcccatttgagtcccgagcaatagctcccattccaaaacgctcctcatgttcaaatattgccccatcaacattaaccttgatactattaaaatctggtgtaatccattgctcaatattctttcctccatcaagagaagaagaaagagataaacctttcctggtttgagcaaacttatattgatcaagaattgttcttgccgaaaagacaatagcagctgtagaggaggctttattttgccaaataaattcatttcgagacttccaaatcgaccaacctagctgcaacttcctctaaaacactctcacttttcttctcaaaaaacactagcaaccactcaaaaaaatcaggtgcatcccaagaagcaatgttgacagctgaaccatttcaccaggcccgtgagtaagagcaactcgcaagtgcgtgaaacgttgtttcatccgccaaattgcatttggaacaaactctactaaaaggtatatactgatgttgaagttgtgcacaagtaggaagggtgttcgtagcagcacgccacaataagttgctgatttttgggggatctttaaatcccacagctttttccaaaaaccaacatgattagatgcattgttgtaccctttcaaatccctcagccttttgtaagcactcttaaccgtgtacacaccatgggtatcaaacttccaagtccataaatcatccttagagttagaactcaactgaatcgacagaataagttgctgatctctaggttcgaaaatgtctcgaatcaactccacatcccagcatcggttattaacttcaaacaaagcattaattgttcttccttctaatgcaggatgagaagtgataacatccggattctccacacaatcaagcacaggatcatgaagaatactcactgtagaatcagccccattgcttcgctgaattccactcaaaactaacggttgagcctccattatgcttctccatatgaagctcaggttctccccaacagtagccgtaaggaaagacccttgtgaataataccgagccttataaattcgagccacgagggatgacggttgtgtaagaagacgccatccttgtttacccaaaagagctaagttgaaatcacgaagactccaaaaatcgaaaccaccttcaaccttatgcctacacatatgctcccagctcatccaactaatatttcttttttgtgctgaacccgtttgccactaaaatttagacataagtctttccatttctttacaagtatccacaggaagtaggaacatgttcatagcataattaggaagtgcttgagcaacagtcttcaaaagaacctccttaccagctctagacaacaagcgaccttcccacccttgaattcttttacgaagcttgtccttaagaaaacccaagataactgttttgcttttaaccatggtactaggcaaaccaagataggtaccattctcatccgcctcaaaaatgcccaacaaatcacaaatagaatccctcatagccacattagtattagtgatataaaaaatagaggacttaaagaaatttattcgttaaccagaggctaactcaaaaacccgtagcatctccataatcatacttgcctcttcctcggaggccctacaataaatataactgtcactcgcaaacaacatgtgagaaacaaaaggggctccacgagcaactctacaccccctaatcagaccacgcgtctcataagcatgaatgaggcttgaaaagccttcagcacagatgataaataagtatggagacaactgatctccctgtctaataccacggagtggtgttatcggccccataaccttgcccccatgaactagtgtgtagcagatcgatgtaacacatttcataaccaagtcaatccaacgatcctcaaaacccatcttagtaagaatatcacggatataaccccattgaagcctatcataggctttactcatatcgagtttaagagccatgtaaccatctcgacctcttgatttcagcttaagataatgcatcacttcataggcaatcatgatgttatccgagattaaatggccttgaagaaaagcactttgtgtatccgaaatcacccaaggaagaaccaccttcaatctatttgccaacacttttgaagtcactttgtagagcacattacataaagatataggtcgcaaatcacccatcgaactttgatttttctttttaggaatcaagacaacatttgtggcatttaaactagtcggaaaagaccccataacaaaaaaaaatcttggacaagacgaaccacatccttaccgacaatatgccaacatctttgaaaaaatcttggtgtcatttcatcgggcctcggagatttatccgggtgcatttgaaacacagctttcttcacttcctcatctgaaacctcctttagcaactccaaatttctgggcattagacactcgatgctgaacattagaagttactgttgtccagtcgctaacagcagaggaaaataactccttaaaataattcaccattaactcttccaaactcgaaccccactccacccaatggccatcagtatccttcaattgagtaattaaattattacgacgtcgagcagtagctgaagcataaaaatacttactaatttgctcaccatcttggagccataattgtttggatcgttgacgccaaaattgttgggcataggctttcgaaagttgttttttcgcttcagcaaagtggttaacagaatttgaatctctacccaatctccatctacttacctccttcttacacttactaattctttatttaaaattccccgtatactctttcccccaatcttgcaactgctggccacaatgatatatcttatccgaaatcactaaattagagttcgcctcccaactatccttcacgatttgcacacatagcagctccctcagctaagcattttcaaagcggaaacgcttcaagtaaggttaaacagctccacaagtaacatctagtaagattggacagtggtccgaagtggagaaatccatgctatagagcttagcaaaagtaaaaaaattaagccaagattaactaaccaaagcatggtctaatcgaacctccacctatccttccgtaccccgacctctctcccaagtaaattctattaataagcatttccattttgagaatatatggttagagaatcctaaattttacactcttaggagtgcttggaatgtaaattcttataatacgtctaatgtaggtgcttattctatgtttcttcattctcagaaagcttgtgtctcttctcttaattcttggggtaagtcggttagaaatagttttaagtctcgggtcaccactcttcagcaggaaattgagagaattcaatctactcattttagagataggaatataacttcaaatgttaagcatcttcaatcacaactagatgctcttttgtataaggaggaggtttactggtgggagagggctagggttcattggctttaggctggggatagaaacacagctttctttcatcgtttcgcctctaataggaagtgaaataataccattaaatttcttagggatgataatggtaatgttcttagtagtttagaagatttgagtaatcttatcacttcttattttgaggaccttttccattgtgatggttgtgacccggaggcagctaatcatattcttgattgtcttggccctcctcttgaggattctgagattgaccttatgcttcagcctttcacttttgatgaagttcaacatgctgttttctagctctccggagataaggctccaggtcttgatggccttaatgcatatttctaccaaaggaattgggacactgttggcattgatcttattcatgcagtcttagattgtttgaacaatggggctgactttctgaggttaactctaccttaattgtccttattcccaaaaaagagagggctagttctcttagggactttagaacaataagcctctgtactaccttctataaagttctctccaaagttttagctaatagacttaaaatggtgcttgataaaattatttctcattttcaaagtgctttttgttgggttttatgccntaaataaaactctgtttcaatgtaatccagattat

SEQ ID NO: 15823 - DNA, 17900 bp, Cannabis sativa
  modified_base (9897)..(9905): a, c, t, g, unknown or other
  modified_base (9991)..(9992): a, c, t, g, unknown or other
tatatatatattatataataatatataatatatattaaaaaaaaaaagtccaaatcctaaatttctttctcagcctctcaaaaaaattctttctcacatatattgtgtatttacgtgattaatttttattttagttgaaactaaaaaaaaaaaaaaaaacctcttaattcggtttgggttaacccgaccaaaccgcccaaaccgtcggtcgggttaagattttttttttaattgggcaggttgcatgcagaattttacaaaccgaactttacgttgggttagaaaatatgtagtataaaccgaccaatgtacaaccctagtttataggaatgagaattgtaatggtaatcaatatggttcattattttatttatttatttattttttaaaattttgtaatccattacattgtaatggtcattacaattacaatccattacaaaattaatataatattataataaaaaaatttcaaaagtctattttaccttttatttaaatattttataattataaaaataaaagcaatagggatattttggtcaatatacattattccattacattcctacaccaaaccaaatacaataattttaattacaatactcattccaaccacaaaccaaacattgtaattaattaccattacgattcctattccattacattactattaccattaccattatatttttattacaccaaatcaaacattacctcatttcttcttcaaacattggttaaaatgaatgggaaatttcaatatccatccattaaagaaaaccctttaataaaaaaatacccctaaataatattataccaacctatactttaagtttttcctttatacttattttacccctttaaaaccaaccccgccccccaattaattatctctcttcaaccaaaactccaaaaatcaccactgagccaccacgtgaaataatgaataagtattttttttaaacaattttacaagtatatagttcatttcaagtagatttgtgtgattgttatttattttacttttattttgttttgtttttctttaaaatcgcaagatttggttttttggttttttagcatgttctcgttcttcagttaattttcgatagtttttcatacgttctcgatgttcttgcgatgtgtagtgtaccaaggtcaagaaagaccattttttgacaccttcacaatagtttttcgatggtgttatttgtgcttcaggatagttaataaatgggccacttcaaggcccaatatgagagtagggccacttagtgggcctccaaatggttcgcttcatccgaggatgaattcagagacttgaagctagagctagtagaaatgtcatctaccagtagactcggagacctgaagtcgaatgaatcaatgacttcttttagaagatccagtgtaactttgggaaaatacttgcagtaggtttttggatacgaaatgtgatgggcatccatcaatgataagggtcgcagaaactgacccacgtggcacacttctgataaatttccgagaaaataggcagcttgtcccctacatcagagcacagagaggctcatagcaaaaatgaaggtacctttttgcccaaatgtatgtttgtactaacattctctttcacgaggccttcgatacccgtagaaatgccactatccaatgtgtccctttgtaagcgacgatagttatttattcgctgggcttcacctaccgggcccaaaatgttagtattttattgtatttaccccattagtagatttaaacatgataacaactgtaaataggtctggttcatcccgggaacccagctccttgcctataaatatggcgaaaaaccttcatgtaaagggttagaattttaatttggagctgaaaaatcatataaagaacagtaagtacaccatagctataagcttaataatattgactcgtggactaaggctcgttagcacccaattcacgtaaaaatctcaccttatttattcattaaacacattttacttagctcaatcttcatttaattcagtttctaaaaaactcagtaaatattttggtgctttctttgggagctgaagaacgcttttatcatttgtatcatctacaaaaatggtatccacaagaaatactagagctttgtcggctggtcaagttccacaaaacaatggcgaagaacctattgttgatgttgtgcatcccccctcctcaccgacagatgctcaggcaactttcataggggacggagaggtgtcaacagtaggtaacgactctcctcgtaatgttaaccagtcgaaagatcccatcaacaagtatcccacagaataagacaactaggaatactacaaggaggacatgaaggatggttattatgatgaagaaggagagtataccaactacactaaggattcagagctaattcgactaaggtaggtggtccgagactaggaggctactcatcagatacaagagaccctcctccttatgcaaagcttgatgggagcaggaggcctcactttagatgcacttcccaaggaccaaaacttaagtgcatgtgaatgctgaagttccagaggccacaagaaagtttaatcatcctagagctggaacctcaaatgcgataaatgataagaggaaagccaaagtggttgagaccttaaagaaagatcatccgccaaggcatacacgcgatgctcttggggacaacaaagtcgcagcagacccactccttcgaagagaaagggttgaccaagatttagggttagtgttgaaacttattttactatgatcttaatttactaacatgtatgtttaattatcacataataatctaatatcctaaaatataaaaaatcataaaatgatcaaataaaaccttaaagtttaggattacttacataatggcaacgaaataaatgtctccttctgttcagtactctaacccttgttcatttttgtcgcagagtaataacaagtactgaacttgaatcttcttttcctttgaattgacaaaacacctttgctaactgtggatttagccaagtgacactgagtctgattaggattagatcttgcttgtgactgccatgtgtggaatggtaataaatgtaaagacaccaagatttatagagatttttatcccttttgtttaggtaatgacctactcccccttttagttatattcacttttgagataataccaagtaaattacaagctaaaaccttgtaatttctagctaggctatcttcagtcttacaatgtgtttggcaggtgacaagtatgagaaaagagaaaggacttattactatagtgcttttgagcgtactttcatcataggttctgagtgtgcatcttgctctttatatagtagtagagcttacaagctatagatagagatatccctagaaaatagggaagttacaacgtatatttgaaatacaaagtaaatattaactaatccctaaggaatagggttgttatttgtttacagagagtccttatctttgtgggcaatttgaaatgttctaaagtcgtacgaatggtgaaggcaagttggaaagcttgtgagaaaaacacaagtactggagtatttttgtgcacttggtcgatcagccctgttgaaggctgcccagtgcttggaagctgtcactcctggtcggctagctataggtccggccagggccttactggcagagttgtacctattattttgcttgtgtataccatgtagccatggaatctcaaaggttgagaggatgcacgacactaatcctagtaggttagtgctgacttgtcttcaatgtattttttctttttgccacgttgaggggccacgtcaggtgaataaaatttgggataccatttgtctcccaagtccatgttcgaacgtctggtcgggtagggactttacactttgtctagtattgtagctccctttgccatgcaggtatgcatggccatgtattagactcttcgacttacatgactttatggcagttcttaattttacgtcgatcaatatgggaaattatgtaatgactgcacattttcccatgttacaactcttggccttctctttcccatgcatgcctatttttgtggcattaactccccattaagttttttaggggaaaatttctagaaactatatgtataagcctcattcttcttttcattctttacttttcacttttgaacaacaaaacttctctcaaagactccttagagctgaaatcttatgagcttgagttcctcgtggattttcgagtttttgacacccacacttgtcatgcggactagctcaaacctccttacgtcttctcagtgggtaagttcaaagctttccctctgttttttgttctttaagcttccactgttgttgattttcaagcttttatgaacttcttgaatgtcatgtcttaggatggtttttatgcattataatctgttaaatagctttaggatgcataatgtataacttattgatgaaaaagatcgacttttgagctttattttgacactttgatcttcggggtttgaagaacacgaagaacatagcttggattttagaaaatataatttttaattcattaaggggtctggtcggtactttaggtctgttagagaccctggccagttcttggtcccatcttaagtcccttggtcggtacattagttcctttccaggaactatgtctggctcttttggggataaatctatgctggctagttcatggtggactgaccatgatctggccgattcttggtgaaatttctagaagttggctggttcatggtgaaataaccatgagctagtcggttcatggcttgacacttcatgggctagtcggttagtacccacatgtattggcatgttagcccatatttttatccttgtcttatttatgatctctggttgttcacctccctttgtctttctatacagataaacctaggcgactattagggaggtgacatctggatcgacaaagacctattctatcttttgtacgaagactatcactcagctagttcttcctctaagagcttgtcaggtagctctttgagtgacttcaaagtgagtagtggttcttcagaacttaaagttcaacatcaccactattctgagcaaataggtggttagatctacgagagattcatctgggaactgaatcaaggctggagataattcctacctaagtcttggacttacgttgtttgatagggtgtgtgtgacaccttgcctgtgggtcaagtatcttcttcacctagaaatcttcctacaacagtggttgttgtgaatgttgtccagtactctaagcaacattccaacctagagaggataaagcaaacttatctcaaagcacctctgactgatccccacattgccaaactcatggcaagggggagagttcgtcgtattgaggaggttcaacagcctgaggccgaccaggttgaggagcctatggccggtcaagaggatgaagagctagaagttaatcagactgagcctgaagtagagcctatggctactcagaggcgccctaaggagtgttatgtgatccaaggcaaccccttgggctcttatggtgaggctggagtgcctctgaatagtaggggtcaacccttagagattaggtttgatcatattgaggatgaggctgctgagccatggattcttcagatgggggaagcagatagatgggtatctccctgttccacactatcggttgccaatcttgatgacatcatcgatagtggaatcgttggtcaggttcgatgcattaggtctacttgacaccacttggctcaccatctgtaaccaaattggatagcgtggtctagcccccatgcaaagcaaggtgcgaggcttcctttgcatccgtattttagagacatagctaacttcttcaagatgtgtccaacttagattgcacctaagagtatcaagtacctatcagcacttcttgtcctctatgttgagataggttggctgtaaccttcacctttcgaggagagttattactttgagctgaaatccaatctaggctagaacatgactgagtacttctactttagcatgtagggttatcagtggcttgacaacactaatgatgcagccatgtcaaaatttggaggctacgccagaagttattttatgacatacaacataataggtgttcgtcagttttttcatcgagttctaacttattgttgaccacttcccacattgagagtaagggataggtccaaccatattctgtctctcccagaaactcgatgcaacatctgtacactagcatgtttggagaacttcaggaagtatggtttgtaccctcttgttgagggtgttgcttctccatataaccctcctgaagaccctagcaatgctcttgttgggaaggagaaaactaaagggaagagacctgctgttgagaatgaaaaaagcaagtctgttgaggaggcctctttggccaaggtggcccagacagggagtaggagggaccgcgctcttcgatggcatcttgtctgtgggggtgttgttggtgacacctcatttttgatcaggcctgagagacaggggcctacaaggcctgcctagcctgtgcagacatacaaaggcaagggcaaggctatcatgattgaggacagctctagtgagtcttcttctaaggatgaggggcctttaggtgatactccttgggtggatcaccccgtggagattgacaatagtaattttttttacctttgcttgcattttatatttattatttgtatgctgacctcattgtttttcttttgtagacatggtctccaaaatataaggtttaaagaggcgaccatcgaccagcctctctggcgggcattctcagtccaaggtttctcagacaatggctgcctcaaatgtgacccagaattgtttgcttcctcctctttcaagcccacttccggctaatcaacatgttattcgtgattcttcgcccaagacaactcttcctcctcccctcaaggtacatggcaaggtagccagaattatagccgggtagattgctccagcaagggtgaggaggaaaaaaaaagttgtccaaaactaccttggcaagtgattgccaaatgttgatcagcagcttcaggagctagatgatgactccctaaactaaattatgactagcttcttgagagatggggcatctgtaagaggtttgtgatacaacacaattgattgagtggtcgtatgaaactcctctcttggagcaagagaatggagtaaatggtgaaacgaggctcttaatctcttaagggcttgctcctagtcttaggcttctttccaccaagggagttgccttccttgccaccgttgtcttagtagcaggggcttcagtgcctggtgacttcttcttgccaccctttgagccctttgctcgggtgacagcttcttcaagtttgataagccatctgctttatctaagaattcgttcatggtgtataccgccttgagacgaaggtcagaccacagacgactcatctccttgagcccagttgtgagtgccataacccttacatccttgctaagactttttatcttagagtttcctctaagaactgctggatgtagtctttaaggggctcgtcttcctgttgcttgacgtccaccaaatcattgggctggatttgacattgttaggaaggagcaaacgagttgccaaaagcatccactagatctttctatgagtcgattgatccaagggagagcttaaggtaccaccattgagctaggcctattagcattgcagggaagattatgcacctgacgttgtctctcacaccttgcagatcggtctgtactttgaagtagtggatgtgagacaatggatcttccttcccggtgtattgatgtcaagaagggttcttgaatttcataggaatgggaagagctttgattctttcagagaatggtgagcgtcgttctctgccgagctcgaatttggacaacttaggtgtctgatccctttcactaaagtagctaaggtgtcgaattctgcctgattgaccccatgagtggtgatttgcgtcccagatagagcttttgttacctggacatggtcttctctagaagttcccacgtccactgttcttctcttattcaagaggtcacacatgtctcttgatctttcaagtcgttcttgtactctggtcgacctgaatcttatagttgtctcctgaccacggggtcgtgaaggaaattctagtgaggcctctagaatgaactctagatcgcctcgagacgatccactacaggagtgttcattaggagcattgtaatggctacttccctcaaagtaatcttcagcgggatcacaagtgtggagagaattgaattggttgctcaggttcaattcctctctgtgaactcgatggaagcactcatattgttggccatcagggccacggggaaagtaacatcacaattcacccatttcatctcgaaagtacttacaagtatgaagtggctcattggtccttacccgctggattttgtagccatttgttttgaagtagcatctcctactacttcctagcaggtcttttttcccttacagggtctcggggcctagtttcttgagaacgttgaggagaacttggtggaggagtcttgttggttctcttgttgttacgaggtcgttcaacattaggcggagggcccattggttggcaccctcgagcttgaatcctctcgagctctcgatcaaaggtaccttccctccaggaggtctccacgcctggtgttttcctagtgcctgctcggttaccggatgtagcagtggtgttttgagcattaagggtttctccttggacactagttcccacgtgactagttggttgatggggtgtctctctcacaaactcgaaaaaccttttcgagaagtaattctgcgattagagtgataagcttctctaatctattgagacagtttagctctccgatgttcctgcttaacgcattggctttcagtgttcttccagtttttcatgaaccagtgttgaaaccgtttgtgttgcatatcaagagagttgataactcttgaataaagagttatttgtcatgttttttagcttaatttgtgtgtattttacttatatttagttcttgtcctcacattttgtgagaatatatgttattttgtatttttatgttctttgggtaatttggagttgttagtgggaattattaagttttatttgaattttggtaaagaaaatggcttaatagagaaagtgcaaggttttgctaaagttttgcaggaaccttactgcaacaaaagtaacagggctgattattgaaactaatgtagaaaaagatgatgtgataattcattaattgatgtggcgaaaaatagttgatgtggcattaatacatgtggattgtggctgatttgtgaggaattctctagaaaattcctagggcacatgaggaatagatttttatgaaagatgcttttgtgaaaaagagggggaatataacctagcctctgttacaccatttggagggaagaacacaattattggcagccattattcaaagaaactcaagaggatgaagaagaaaaaaaggaagaaatggaggagaagtacaaaaaatgaaagagattgagattaggctaatagtttgctctctttaccttaaacttttcttgtattttattttctatttctaaactttataatagatgatagaattttgggtatttttatatttttgagcatgaactaatttaagcattggattatgaattttgttgatgttttatgaatgttgttagtaataaagttttgttcattcgcggatgcctaatgtttgtttacataattttgcttgatcaccaattgtaggnnnnnnnnnaatcttgattttggaaaaaataagattagtggacatacttgaatgatgcaagattattaccttggaaaagtgtgatttgtagatgnnataggaatatgctatttaccttgtatgacccatcggaaattggtacttaatttgtgttctctaggtctagatttgcataggaatatgttaatttaatcttgagagcccataacatataggtttggaaaaattatatgttcatttttatttctggttgacaaaatataattactaatgaattactctatgacatttacattgaatttacattctagggggatttaattgttctagctcatcactttgctcatttttatttctcattttatttactttcttgtttagtttttagcctagttcaaactatcacttcttgtttgttttacccaaattatttagtattgatttttgcataattaatttttaatcaattcctgtggagacgatattattttacatatcattgtattacttgtttgtgactacatgcacttgcgtataaatctaattttagcacaacaagagtctcgtaattgttgttgcaagtcagccacaatttggctgagctgaatgacctgaggattggcctccttagggtcatctatctccagctgaggctcctaggtgggacctggttgttggtgctagtcttgggagaagttggtagtggccttggaggaagaattgaagagctggtttcgaggcctgcttttggcgcctgaggctcaaaagtagtcccaattccaaccccatcaactgatgtgcccctagttgttcggccagttgctggagtctgtctgtcaacacttgtagaacgtgttgcaaccatcttgtttagtaactttttgagctatggctctcaatgaaagtacgaaaattttgactcaaaaatctagactagacttctaagccacacccgctcgctagattggagagaatgattaatgtagctgagtatttgtaagagaaacacaataaatttatagtagttcagccctataccgcgatagtaatgaggctacgtctactttgagtctttatttctcacgagatggtaattacaacaatagacgaagtatcaggaactccaaactctagagagagaaagtctaaagagagaatctttaaccttgtgggtagttttctgaatgtgaaaaatgagctaagggagccccttttataggtgaaggaggcacacaaaaatagaaaaaaatacaaataagatgttttttatcgttgatgatgatctaacggtgaaaattagcttctggtggtgatgaccaatttttggtgcccggtgggtcccgttgcaggtaaccccgagcttattttcgtaactcccttggaatgaattttgacgatgataggttcagaattgcaattggagtgtgagacatgacttgatatagcattgaattagcttctaaatacaagttgaattgcgttaatcaaattaaaatgttgacatcccagtccctaggttgacatatgacgtcaacttggacgctgggtaagtgcaaaaacgtccaaggaatttcctttaagatgcctaagtgataccttacaccacttagtccatttatatgttttggcgaagctggtcaccagttctcagagatgttactattttgcataaatgagaaactcgaaactcttcatttctgagtgtgctggaaatgaaaaatgcaaagttgtgaatttaatttatctgacttcatagatcatcgtcattctaaaaaaatagacggacggtcaaaacgacattagactcggataagcagaacccaacgcaccaggccttttgtcaacctgggtgatgggccctttttcccaagctcctgagattttgtttttgatacttctaagtcttctgaacttgaggaagaggtcgcctaccctatttttgaccattctggattctatggtcgcatcagatttggcattggagcaattgaaggcaacaacccaggttgattgtcaacttgggcgctgggcctagccctaggtcaacctgggcgctggaccttgtttctagggactcgagattgtggttttctctttgagtttacttgaatcttcgttatttctaatgatgaaaaaaatgcccagaacactttttgctgaacttgattggaaatagcccaggttgacaatatgttgacctaggcactgagctcgaccccaagtgttaacctgggcgctgggcccaaccccaggtgtcaacttgggtgttgggtcccagtttttcccctttagaaattctatttggtccctagaaatagttgaatctcaatattttctgaagacagagaagatgctcgaaagaattcctaaaaaactctattttaaatggcccgggctgacaaaatgtcaacttgggcgttgggccctttcaagtgtcaacctgggcgttgggccctttttttgtgcccaagaattgttgtttttcctcctaaaggacctatttccccatttttgatgaagaagaatacgatgcaaaagttgaatttccgactggacacttggaaggcacccagattgacaagttatcaacctgggcgctggttcctcggggcctcaagtgctcaaaaatcaacttgcttcgattctgatgcctcaaatatgtttgtggcatgtctagttgatgtctcaatgcaagttttgaccattttgcactaagcaggtcctggaaactgaaaccctagttaaggatgtcaacctggtggccaggtgaaaccctaggtgcccaggttggcttccgggttgcaggttcgtgtaattacagctctcgggacttagattaggttgcttcatgtcttcatggtgcagaatactgaaagatagtgagttggattcaagttattgaagtttgaacttttatcccgaaaatcctagagtcaacttgggcgtagggctagggtcccctcccaagttgactgctatgactcgggtctactcaactccatgacatcatccttcttgtcacatgtcaaacattgatgtccacatcaccaggaaaagtttttcggattaacaatcataagctgaggcataaacccacaaaatccaaaagactacacaaatctcaacaaaattatcacattgcacatccaaacaaatgttgatctactcggcagaaccctaatttcactaaaactatcacaattgaacctaaacctaaaatcacataataaatctaacaaatctaacattgtagtcatcagatatggaggtgacggcgaaggtcgttgttgggtcgtcgacggtgagtaaagcttttatcgtcagggaatttgggttttcaatggtgtggggccttttgggcttttgatgtgagagggagggggaagacgaggtggcaaagacgacagaagaacttagggcttcgagagggcttctggtggtggcgatttctcgaagttcaggaacttagggtgttctatttagatcaaaagagaaagagagagaaatgctttttgaattgacaagatagaatggatacattaaagtaaactaatataaattagtataaaattatttgaagaaatttattagatattgggtgaaattttaagcatattaaataaaatttcccaaatgaattcaattcagagattaaacggttggtgtagtagtcttattagtagtagtaaagtaatgctatcttatttgactttgtagttgtaagcccaaaagtcttaaaaagaccattgtttgtccacattggatgctgaatttgttgtggtgttcctaaaaacaaagactagtgtgcccatttttctagtggcaccgcacgcttcacggtggttgtaatcccatgccatgaaaaaaagtaaccacttctttttttcttcatttttaccataaaaagaagattccttttgggtttggacacaaaagctttcctaatttaaaggccgctgccttatccccaaagggttattgtttaccttttagattgctttgcaaatttagcaatgcattattatgaaactttacattagttttgtttttccaaaggaaaatgttattagtaacataatgaaatgaaatgatactatataattatgattagtatataattaagtttgtataataaatgagctgaagtcaaagagatgctaaggaaaaagatagaggaaagactataagcgttggttacagctgtattcacgaactccttcctactttttatttatttaattaattaattctttttaagtccaaagaccaatatccaataatgaatgatagcaccataaataataaataataataatagcattattattatggtctatagtcatagaaaggaagaatgaaattgaaccctctttgtttgtcaatctcaatgaccagagaaaagaatagaatacagctcataaactaatttggcaattatattttgtgttaagataaaactatatggaacgactgagaatggcactgagtcactgacctcctcttcctcgtgatgcgtgcacgctctccttgtccttttgagtttgatataatgatataattatccactcaaactcaaacccttggctttctccccaaccccatatctatctttcttttctttttatacaatttatgatcaatactcatcccctcacctgaccacacgaaaaatccaaactaaacccataatcccatatattattactattagtattagtaccaacacatacaagatctgcccttttccctctctttccttacctttcctcctatggcttctacttctcaatcaaggtatgcttttatcttttcttttgttacttgttctttctgggtttttggttgcgctaattaactaactatcttctttttaatgtaactatgtttcgataccattttatgtgatagttaaatggatgattacccatcagtaaagcataaaacttggtgtttgatgttgtgttgagttaggattaataaatataaattcttagttacatcataaaaagtggaattcaattggttggttaatggcgtcacacttttgttagaattatatttggttattgggacttaactgtgttttcaacagaaagtacttttttagaattagctccattaagttaaatttagtcctttcatacacaaaggttggactcaaatcaacgatatgaccaactaattttaactgctttaggaacttttatagtggctaacacaaagactaccccaaaatcacaagagaaaacacaatagataatatataatgaaacaataagagtgattgtaatagactgtaaagtagttcaagtgattgagtaaaagaagtacttaatttaattgttcatataagatgcaaggtcataccttgtactgatggggtggcctgactaagggtatagctgttaagatgagatttatcaggttgagaaaaactaaaggggtaaaggtttaattttcattctggttttagattatgtacagaacagactttattggcaagccattatacactgtaaaaaatgaaaactactactgtttttttttttgttcgctggaatgctaagtgtgcgaattatactcaccactgtttgtttctggcttttcttggctgtaaattaggtgagcttgttttgaaactggagttatcatagaaaggatcacagatagcagtaatttttgtgttttcttcacctttctccaaaacaacattgttatctgtttgtttctcctatttaagacactgatttttgtcaatgttttgattttgtttgaccatctgaaactagatctaattctgtgaaaagatttatcttagagaatatcttacccttaactatttagtcaatgagcatgaatatccgttttgcttttataatctaattgctgtttgtctggtgtgtggcaggattcttgacttgtccaagactataaatgttggcataatgaggcaaaatctttgaccaggatggatcctcagacttttattaggttgtcaatagattcactgggactaaggattccaagaacagctttgaactccactaagtctgatattcacgcgttctcttccccgtgttcatgtgaaattcgtcttcaaggtttcccggtgcagactacttctgttcctttaatatcttctcctcaaaccacacctgatcctcatagcattgcctcaagtttttatctcgaaaaatctgatctgaaagctttattagcacctggctgcttctatagcacacatgcttgcctggaaatagctgttttcacggggaggaagggaacccattgtggggtcaccatcaaaaggcagcaacttgggacttttaagcttgaggttgctcctgaatggggtgaagggaagccagtgattcttttcaatggttggataggtcttggaaaaaacaagacagacaccggaaaaccaggtgcagagcttcatttaagagtcaaagtagatcctgatcctagatacgtgttccagtttgaagatgcaaccagactgagtcctcaaataaatcagcttcaaggctctatcaagcagccaatttttagttgcaaatttagccgagacaggtgatatgcttctcatatttactacatttctataagttatagcctcattaacttccatatactgtgtcagtatgcaaaacaaagtaaaatggcaaagaatcaaagcaatccattttcaatgctgattgcagctaaattattgttttgagaccatgatgctcaattaaactgcttctgctgccacaactcattcatttatagactaaatttgcttttgtcttctagtttgtttttctgtcatctttgtctgtctcaggctcttactaaaagcaggaaaccaagtgatcatcttcattcaatgataataatttcttattggaattgctgctttgttttgattttatttattattgttttatgtatttgcatcataaagaaattcatagtgctttgaatcaacagggtgggccagacagaccctctgagcaactactggtcaggttctagtgacaataataccgatcctgagtgcgagagaagagagaggaagggatggaaggtgaagatacatgatctttctggctcagctgttgccgcagcgttcatgacaactccgtttgtgccttccacaggttgtgattgggttgccaagtccaacccaggagcttggttgattgttcggcctgatgcttgcaggccagagagctggcagccatggggtaaactcgaagcttggcgtgaacgtggtatgagggactctgtttgctgtagatttcgtctcatgtctgaaggtcatcaggaggcaggggagcttctcatgtctgagatttatatcaatgctgaaaggggaggggagtttttcatagacacggataggcaggcgcttgcaacggcagcaactccaatcccaagcccgcaaagcagcggagactttgcaggactcagcccagttgttggaggctttgtcatgagatgtaaggtgcaaggagagggaaagactagcaaaccattggtacagcttgccatgcgtcatgtaacatgtgttgaggatgctgcaatctttatggctcttgcagctgcagttgatctcagtatcgaggcatgccgccccttccgtcggaagataaagagagggtcatgttactctttgtgagaaaacagctaaatgaaaaagattaccgcaaatacgctacaactctacttagtctttctttctttctttttttttttgtttcaacatctgggattgtgtatacagtacagatggaacttgtaattgtgttttctgcaacatgttcagcttaatttggttagcatagtagtttggatttgaaggaacttttttcccatactcattccaaagtagtttgtacataacaagagctcgtaacctgtcatgtgaagggaaaaatttgctgtcttaactggcttaagggcaatgagcttatttttcaacttataagcatgcaaaatatattatatatatat

SEQ ID NO: 15824 - DNA, 4486 bp, Cannabis sativa
gtaatcatatccctatatatatatttgtcacttctctaaacaaagtgtacacatttcccagacgtagctttctctaatgggtggagatctcatagcaaatctttctcccttacttctttaaaggatccgaatgttctgcttgattttttaatatgttggccaaaaagtactggttttggactttgcaaccaacaacattgcgagccaaagagaagataaagtaaaagagcatgaaatatgatttgatcacattatcacatatgaaacattttatctttttaatatcttatttctagtttccagtgagttaaaaagaagtttgatcagtcaaaatttagctagctagctacccaacaccatgccccataaagcatatcaataaggttagatttttttttttttttaaatttctggtctctgccttgtactcttgtagtggccagtggggttcctttttgtcattattcaaacataatggcagagaaaatatttgtttaatagtgatttttctatttatttatttacttttcttgtctttgcagagataacatagaaaagaatcatggaccaaggacaaccatttcttaatgggttaggcttttaaggaagatagaaaaaataattttggtattaaaaggagttcaaatgtagagttaaatcattgttgaaactcctttaatttttcttaatctttttgactttgttacaatactaagtatgaacacacacataatacgttaaaacgacaattttatagagcctagagttaaaacaaaaacataaagattttcaattgcaaaattttagtattcggtgctatttttattattatatattttttgaaaaaaaataggagaaaagaaaagaaaagaagaacctgaaattacattttgagtacctctaccattatctagaacaacgttatatttataagcctcatccaaatggtctgctaagtgtcccaatatacaacacaacaaatatcttttgttcattaaaaataacaatactacataatgtcacttttctgagatattttcttattgtggtgttgataatcccaaaaacttcttctatatctctaactcttatttttaattatttaattctttttcatctcatgaatacaaaagttttttttatcttgtacggtattattgttccttatcatctcatcatgataatcacatgatctcaataattccccccttcatgaggagctagcaaacttccaagttctcattaaataatcggaaaaaacaaaatgccattaattcattaaatatcacatatatgatatgatatagctctgctctgctgactgctctcatttatatctatccatgtctaataagtctactctctaaagttcaaaaacatttacttttagctggaatgggccttgctctaatgactaatcatattaaagaaaagatgtataattgataaatctaaaaaagtataagcaatagagtacacacacagagcttaagttttataataaaacttaagtagtttatttaaatgatctaaaaaatatatcaattacattctaattttcaatttatttataaaattgttaattaaaattattgagaatgatggagtagcccatgttcttatatatgactcaattctctactatttattcattctatgtgggacaatgtccacaacttaaattccaatcaaatgtaaacattcaattggttaaaagaaattgtcatttattgatgctaaaccatataaattgtttattaaaactaagtgaactaaaactacaatgagaatttttcatagaagaagaaaaaatagatatatatatataatattattttttataaaatttttatatttttacgtttaattttttttattttttatattttatggtattttattaaaataaaaaaaaatacattaaaataataagaaaacaataacaaaataacctaaaaaataatatgcaaataataaaaaaaattataataaaataacaaggatacaacataaaaatacataaaaaaaattatattttatgtaaataaaatttaaaaattcgtaaatgtattaaaatttttgtacaaattgtatttttgtaatttttttttgttaaatccccaaataaatatataaattttgcaaataattttcttaaaatcaattattgcaatatattggcttgattcttcttattacgtttgaaaatcaattctagcaaaaatccaatatactcaaattaaagttctctcaatactttagaatttccaatttcaataatctaataatcccatgtaattatttaagtggtacagtaaatttttcgtaattttatataatttggaataattatacttatgcaagagcaagaaattgtgaatatatatgtataattaccaaaatatctcagactctaaatacctaaaaataaaaacaaaagaactgttccaccactatttttttttatgaatcagcgagattatcattgctccaataatcaattacaacttaaacaacatctcaaaagtgagacctcaaatatccctgtacaacaacaagtataagtgttctattactaaactttcaaaccatattctatatgtagcactaacttttttaggggaaacacttttgattctatacagtatttctgtttttgttttggtcactatacaatcggtttgaattcttttttcttcccacaacagcccatttcttgcccgccatatattgtatgctaatgctgcgattgcagcagaaaaaactctatatttaaagctgtttacctggtttctttgcagccatcgcaccagcccatgaagagatctcgaaaccacctgccaccgaagccattttttaagctgttgcagacattctgctgcaacattgcagcagataaacaagtgttccaagtcttccttgccatccctgcaaagtaagcatctaccttcagctgttagattgattttgcatagtctatctcttgttcttagcccattttgcacagttatccacatgaaaaagctatgtcgaggcatgttcattctattccaaacaacccgagcccattgcactttgtctccttcacatttgatcaagctataagccttggagatttggaaattccttgcattcatcaattgttggaattccatggattgcttaagcttttctttggctgtcactatctttttccaataccagcttgcttgaagtggagcttgataactccaccaatcttcttctttgatgtatatattgtgtacccatttgatccacaagttatcttatttattcgtaattgcccaaatgtatttagtcatggctgccaggttccaatcttccacattcctgaatccaatcccccttgttgatttgatttgacgtaccgagtcccaagcaatcaagctcgcaccctgtgatatgccatggctcttttcaccactattgagattacaactaattgagatgatgtttttgaggtagtggcatcgatagtcgggatggatgaacaagcaacaccaacgaatataaaaagaggacaatgatgatgatgaacgacgaccgaccgacgaacttagttaattcatggcatgtaattcttttaatttatgttttaatataaacctttagattagatttaatctatgtctaaagatgtaaaaaaacagtgtagaaaaatatgtctataaaatccttttttttaaaaaaaataaatttatgtgtatagtaattttaaattataaagagttttgctataaatatttcaaaaatttaagtgcaaaaaaagttaattattgtttactaagattttcgagaactaattaaagaagaacttgagaaattaaataagtaaagatatttttacgtggttcaggtgttaacaaaacctagtccacgagtcgatgtattggacaaaaggcttgatgtattccaaatgggtcttacaagttgaagaaccctaattcctgaatatgtttcctcacttgggtatttcttgcatagagaagaaaaatcctaaaaatatctgaagtgaatcatccccccgcatgatagtataatgggggtatttataggctagaatccaaattggggcatacccatgacccactcgggttactgtgcaaactaggcccactattggagtaaatacataaaatacatgactttaaggcccactacaggattttggctcatggggcgaaggtttcgtacgaattaggcctgcacaatctgggataggtgtcacgcacgggcactgacagtagacaaagatgtcaaataggcgacgttggaaaagtggatgtattccttttggtggtgtgggcactaccatgttctgacataggagataaaatctgatttggtgggaccaggcgttagagggtagccacatcacccctcaaagggcttccgaaggcgcctcttggaattcccctccgagtgcatcctagtgctcatccggaggtcttcgcttattacgtct

SEQ ID NO: 15825 - DNA, 4134 bp, Cannabis sativa
ttcgccacagagccctccattgcccgattaggggatatgttgacggaacaagaatataaatgcgttcgctagggttcgaggggcaacagtaaacaaatcatcaaatggagcttgggtcctctgaaaccctgtcgagaatttggggccaggatttcatatgagacagagatggtttcggcggccgatttgtatttattgagtaatgatatatatatacacacataacacaaaaacttcaagaaatcatatttattatttaataaagataatacacacacaaaagtaacttgccactttagcatttctctatgccatgtcccatacttagtttttactttttttattttctacttgctgattggttcaaaactcattttttgtgaagaaacccaagaaatgtttcatagatgtaacatacaagttaaagattgaacaaaactaaatgtatgggatatttatattaagcgaattagcatctacccattttaaatttaattgcatttatttccgttgtatttcttgaatttatggtaagccattttcctaattaactgaaacatacttgtacaagtttatagcaaagcagctgcaacaagagtatctaataaataattcagcaaaaatgagtattcaataaaaagatttaaatgttgtgctagatgaggctgaataatccaaaccatactaaagattattaatttaaccaaatacatttttgtctagaatactgattgagataaagaaaatcttaaccacacaaaaactgacttaatctctacataataataaatatatgactaatatttaatacatatctattatgcaatttgagtgtctctagcattactctttaattcaactgatgatgacataagctataaacgacacagcacaaacaaatcagaataaccgacacattgggaaaattaaattttaataaattatctatgttaaagaaaaacaattattttaatctttaaaacggagtattaatacacgatatgacagaatctatggggtggaaaaggccataagacacgcattgtggtttcccttctaaaattcagcaatcaagtggtcatatcctagagcaacacagcaatcaagtgtcttgcaagttggctgtcgaatgctttcattggaattaaagacgcgccaacaccaagaatgttttccagcaaccgccaaaaagaaatggcttggggctctgaaagccagtagagaaagaaaacacacatggctttagaaggcttgaaaataaaaaactgcaatcgtaaagataaatgtttatataaaacatgaataggtgtataccttcaccataggtgagaggagcatgcttccccgcgctggaaagattcttctctttctttcatcatttatccaaaaccagtgcacttcttcatcattcttcaaggatgacagaagcttccttcaaaaccgagaatggtggagtggactattgcatgtttccatctcattaacaaatccaatccactccagtccacctcggttctctatgcctgcactcccgccagttgggaaatgggaaaccccccagcagcaagtactttaagctcagcttccagctggcagggtgcaggcatgggccctgcccctcaccggggccgggctaatccaaaacatgcatcgtattgttgatgagactgtaaaaacaaatgcacatatgattaagactctagagaatacagaattctattataaatgttcatacgagtaaaactcaaaacaaaaaatgaaaattagagaactcaattaaaacatctaattaggatatcagttgacattacagcacatccattttaatggatacagctgtcaagcccatttcccattaaggtagtttcaatctcatttagcatcattgctagtcttagcaggaagggaatgcaaacaaggacaaagtcagattcaacttaggcctcaacttcaaccataaagttacaaatgttacattttcttttcaacaaataactaagaacgtacttctcaaaaaaaataactaagaaggtacttcatttcagtcatattgcatacctgtgagaaaggttgatgaacatgttcatgaggatggataaaaggtactccaggacgctgacaaggatattgggaggtatgcagatacatgccagatgtggagtgtgcaccaacatgattaggattatatggtgaaatcatggtttcaggcagagcgtagccaattcccccaggagctgatgcaggagaccatggcccaggtagatgttgaggaagaggatgagcctgaggttctgcagaaatctgaggtggtccatgagtagaacccagttgaggaaattccgtattgtagtttattgcaggggtgtacataggctgtatggtgtatgatcctccattaaacccaaacccgggatcaaacctttgcacatacctgtcaaacatttttatgttacattccagttggcttaaaaatactaatatctggagctaattgaatcataattcataaacatacacaaagactttggaaaatgattaataataggtatcatattctttactatggagccccgtattagaaggctggattaaaagaaaaacagtgtaaagatgacaacaaacaattaaaaaagaagtgtgtttaaatataaattataacatatatgaacacctttattggaatgaagatggtcaattttgatgtgttaccgaaaaaaaatatgaaagatatggaactaataaagacaaaacaatagttgccaatcgcaatgtctaagaaagattgcctttatatatttataagcgaaaaatgaaattttttatatatcacaccagcaaaaaatggttgcaaaacaaccttttggatgcaaacatatactccattataaataatacccgcacacaaaatatatatgcaatgtatagcagcatacctatcatagttcctgtcatagtcaggatccttgcggtcaatttctcggtcccgaaatatagctaccctattatttggtttgtacctaccaattggttccttctctgctctatttctagctgttctaccactagttatcaacggatcaatcagaactctactaggaggcccagaacttgcatcagcaaaaaccggcccaggtttttcttccatctttggaatcccaaagttaccatgttgcggagtatcttgcagccttagttcattatccaatctcccacttgcaccaccgcttggatcaccactagaaaatattctagcacgagccctgttatactcctctttcctctcctcaacacttttagcactgtttgactttaacgagtttgaattcccgaaatttccattctgtgaccccttctgcggcctctgcttaattgcaaccttaacaatgcttgaatcttctgatggcaaatttacaggaatgtcagcaaggcgaattataggaactcgacactcggttgttttacgaacaataattctggaaccagagccatcaggtgagctattatctaacaaaaccattgactgaagtgaataatgttgtgccacacggtgtgcagccaaccgtaagtaagaagtaggcagctgctgaaactctagttgctgctgagtaggatcacgtataaacttctccacatcttgctccatccttaaaactgcttagaacaaattaagtactcaattagcatgcttgaagcaaaaacaaccaaagtaataataataataaggaaaataataataataacatatcaaaaagttgaactactggatcacagaggtggtagcatatgatatctaaaatcactttcattgaattgatcatggtgatgacaacaatgctgaaaatagtgaggattacggcgtttcacgtatacacaaccttccgaacaatcatataaacatactactcatcttgccatacacgcaggactcgccaaaaagataatcaatgcccatggccattgaagtaacataaattaacaaatatagcataactgtccacaaaactcaactaataagtaaacgtaaacaactttaatcaaaggcagtgaggttcgattcttgaatacgcccaccagtatatgtatctagaattgtatatatatatttgcatcactcacttgacaggcgctcccgag

SEQ ID NO: 15826 - DNA, 5680 bp, Cannabis sativa
gcaaagagtaacccagataacagccaatcaaatcttacctcaaagaaaatatctttatacgtattcaaattaccactcagccaattttcaaggtctacaagctcctttttagaagcaagggcagccaacttgatactaaatgaagaaggagtcatatctagcacaggtgacaatatctgcaagccaaaatatatgcaccaacatatatgaaggagaaaaaccataaaaatcagcatactgacgaaacaacatttaaaaaaaaaaattaactaggatcctcctaaccatacaataacaatatttttattcatttttgggggaaaggggtggacatcaagaggtagtttactgtaaacttaccttcagctcttggcaaaggtccagtatttttgtaataatgtctaaatcacatttgtgagcgtctgcaaatccccgcaacaccaatttggaatttacatgccaaagatgaagaattatgctactagccatggagttcttcactaaggtaggaaatacaatcgcagacacttcatgttgcagcagattatatgcagtctgcaattaattggaacttataaagcaattgataatatcaaattaatgtaacattgtaaaattaactgttgagagcaaaggcatatatgaaggtgccagtacatttatttgtgcaatcccaagaagcaagacttcaggacagtgttgaagaggataatcaagcattgatcgagcagtagaagcatgacccctctcggataattgacacaatacgtccaaaaggtcaaggcacaaccatgcatgatttgcatgtccaacttgaatattaggcccaaaattctcctgaaatgatagcagtagttcatagccttacaattgtcaaacggagattatacaagggaagtatgctgtatataggatcttaccagctgtctctgagaatgggaaaagctaaaaacttcgggtggtgctgatacagcatatttaagaaacgataactgaccctcagtattcttccaaacacacccacaaatcgcatggagtgggaatggctcctgcacatctcaattcataaatttagaaccagtatatatttctcacttttttgtactaaagatccgcatgacatgcaactttaatcacatacctgggacacgcgcttatatacagacataaagaaggataacgcctcctgattatgaatatagaatccctcatgatccaaattttcaataacatgtatccagttggtactaggtgcctgtgttcagcatgcaaacgtaagacatgtgtatgtcttctcaccactgccccaaggtttaagaatataatcagcacaagaaaacatgtaaaacttacgagttgcttaatagtatcaataaggacatcgatattccaactattcaatgaaggcagttcagacaacgtgttgcaaccaagagccatgccaaatgttgaaaatgagttctggctgtcttcaagaccagcatgggagcaggttatagttccaagtatcttagaaatagtgatttcattgagcggtaagaaaagggataaaatctccttgcactgggaagcatcaactgtgcatccataacctagctccttcataatatctcccaaactcatttccttctccatttcagccaaaatcgcatcaaaatcattatcttcaccctcgtgcaacaaatccatattcctgtttaaaaaaagcaagagctactaaggacatgatattacttatatttaagtgacaaaaggaagaaatagaaatcataaaagtagtcttataacccaaaaaaaaaaaactcaagtacttagacaaacaaagtattaacagtacttcaagaaattggcctctcgctgttcatctgaaacagatggagtcagaacaaattgtgagacgtctttcggctgcaccaacgataacatctgtataaacgaatctacatgcttggagagaccctcagactgctggaggaacataatgatattcaaaatttgctcagaagaattaagtgcgacaggatttgcacataactcttcaatctgagccatacaaaagttcttacctataaaacaaaaatatagttaaatacttaacaaatgattcaaacaaacaaatgggcttaataactgaaactcaccacatatcctggtgtcagagttttcagaatcagacaaagcaagaccaatgcaaatcttttcggacgcggataggtgcaatgcatttgagaaattctcaagtattgcttcactgatctctgaatttcttagtgactcacaaaacaccgtactaaaattaggtctatccagaagacatttgaaaattgcagccacaactatttccaaggtcgcattcttcgcgtctgtcctgtatctgttcagatgatccaggcacgtttggagcagcaaaatccttccctcggtttcatattcaacgaactgcagataaccatacattaattcatgtcgacataataaatcttttactcaaatttataagactgcccttatttaaagaaccacaaatatgaaataaaattagaccataagatgccaatgcctggtagaatgaatcttattcgtcattaacaagaggagcgtaaaataaattaattaaaagagaaataccccaagaaaatgacatttagaaatgaaaaattcgcagcgaacacaacaatggataatatatatatatttaaatatagagaaagtggaagtgagattagtggtacctgagagaggtcctgaataacagagtctgcatttgcttcggtgaggctttgcaggacaaaccgaatctgattggcagtagttgacgagaatttcagcattgcaacgacaaagctatagtctagggttttcaaacaggagaggggaaaaaaaaaagactgcaaaagcgagagggtgtgagattctgcggatggcgagattagacaacaatggtgaatttgggggaaagatcggtgaagaggaagagagggggtacttagattcagagattttggagactcgacgaggtgagaatcgggagagtgagactcggcttcgaaatgccagtgcctattatactcaaacttttgccattggattacctgcgggttaccttattagacaggtgtcactcttataatgggatcaatagagaagcttcaaaataaaataatctatataatatctttatctattttattttatataaaatgcggatatataacataattcttagtttattagaaattattgggtgaatttttatttatatataataaaataaatcccaaaaatatgattgagaatggaactcaaatttacgatggaggaaggatttataagtttatataacagaattcttagtttatgagaaatttggtgaatttttatttatatataataaaataaaaataaaataaatcccaaaaatacgattgagaatggaacccaaatttacgatggaggaatgatttataagttttagacgatttagatggaacgatcgccgtcactgtgggaccggacttatgtttgccctaatattaccttcacttggtgtctgcacttgtcttctttttcatctcactttgtagatcgccggccacccgcatcggctgtccctgtcgtctctccacttctcttctcgcacctcgccatctccgactcccttgcccagcttcagcgcccttaataaggtgggactcaatctaagtaaaatttagggaaattagtgttatctaaacttggatattcaattcaaacccaaaagaaatttaaggaaattttgtttaagctgattcattccgtttgtcgttttggcttgtgctctgcttaggtttttctcaaggcgtggaaagggaatttgttgttgaaagagttgaactttcgttatgaagtaatggctcacaggttccttcgagatgttgaggccgatgcttgggaacgatccgatttccccataatctgcgagtttcgtgattgtccttgctggagcagaatagatttctttaagatgatttagatttatgccaatatctgttttatcttttatatagttatgtaatttttactaatgttgttggttacataattcttgaaatgttttatcttttatatagttatgtaatttttactaatgttgttggttacataattcttgaaatgcagacaaaagcaaattatgacaaggagtgcaagatttgtacatgaccattcacagtttttagatagagaccgggtcgggatggaagatgtaagaaatcggagatttgccaaacttgcagtaaagtgaaaaatgtttgtcaagtttgccttttggatttggagtatggtttactagttcaagtttgagatactgcagtttctattaattctaatgaggccctacccaagagtgatgtaaatagagagttttttgcttaagagcacgatcgcaaggtttgtttaaatttacttttatttgattgcagtaaacaacaatattgaaactaagaaagaaatatgtagtaatttgcacacttgatatctattttcttttttcttcgttttactttttaataatggttttactaagcactatattattctagaagatttgactcctgaggagatcatctggattgttcctatttatttatgttttgatgagaggattaagctgattaatgcaatctctttatttgattgcagtaaacaacaatgttgaaactaagaaagaaatatgtagtaatttgcacacttatgatatccattttcttttttcttctttttactttttaatcatggttttcctaagcactatattattccagaagatttgactcctgaggagatcatatggattgttcctatttatttatgttttgataagaggattaagctgattaatgcaatatctttgataattgtagcttgaagagagaaacaaactatatgtgtactatttagtctgttttattgtttgtggtatctttgttggaatcgctaagcatgaggatgcaaccacttatgtaccttttttctttaactgttgtttggttcttaaatgcaggctagagctagtttagattatgaatattcttatgggaaggtgcaagcaaatgacaccattttgaagcttcaaagaacatcaccttattacaagaggaattgagcccatgtctgcagtttctacattcgtggtgaatgcactaggggtgttgagtgtcctcacaggcacgagatgccgataactggggatgcttgtggttttcctttatagccaaaagagagatagagttggaaaagaaaataatttttatgaggatgcacgcaatgacttagtagtcccaaaattttctatttacgtgtactatttctttattgtgtatttgtactttgataaatacttgccctttcaagttgagggctaagcatgttaactaatggtgattgaggtagactaaagaagctgttaaaaatggcattgaagtctcaaatttgttttatttagaattgtgttaatgagactataatatgatttggtatctttatgtattgtttttttgtttactatttttcttttccaaattttcacaactttacccttgtttactttagggaaaaaaacaaaaaaattctaaaaagggtaaaatattacaatattactatgggtcggcccaatcaacatttatacagcccacattaaaaa

SEQ ID NO: 15827 - DNA, 6702 bp, Cannabis sativa
  modified_base (344)..(348): a, c, t, g, unknown or other
  modified_base (818)..(818): a, c, t, g, unknown or other
ttattttagatatatttcaattataaccgatttgatgaggtattatgttttatgatgtattttgttgtgcaactatttatgtttcagtattttaggaattgatttattatttgttcttaattgtaatcggtttgagttattacgtgttacttgtttgtattcattatgttatataactggttctattctagttgtaaccggtttgagttatttcgtgttatttgcttttattcattataatactgttgtagaaccggttttattttaattataactggtttgaattatttgatgttatttatatttatttattatgttacaaaaccggttatatttcaattatnnnnngtttgagttattagtttttattcatataaccgattatatttttagttatatatgagacatttactttggtgacttttccagcaacattgacttttccggcgatatggacttttttattgacttttccagtaactttttcggcaacttcccgacgactttttcaacgaccgtgatttttccggtgctggtgacttttttggtaccgacgactttttcggcaaaacttattgttgttttacaaatataggatttctactttttttaacaaaaatatggcataaaaaaaattcatataaatgtaaaaaaatataaaaatccataaccctatagtgttatttatttatgccataaaaaagtaaattataccctcaattcccatattaatgaaaatttccctattgtaaatgtaactttaagtatttaatccgccagaagaaaaaacatgtagtatataagtgtatgaaatttanaacatcaagtatttatgccgcaaatactctatgtttgataggatttaacataaaagtagtgacggaagtaatgaaaatataacttaaggtatttaatccgtcgaaaacaaacctgtggtatttaagtgtataaaaccaaaatcttattatatttatgccgcaaatattcctactcacaataatatcattgttgattacaaatactaccattcaaaaaaaaaaaaaaaaagaccatgtagtctactccaactccattaattatcattttttaatagtagttgcacaacttacaattttaaaactctattgccaatataaaataaattaataatcataataaaaacaatgtatctaaaagagatgaatttattatatatataccccaatacctcatgatatgtgccaaaaccaagagtcattttataatgagaaatttccgcataagcattaatacataaagtgatggatcaaaagttttgtatgcctattgatgtacgtacgtaaagaaactagaataggaaatggcagagactttcttgacccctgttattgaaaaattacttgatctactaattactcaaccaatgattttgttgaaaggagtgcgcaaagaagtgaagagcttaaaagatgagctgaagatcattcagcctttcctaattgatgcagaaaagaaactttccaaaggagaacttggcgatgctgcaaaagaatggctcaaacagctgaaggaggtggctgaacgcgtagaagatgttgttgacgagtacctttaccattttgccaaacatgatcatcactacagtgaccgaggtttcctcacttccatccgaagagctggtgggtatgttagatccctcaaactacgccacgacttagcttctcagatccaagacattaacaagtctttgcaaaaagtcaaggagagaggtcaaagttatggtttgaggtcctccgatgaaggatcaagtagtagtaggagcataaatactaatgcatctgtcattgaccctcgattgggttctctgttcgttaacaaaaatgagcttgtgggaatggattcaatctccaccgaacttgtaaagagtttgattgatggcccgtcgacccgttcggtgatttcacttgtaggagaaggtggaattggtaagactactcttgctagaaatgtttacaatgctgagtacgtgagacaacactttgaatgctttgcttggataaccgtgtctcaatcgtacgacttggagaaggtcctatacaccatgaaaaatcagatatgtccaatgaaagaagagcatatagggagtatggaaggagtaatggatcttttgcgaaaacatttgcaaacaatgaggtatgtgattgtttttgatgatgtatgggattcagagttttggagctgtattaaacatgctctacctagttataacaataagggtgatagggtcattataacaactcgtaatactagaattgcgaatgatgctaatgatactccttttgatcaagttcaattcctcaaaacctggcctcctgagttggcttgggagttattttgtagaaaagcgttccgttttgagtttgaagcaagctgtccacaagagttagagcaattgtctcgtgagattataagcaaatgccatggtttgccacttgtcattgcggctgtagcaggtttattttccaaaaagcaaaagtcaaaattggaatgggaaagagtgcttgataatctcaattatgagttcgaaaaaaatcccaagcttacaaatgtgtcaaagattctatcgtttagttatgatgatctaccgtatcaccttaaatcttgttttttatactttggtatttttccacaagatagtattattttcgagaataaattatataggctttggattgctgaagattttattaaatcaaggagagacaagacagaagaacaagttgctgaagaatacttaactgagctaatccatagaaatttggtttcctttgtggttgaaaatgggattaaaaggcgttgtcgagttcacgatttgatacatgatgttatcttaaccaaatacgaagagttgtgtttctgccaaataatcaatcaaagcaagttaagattcaaaggagattgtcttcgcctagcaatcaataacacgacgaaaggtgttctaaatcttattggagattattccaagactcgttccattttctttttcgacatcgatgatgaattgacggaatcattcataattaccttgtttcgaaagtgtaaatttttgaaggtattggattttgaagatgctcctcttgataagcttcctaaagaagttgggaatttgttcaatttgaagtacttaaatttgagaatgacaaatgtgaagcttattccaaaatccattggtaatttacaaaatctacaaaccttgaatgtcacaaagtcttttgtacaagaccttccaattgagattaacaagcttcgaaatctgcgccaccttctaggtcgcactataattagttatgaaattgattacagatttgatttagatattggtgtgaaaatacacaaagggattggatgtttagaggagttacaaacactttcatccgtgagagtatcttctagcagagttgatttagtgaaagagctggagaaattgagaaaattgaagattttaggcatgaagcatgtgactgcaggaattgctgaaaccctttgtgtatcccttgagaaaatgagccaactagaaaccttatacttacagaccattaatgaggatgaaattttagatttgaaatctctttcatctcctccacctttcctacgttatcttgcattgatgtgtcaactacaacaactgcctcattggatttcaaagcttcaacacttacaaggattggaattatggtcttcaaggttaaccaatgaccctttaaaacacctcaaacatttgcccaatttagctttcttgaagatggttgaggcatacattggagatggattgcattttgaggaaggtggctttaaaaggctaaaggagcttatattgcataacatggaagatataaatgtgatgaaaattgagacgggtgcactacctttgcttgagaagttagcttttggaccctttccattaatgagagagatgccttcagatattaagctcctaacaaacctgaaatctcttgaaattagggacatgtcaagggaatttgtggttgatctacaaccaaattgccctggttattggaaaattgatcatgttccttctgtcatcttttggtataaattcaaggggaatatttatgaaacttataagttgggtaaatcaaatttgttggaacgtcttcaagctagctaatcgattaatagtaattttgtctatagccactagccaggtacaacttaatttctcaagttaaaaaattatcaagaaatatattttatataggacacgattttgtcccgtaatagtaattaagggtatacaatccgtaattgtactgtagtcattggattgggaagttgcatgatctgagggttggggctaacataggggtagttaggcttaaaaaacttggtaattgtttgattttgtattaaaatattaatatttttaaaaagtgaatagtgattgatgtactgacaatttattttttcaatcatcatttcactttccttctccttcgtcgttttactttcagagtcgtggtggttcgtttattttagggcaagtgacgatttttctattataggggataaagtcatttcaagattgagggagaaaactcaagtagttaaagaatatttggtgtacttcgtcttttgtgtctccagctctgtctccgaccgtcatcgttggtttgtacaagtaagtgtctatgttcattcaaaaattcttattcttttacatgttattcgttcttcactctgggtatgagaaaatttgtctaccatggttaaaaaagagtaaaattttggtaaaaaaaagtgatgttattcaatctgggtatgtgcattactactatttttttgttccattttttatttattaagtagttttattcttttttacatgccttaaatcttctttgtcatcaagttttcatttacagattgctataaatcgaaggtacatttactattctccatttacatgtacggagtactatgaaatactagtttataaatatcactattttgtgtcaaaagcttcatttgatccatgtgtttagccgttttgtgttttttttttattatccaagtgttttgcttttgaatttaatacccttgctttgaaacatttttaacaaaaaataataataataataatgaaggaaagaaaaacaatgcaagggtcatgactgttatggcttgagtttgctaaaaatactatggttataaattttttgatttggttgttagtttaaatatgatgtgttttctgtttattatttatttttggtagtgattgttgtactttattgacaatatttggtttggacttttctgtttttatattttggttttgaataatttcaaggtttaagactggacataaaattactaaatttataagtaacaaaattgataaaactatggtagttttgatgctgtgctacgaataaatcatagtgaagttagttgtaatgtatgttgatttgattattgttctttgatttacttcaaaatagcttttgtaatttggtaattgatttcatcacacaaaattgtaagaacttttatcttagctaaatctcaaaagaacaagggatatataatatgtttcatcttagctaaatacaacatgtttatattacttgacatatagatttttgctcttattttggttcataagttttgtgtttttctctcaactgaacttaaccactagttattgactttggtattgattctctcgtcctgttcataaagtacaaattaactgaatgtcttcattcgacttctgttcataacttaaaaatcttatagagcttctgtctatgttttgttgttgaccaagagtaagaatgcaactgtcatggttgattaagttctttcttgtagttgattaatccatcaagtaattatatttaaaatgtttaaaaaacatctattcttaacttattaaaacagaatttgttttatcatacctcaaagggagcagaatttaactattctattttattattatttgatttcgttgacaatacaaaatgacttaagcccatctaattctcttctaattgacattgttttgtcttatattttattgtccttttgatttccaacaatagttgggggcaactgtttttccccaacaataacttacatttagtgtttacattgtaattcattgatttacttacttaggctactttgtagtagagtgctaatagatcctatttcattgacctcttttgtttgtttttgttttgattctttggagtagttgattaatgtgtaaaaatatacatttattgtgtaaaaaatgttagaatatcttaagtcataattagtattttcattattttagttggatatatttttaagattgaaaatatttaattgtgacttaatttattttattgtgtagaaagtaagcttgatttaaagaagaattggaaggcacgttacttttctcaagtttactacccaaagttctatatactattttggatttgtcaatatttccattgggccaagtttaattttcacactttgcaagcccaataattaattgtccatgtaattcgactcaattactgtccaagaatgaagaggaagcgtaaaagcttttggaaaatttacacccattactgcctttatcatatttttttcatttgtactgtcgcacggtcattttaacttttatactgttttttatttttaaat

SEQ ID NO: 15828 - DNA, 5915 bp, Cannabis sativa
ctgaacagtagtgagctcgagctaatgaagattgtacatattgagacagttagagctagagtgttcaatcttcgagacaacatgcttattttgatagtcgttgggcgacaacttttgtaattatgatattttgtaaaacaattgtaactttaaaacgggatctcatattatagaaattattatatatatatttaaaattaaagtttaattatgaaaatttaaattattcacgtttttcaataataaacccgttaattagcaatgaagtgcacaataaattaaaatcacaataacgtacttaatctagtaggacattacaggtttgtcatcaaatttattttgaatttccttagagttaaaagctactttaacctctgacattgtgagggtgtctttgccataaagaattgtatcaataaagtgttcatgcaatataagtaaagaactccgtaggattatggcctagtcctcttcttctaccttcacaccaatattgatcaagtctagaacaatcttgtaaagtcatttaggtgtctcctaaattccttgctatcttccattcttaaagtgtacaatttcttcttcaagtacaacttattggcaaggatttcttcatgtagatagtgccagcttatcccacggactaagagcctttttttcatatgcaacttctctcagaacttcatcttcaagactgaggagaattgcagaatgtgcattggtttcgatctccacctttttcttctgttcttcaatggctggaagagcttctacaatgattgcttctaagatccccatggtgcaccaacactgcttttatcttgattctttggaggctggaatcattagccccagtaaatttgtcaacttcatactttgttgcagctatcagatttgattacttaactcaactcataattaatcaaagcataaatttacttcaataagctagctgtggtagttagcattcgagagtcaactgattttgaagagaacaaatgtatgacaagatgagtcattattagtcattaatatataattttaaattatatatatgttttttttttttttctttcccacaattttgaaattatatgtttgtttacaatttaaaaatttccaattattttagttggtctgtttttcagttggtagtaatcattttcagtttatttccatcaattgccaatatacatatacatatgtcactatagttttggcacgaagaaaagattcttggatcaataataaatgttgtggcttaaacttaaactattataactgtggacttcgaacgctgaaattggcaagtttctctatatttctaatgaattaattgtctatatactacatgatcatgtgatttgattctacaacaagtttattttaaattaaaaatactatatatatattgaagtgtgagtgtatacatagacttctagtctactatcttgagcaagagaagatatatgcttaaatcatacgtataataattaatacacatgaaaagaggactttgacaatggtccagtgctaattttaagtagtatgaaaagaggactattcatgataaatttattaaaattaaaaactgtgcaactcatcaaccccttatttctttattcaaaatccacgttacatcttcatcatgctacttaagttattgactcaattcaaaatcaccaacaaacacaaagattccagtttgttttgtttcctattctttaagtatttgctataaagagacagtttttgaccagttctacttgataacaagaaaaaagctataacaataatagatcatagataaagaacttggagaatattttgaaaaatgataaatcattaatatttgttaaccatcttctaagtgatgtcacttaatgtaactaacaaattacttagagtgttctgttagttagttagcttggtagtgttttgttactttcttttgtttcttggttgtacttggtctcggtttataaataaaagacatgtgtttactcaatcgagtaatgcattcattcataactctgtttcttctccatttctcttctttgcttactagcacaacttaaattctcttactttacatggtatatcattgttttttgactagctttcatggagtcttccacctttgatcctcatgctatgtttcctgttgctactgctaataaaacaagtatttagagtctcttctccaattccctaacaacttccctgactttgaagtttgatcgcaacaactttctcttgttgaagtctcaggttgttcccacggtcattggacatgatctggatcagattttgttctctgatgtatctccccttactactctgatcaccaaaacccccaaccatcaatatgcataatggaaaaagaaagactagctcctcctatcttgacttcgatcgtccatgaccgaaccagttcttgttttcgtagccaatttcacttcatctttcactgtctagcatgcactggagcaacaattcttgagtcaacccaaagctcatcttcttcaactgaaagatcaattctcgcatttgttgaaaaacaatctctcgatctcgaaatatgttgaaaaagctcaatcaattgcgaatgtttgatgattgttggcttacctatgacaaatcaagatctagtgctgtaacttctcaacggtcttggccttaaatttaatctggtcgtgtctaacatcacgtcaagaagtaatcttctctcattcgaagaagttccggccttccttctctcccatgaaacatgtcttcaactttacaatttggtcactgatctctctctcaagatgcaagtgaatcttgcatttgtctcttcaagaagtggtggctatcatcctcaaaatagatttggtcgtggcaataacagtgataacaatcacagccatccagatggtcgaggaactagttctcaattagtctaccaagtgtgccttcgaacgggtcatactgcaactgtgtgccactatcgctttgacaaaaattaggtcacccccaagtatggtaactctaactctcaaattcttttggttgatatgaaccataggctttaacaactactatatccttggaattggagatgatgagtcttggtttgtggatactggtaccacaaaccatttctccttcggcacaaccaacctggctcggccaccacatacaatggtaatgagactattgtagttggcaatggtaagaaattgctcatctctagcattggtcacacaactatttcctccttacctcaaccaattcatttaaattttgttcttaatgtgtcttcaatgactaaaaatctcattagagtctctcaaattaccattgacaatgttatctttcttgaattttataaatcgtgttgttttgacaaggacaaactaacagggactgtgctcctcaaaggagaggcaaagggtggtctttatcaactcgatgatgcttcaagctcctctatctagtgtcacctaacaacatattccaaagactcttgtgagccttacatttgtactttttcattcaaaactgtccattgaatcttgtactattgaagatatcaataaaagaaatattagttctttcctacttcttctagttaagtgttttctatttctaaaagtagtgacattaataaatggcactgcaaactaggccaccttgcctatagcacctcacaaagattccacctaacatatcatatatgggttcattaaaaaccctacaattttgcaaagctagtcaccaaggcaaaattcataaactccctcttcctaattccactagcacggccacacaaccacttgcgctaatacacatggatctttggggtccttcttacatcatatccaaagatggctttaagtattatgtgtattttcttgatgattttagtagaatctattggatatttctcttgtccttaaagacccaagcatttgacatattcatcaaatttaaaagccttgtggagaaacagtttggtctacccataaaaaagtgttcaagcagattggggtggaaaatatcgaccattttcttgttttttactcatcaaggaatcctttttcaacacgcttgtccaagaactagccaacaaaatggtcgtgttaagcgcaaacacagacacattatcaatacatgcgtaactttgttggcccaagtttgtttaggtatggagtattggtggcatgccatgtcttctattgtgtttcctaattatagactcccaacaccaatcatggggaacttgagtccatatgaatgtctattcaagaaacaacttgactaaaatcttttgaaaccatttggatgtaattgttttcctcatctcagaagaccatacaatgctcataaacttaagcttcgatctaaacaatacttgttcttggggtactcatctcagcataaagggtatctttatgagcatccagatggccatgtcataatctcaaggcatgtaacatttaatgaaactcattttcctacaactactctcactgcaacttcatcacaggtacctatatctcaccaattcccttcttctacttttcacacttctaactgcggtacacatacgaatactgatactttacatgtgcacactccacaccatgaaatagctactgagaattttccaccaccctacccaaccaatagctccaactgttaccactcaaattatgagccctccatcaaacacaaaagccacattacccataaatgaccaacctactatcactccaaaaactagtactcagaatccaatatcatctcttaaaattcacacagatgttcaaccctctccctctagatagatgatcaaccctcttacagatgcctcaactatttttcccgcaaatgaccatcctcaaccttcttcagtggcataatcttttccatcaacaacaattgatcagcaaccaatactctctgaacctgtacaagatacatgtactgttgttcctatttgaactcacggaatctggataagatctcaaaattgtattgttaaaccaaaagtttatctggctacaaagttacctcttcttgaagctcttattccacaagaaacaatgtgtacttcagcagctattataaatccttagtggttcaagtttatgcaacattaatttgctactttgaagaaggtagacacatggacttttgtgccctacactcctggaatgatagtaattgggaacaaatggttacataaggtgaaacttaatgttgatggcagcttggatggaatcaaatctcatcttgttgctaaaggttacttgcaaacacttggcatagactatgaagaaatattctctccagttgtcgagcctgcaactgtaagagttatacttactctagatgtgtcccttaacttaactggatagttaaactgttagatgtaagtaatgcttttctaaattgaacatttataagagttatacttactctcaaagacactctcattcaatgggaattttctgcatcaaaatacctctctattcaattgtagaaggtgaacctcctaaagataaaacattgtacatagttgcacattgggagcactgtaatatcttactctaaccagacatgatgttgtattcatcatcaacaagctcagtcagttcacccatggtcccacttctagatatgggaggcttgcaaatgattaatgaggtatctctaagaaacaattcagtgaatgaggtatcttaaaggacaattcactgtggtctttatttctctcgagtttctaacttaactcttgaaggctattttgatgcagattgggcatcatagaagaagtattagtggctatgtaatgttctttggaggcaatcttgtctcatggtctgtaaagaaacaataactagtgacatgatctagctcagaaa

SEQ ID NO: 15829 - DNA, 4616 bp, Cannabis sativa
ttgttgttgttgttgactaataatcttctgatgagacatcttctgatgagacacattagacccacttctttttcttcttcttcttcttcttcttcttccatttttaccaatatcatcaaaaccttgttcttccaaaaacccatctttcttttcagcctgagatagcttcttggtatttttgatattgacattattattattattattattggtattattagtattgttgttaaacccttttgagggtacatagcaagaacacactaaagaggtgcacttgttttgagccgtggccgccaggagtaacaattgtacggacaaatttacaataatatacaaaaaaaaaaaaaaaaaaagacaaataaaaatgaaagctttatgatatgttttgctcttggctacaacaaaaatcaaactcttgtactaaaatcaccatggcaaagggtttgagatatgagatgggaaatggatcaaaaataagaaagggaaaataaaaatgaaatctttggagaaacaaaagttttagtttatatgtaaatgattgttatgatttgtgttaaaggtttgttttttatttatttttttgggttgggttgggaaaggttgagaataggtaagaggtacaatcatatttcatgccttatctccttccactaaaggtggcttcacttttgcttttttttatttatttatataaagatatatttttaattttttagtttgtttagcactcattgttaattttattaatattattaattaatgtagttaaatgggtgaaaccaaaaaaaggagtgctctttatcttttgactgtttatagaggaaatactcattgttttgcttataatgagggagcctttcaaatgggggcatctagtatttttttttttattattatttataataataataatataatttggtgtactaatttgctttttatggcatgagtttgttacaagtgggaaattgaggagttggcaaattgagaatatttttatgctttggggtggattggattgttccaaaatatgaaatgttttttaagtttaagacacattatgaaatgcagcatcaaattatgtgtactttatctttatgcctttggcttggtcagaatgttggtgtggtttgagaaaaatcaagtactttttatgaatggaatattgccaataattactctaaatgcttacttttattaaaaccatgagcaagggggtcatcatttaggcaactcaaactatctatcatcaaatttgacaaagaatattgtaccacaatacgggttggacagtcttgcatgattcaaattaagtaaattatctacttacttgattgtaaggggaaagtcacctgaaatctaagtaagatggtcgcttcacttaaaattaagataaattttaatttattcagaatttatacttaaaatattttggcaattcatataaatattaatttcatcaaatattattaaataatattattcggtgttattataaaaatattcttaaaaatagagaaagtcgtaagtttaaaattttacttctaattttgccttattatctcttgttaagagagagatcaatttattattgattattgattcttacagtacatgtaggaagaatttttgagtgggttggaaaataaattatgtgtttggtagggaggaaagaaaatggagaaaatagatatagaatggtacattttttcttcaaatgtacaaaattcaggcttttcaaaaataaaaagaagaaaaaatgacaaaataagtatattaaatgtcctaaatacctttcataacaaataaataatatatattttaaaataataatatagtaattttaataaataattaactttacatcattctaactctacttccaataccaaataatatgaaggagacatgttatcctcaaattccacttccatcatactctctacctttcttaaactgtcccccatactaatttccttccctctcaccaaacatattaagttactagttactacaatctagtaaaatatagctttacaatcaaagaaaaatattttacatagatagacatgtagaagaatacatgtacatatactctttagctagccatcttatttttattttttcttactttgattggctgaacaaattatttcaccatcaaattaaaatggttgatccacaatccaacaaatatttatcccttaaaataatatgggacaaaaacatgtggtgatggtagtatatgttaagaatttttttcatcacatattctcaagacttttccacaatgttagttaatttaatctacatacctttgatggagatttcttaaatggtatgtgaaatagtggtggcagaaaataatacacacatacaaatcaaaagtgaaactagccataaattcactctatgtaagaacaaaccggtttttggctaatttttgattgttaaatatgtgtcggtggatatagatagcttatcgaatctattttaatattagtgtaaaattattatgtatggttatttcgacaaatggatatagaataggttatgtttggtaggaaggagggatgagaatgataattgttctcccttgagtgttgtttagtgttaagagtaaagttaaaaggataaaaagtaaaataaatattaaaatgattgttttatcatttttaatataattatatattatttttttgaaggtaaaaaaaacatttaatatgattttttttttgttaattgtcttaaattccttcattgactaaaagttgtgtatttagaagatctccctctatctctccctcttgccaaacaagaaaattcatccattcctctattcctcttcctccttccttctctccactccaccaaacataatgtaattatcctatcttaggctatgtttggtaagaatgatggaaagtagaatggaaggaaatgatagagaatatgaaaggtggagataaaagtagctctactctatattatttagcactagaagtgaaattaaaataataaaacataaattaattactaaaattacaacactatcattcctaatataattattcattatttttttaagggcaaatataatattgtatatatatatgtctttttttttttttttcttttctaaatccattcattttaagaaggattaaaacttgagttaggactttccctccacctttccattactttttgccaaacaaataatttcacctatcctccatctctttccttccactcctcattcattccaccattttaaccatagtgttaactttaggctttttattttatcagatattgagctgatttgagaaagaaaaggacccctttttcttgtggtgaaatgaaaattcacttttttttttggtccgtattgttagggcacgcgggctctactcctgactgaactctgctatttgattattatgacaaggaaagttgaacaatggtgtgttgattggttagatatttagacatgaaatgattccagctgtctggaaggaagtaaatggtgaaaaaagaaaatttaaaagacacaacacaaatatttatgtcccttctctctgcttgttctccacctaagagagacaaaaagttttttatgtgggcccaacaacaactcctcctccttcaatttgctacctcagtagacaagaccaaatcactcttgttagtatagtatatcatattaatcaaaagaatgaaagaagagaaggaaagtaataaagctaagctgtttgtttaaatggaaaataaaataatataaaattaccttttactatatacagatttaagtatatagtgatttgaatggaacttgttatatacaatgatgaggttttcttcagttccttggtagtgttggttggatttggatatggcacttacatatatatgggatactgttttacaattatatatataaacaattgaggccttcatgcagcaaccaaagttaagattaagaatgttttctacaaaaatgtgtctcgaatgacgcgagctaatactctagaagttaatcggttgataacttccggaagtattgtggtggagatgcctggcaacaccgggagaagctcttgaaaaacccgaggaatattcaaactctgttgacatccccaccccaacacaaacaggataattagtattgagatggaacttcataagttaaatgatgtctgaaagtgatatataagttttgattaatttacctcatttgatggttttggtattgaagttccagcagttaaaaactcaacaactttttggacattgtttaatataactttgtcttcttcggttactgttggtagaagccctgccggtttgaatggtccgaaagtaggggccatactgaagataggggtagtatttccaagtccaaggagtgccattgtacgcaccaactgttcccttgtgactgcatcgatgccctttacgatctatttcaatatcaaaggtaatggtcaaacttcagagaaaattcacaatctatttgtgtattgaagtaaagctcaaacttggagaaagtatgcattaattcagtgctggatgaaaaccaagtgaaaaaatctgtgcatgcagaaaaagtg

SEQ ID NO: 15830 - DNA, 8647 bp, Cannabis sativa
ttttcttaagtagcagttgagaaaatggccaaatgggatggttaagattgtgatttggtttgataaagcattactattgacactagataaaaaatgtggaacatcatattgaattgaggagctatgtaccttctatcctaatgtatctaatcaatgatttcgagtacaaatgtgattgttgtgcatttaaaagatgacaattataagaacaatgcagcttcctttatttggaatatttaaattgaatggtaggatcaggatccaggaagctgcactacataacacgttcaacataattaccaattacagcactacgcgtgttccaaaaccaataaggtcaatacttactgtacatctcctaacactggaacattcctcgcaatttcatcttttaactacaaccacacacctttcattgtctaaatcttcattgtgcttttcgataatgatatcagttggtaagatatatcatttcctttttgaaaatatccaatttcaatgcaataattgttgtaaaaacttagtagccgttgacaggtaatgcaaaaatgccagtgacagaaaacaagaacaagaacaaaaatcacggatttagtgtattagagaagaactttatgttcatgagtcactcttctttagttgtttaatatctcaattaagttaaggtaattattatatacactttctttttattaatataattaattactttcgaaatttatgtgtggtgtactttgtcattaatatgaactatatatgaattgggcatgtcattcatattttgaggagatttttgttgttggttgatattgacaaactagtgctatttaataagtgtttatttattcaaattgtttttgttataccatctccaatattcttccagaaaaaaataccatctccaataaatcgtataagattaggctaaaacaatgctaatgctacccaagattttgtaattatgattggtgcaatataacttaaaagatcaacaaaaagtataaatatattaagaagtggtaaagaagctaaataaaaaatatatatttattgtggtgtaaaataagattgctgaagccctatttagccaatgagcaactgtttatggctattgtggagaaatattttttgaaggaaatatattaattatatttatatatgaaaaatcggtgatataaagtagggtctttcaaaagtggaacaagtgttaaaagtttgtttaattaattcaatattaatgaacctagaaaagagagttgagagttggaacgaacttctaactagaattctcaaaattttttgggaattcttgactagtgctgagctaactataatataaagatctttttattaataagatccaaaagatttatcatatgatatattttaatttaaatttaatataacttttaatatatgctaaatttaaaaaatactttatatcaccattaaagtattgttttatcaaatgtgttaaaatataacaataaccactttcacaccacttcactaaaattactctgattgcagttgtttggtgaagatgaactttaactcaatatcttaattaatataaatactgttttttttttttaatttccctgctctttgatttcttattaataaataaaatataaatcaaattatatttaacttggttgttcgtgattcattcatttcataagaggagtcagataacaagaaccatcttggaaggatccagtatcccaatgacttcgtgtccgggtcgattaacttttccacgacaaaggtaagtctatcaccgtgccccagagtgagagactccagaggcaaattgtttttgacagatttttgacatgtcgaggtaacctctaataacaaggacaacttttacaataggttgcctcattcattcatacatcaggtaaaatagatttccacaagtataaacatggggatccaatccataaacctactactttgacacaagacgtgtgagaaatgacaatatactcatggtaatgcagggcccttaagcctatgattacgaaattagtctcattttagtcatgtaattgctctattagtgagcataatagggattattctgacccataacttggttaggactaatcctcgcatataaaatgatataatttctagttgacaaatcaaaatatgctgccaaaatcgttacagacctttattgttgtaagatttcgatttattgttgtaaaatctacacattcatcattttgctttttcttttacatttattctgtattttgagttgaccgaaactttatagttcactcaatatatcttacttattattttggaacttaagattaaagaacaataaataaattttaaaaaattgctggagaaagaaaaatttaaaatctaaatctttccaactattattttatttgcatttaactttctaaatttaaattttagcagtaaaacccttttaactactcaaccgtctgtcacatttatattagtacacttaatattattattctaattttttttataaaattaaataaatttacaaaataaaataaaattataaaaaacattatataattttaaattatttattataatttttaaatgaggccatttttttttaaccaaaaatttaaattttattaaattaaatcaactattaagatagcttctaaaccggacaacaacggaagtacaaccaggaatataactagaagaacaagctaaaaagttagccgtctggttctcggaccatttaataaaattaattgaaataagaaacaaaaaagagaattgtataatttttttataaatatgatataatattaagtgtactaatatataatgtaaatatattatgtatacacatggtgaatctaataaatgttagattaaattttgtcaaggagggagtggaacgatagttgtgatggtttagtgaaaaaaaaatcttttaaaaaatagtgtcacatttatgaagaaaagaaaaaaataaaattacacagtatcctcaactttgtggggacattttgaatttatataaacagaacgaacaaatatctgattttccctcgaactttctcgggaaaatggctccgttcgctttagcggcactgcttcgccccactcactccaggttactcatctatatctttcagcttcgaaagtacgttttcctgttatgtgccttcccttactttgggcgcgtctgtgttgtgtttggaggcagggaaagcggtggaaaatgcttataaattttcatctattcttgtttgatcttatggtttatacttctaataaaatattactattcaataagaatttgataatggtacattggtttctgtttcatacaggacgtagtttctttaagggtttttattttttttatttttttatggatagatcatagaagagttggttcgtttaatttgtagcattttgtacagattttcagctcgcatatccaattgttaaattcatcttaaattctagttctatgtatttctatggatttgtattgactttgtatattgagaatctattcttgtttggtgactaagtttaatagttacttcattgggttgtttaaattgagttcctgggtttgcctaatatggcgaaataagctcttgtggttttgttttgtttcagggctcttttggtgttaatcctttcattgtattcctatgtaccaccgaaatgtgatctgggtgctcttgacttaatccatgtaaaatgaaaggagaggacactgttagggaactcatatatgcaatcgaatcaggtgaaggaaactaaaattgaaatatgcctttgcaataaaagggttgttcagtaaaaaaaaaaaaaaagttagtgatttacacatgatcagaaaaacaagtagttgaaagtgaactgttttaagtatgcaataagtttagattcagttagataatctggtaattcctttggcaggttttctgagggatactcttaagaaaatatggcagggggcaataagcctctcaggggtgatcaagcttcaatcaaatactgttggaacacagtaaagcagtcaccatctgagcttgctggttttgatcgtgaggaatatgcctcgactctctctaactgtattgataaaagatggggtaaagaatttgactccaaaactcgtgaaatattgagtatgggcgaactcttctcagcagccggccggatatgggattatgccagttgtcctctcacttctttgcaaaatgattcatgtcccaatgacagtggcaataagaatgagcttttctttggtgatttagatagggaaggaaacagtgtgttacctacttcagcaaggttctctgctgatataaggactgctagtgagactccaaaagtgcaaccaattttagattttatgaaagtaacccaaaagatatcagcttctgaaccttctagtgaaaaccgtacacattcattgttttggaggttactgcagactggtacaaagaagcataatgaaccttggagacaacagggacttgcaagtgttgaaatctcatatgaattggaaaatatatatggatggatgaaacaactctcttttgctggatcaagtaattcaatcaaagtcaatgaatctgaaaacagatatagtaagtatatcactctaggagatattattaactcagcagatggctacatttcaggagatacaactatacctgcaaatgagttgggtggtgcctgtgctgatagtaatgctagttcaagcaaaccttgtaatttatcatcatttaaagatgcaaagtcagacaaatatataagatcctttttgtatgcagattacgtcctcagggatgtccttgaggaagacagtagtatttcaaggactagcttctctaatttaaatgctgactattatacaaactctctagtttctgatagtgttacgcttgaagaatatgggtccatcgctgaggataatcaagtgcttgacaccaaaagaaaagaacctgaaatgttggtcagtaaagattcacttaaggaggtcactacatcagcatctcaaaaaccccatttgacgcttgctaagcaagagcatgcctttgcaggggcatttgctggaatatttgtcagcctttgtcttcatcctgttgatacagttaagactgttgttcagtcttgcagtgcggggcagaagtctgtattctggattggaagatcaattatttctgatagaggtaacttggatttaagaatcaaagatatttaatgttgtttgtgattattcttacaattcttaacagctagattttttttttctctttctttaatatggtaattagtgataactttggaagaaatttgactgtgatatattttcaggtttgactggactttatcgaggaattaccactaatattgcatcttcagctccaatctccgccatctacacattcacttatgaatctgttaaagggtctttgcttccttttttcccaaaagtagtctttctcatgcacgtttcatttttcttttctctttacatttttttttcttttcaaaatctcacccaatttttctgcaggaatactactctcttgcacattgtgtggcaggtgggtgtgcaagcattgctacttcttttgtttttactcctagcgagcgtataaagcagcagatgcaagtaggaactcactacaataactcttggtatgactgttttttatttttttttattttaaaaactaaggaacaggaaagtataacaattgctatgtaagacgattaaggttttctggctatcacatatcaattagtgcttatttagtatgaatttgatttgggtgtgaggttctggtaaatccgaactatacatactatgtatttcatggcttgttctatatggttctgaaaacctcaactcaaattgaaataaatggtagtttagattccatcatgtgttcatagcacttttttctgtacgagttttttttttcttttttttttaattggttatttacaacatttaatggaacttttcttttggcatggagcttaaatgaaacttatgttaaggtgttatttcaatgtttcatgtttcatgtttcatgtcacaggagtgcatttattggaatagttcaaaagggaggtttgcgttctttgtataaggggtggggagctgtactttgcaggaacataccacattcgattataaaggttagatattgctgcatattgaacttgcagtcaagccggctagacaaaaagatggtgcccttcatttgtgttgtgggagaatctgtatcatagtgcctatatcaaactgtcttctttatcacatgtgaatcagagtctctctttgttcctatctgcagttttacacatatgaaagcttgaagcgattgacgttgtcgtcattaccatctggcactcaacccaacacgctacaaacggtttgcatctgtttctctttatgttttagactgctttgtttttcttccttaataaattctgataccagagatgaattttcattcctccagctattttgtggaggactagctggaaccactgctgctttttttacgactccatttgatgtggtaaagacaaggctacaaacacaggtttgtaattcatatattgcaaagtagcttaccatgctacatagatgcaacagttggttaagttcacagttttgggcttgtagaaaacttaattggatctttgctaagaataatttcaactactacttcacgttaattcatttgcttttgatctcttctctgttcttatatggtggatattctgcagattccagggtccacaagccaatacggtagtgtgattcatgccctttatgaaataggaaagcatgaaggtttaaagggcctttacaggtaacttcatcttatgtttcattgagttattatctctcgagagtttatttttatcagaacataaatcgtagcgagttcaatgtactcaagtatactatttttctctaatattgcctagtcctattattaggggactggctccaagattggttatgtatatgtctcaaggagcactcttctttgcatcatatgaatttctcaagaaattgtattacttggagatgccacagcccgaggctgaaagaatacaaaaccaacaaagcatggatgatgacacagttgtactatcatcatcatcatcatcatcttcccaaacatcatcaccagcttcttttccacaaaagctttacagtttgcgttcatcatgatttttgggcatagagataacagaagcggagtgtaaactagtctggcgagaagtttgatttgatttgatttattcatttatttattttcacatggtaattttgcgaatgtttagctgatagataggtcttatttcattgatgttgatttcgtgtgttgatgacacgagcttatggtaatgtgaaaaataattgtaaaataagaaaaagtgcattgtagctttgtacaatttcccatcataaaaaagcaatgcttttgtgttaattcagaacaaattatcactttacagtgactaagggtgcatttgttaagagtgaatctgagtgggccagatttatccccattaaaatcgtttatttttttttcttcaaccacttattcccccttaatacctaccgaataagaggtaaattgtagtgtgaatcattttaaaacatatatataacctttatttttttctcaactattttgctttgtctttagatgcaccttcaatcaaatgcaatatcaagcattaatgtatttcattttttttttaaaaaaaatatgtacttttatctccctctctctctctctcttttttttttttgtcatatattgttacaatttgagataaggtaaatggagttctatttcaaaattaatttaagttgaaaagtataagtataactaatgacttttataagaccacagggtcgaacatgacatttgaaagaatctcacaaataacacacattagttcacaaacggttttttggaccggtggcatttgggctcacaacgaatgacaagtgaatctgatacatgttagaatttgggataagttgaatgaagttctatctcaaaaccaattggcaatgaaaggagtatcccattcatcttatatataatatgacaattatcacacataaataatgtgagactaactctaatatatataattttacataatgttaatgtatattcatttttcttttaaaaaaaaattatctcattaatctctttatgatatatctataataggtggtagagaattgtaactttgtcaaaatcaatagattaatcatattttttatttttatcaattatttttaactaagaacaaataaaaggtggtagagaattgtaactttcgtcaaaatcaatagattaatcatatttttttatttttatcaattatatttaactaagaacaaataaaatatctaattaaattaacagattagatgtaaaaaattaaaattataatcgaagttactaaagatatgtacttaatagcatactcttattgttgcatttcaatatcagtttcacaaattttaatttaataaatgatttagaaaaatgctaaccaattatggggtactagatcagtatggtattgagcacattaaggt

SEQ ID NO: 15831 - DNA, 9190 bp, Cannabis sativa
ccttaattactattatagaatatcgttagccatttgcaagatgacatctcatacatgtattagatattactatcaggtggcatcttaaagtacaaagcaaatcaccaaaatagtggtatattattactggtgggttttaatatcagatctcatacatcataattttacaaataatatgaaaaaccttaatcaattataaaatatcatatcattatattgttttatcttgactaccaaatagtaatctccattatttaacacacacttttcatccaattaattatggtaataatgggctgaatagaataatggagtttttgcaccatatattgaaatttttaacttttttactgtggtgcgatttttttaaaaaaaatactgtgtactagtttttacagttgttctacagttgttttttgttgtcctactattgttttaattgttctattttgttgttttataattattttataaaaagacagtatttttataaaaattccgtgtcacaataaaattataaattttttgctagtatttttttttttgtaaaaactcctacaataataagagtataggatgggcccaaaaaggttgtaaagcccaacccatcataaacttgaaagttttcacttttcacaaactcaatgctgttggtagtaagatagtagttggaactttgcagggttttagtacaaaaatttatgatcccaaatccaaaagggcaacaaaaaataattccaaaaaccttttgagatttgatagaaagagaagaaacccaaatcaatttaacatttttcttcttcatctcctcattactacttcctctcctcaatttgtaagtaaaaattcaaactttatctcccattttgctattccatgcttagatttgtctaaaagtttaagcttttcttcctcattttttcagaatataatggcaaccacagcagcaacaacagcagcagcaagtggagcaatgcttcgaaaagccacattcaaaggagctgcatggtctaagctttcaagttcttctcacatttcatcgttttcttctcgttcatttacttcctcttctcttaaatttgataagaataaggctaaggaatcttctgctattaaggctatgtcacaaacaaacaatacccatgtctctggtttgcctattaatctcaaaggtttcaccttttctctcttttctttatcaatgtcattttcttgtaattgggtctcaatgaaatttaataatgtgacatttttgctaatatgataagtgggttttgttttgtttaggtaagagagcttttattgctggtgttgctgatgataatggttatggttgggctattgcaaaggctcttgctgctgctggtgctgaaattcttgtgggaacttgggtgcctgtgagtactcaaatctttgttaatttctggggtttttgtttaaattctttttcagatttgggaaatggtatgtgtgtggttaatgaataagcaattttgttgtgtaggccttgaacatttttgaatccagccttagaagagggaaatttgatgagtctcgagtgtaagatgttacaccagtttttttgtaccaattttatgtgaaagtatatcatatttaatagaacttcttaggtgggacatcacttttgttcctatagtagtttcttcgggcctttttcggcacctagagaaattatattttaatttttattatatgacagtgtacactatagttgcatataaaatataacagacacgcgtgcaactgactatttgaatcctgttttcggcacggcaccttaaattattcataattttatggaaatgaatagaatgcttactaaaattataatatactctagatgctctggagaaatttcctataattatatatatgtgtatgtgaaatgagttgtgagagatatgatgtttcaggttgccagatggttctttaatggagataactaaagtatatcctttggatgcagtttttgacaaccttgaggatgtacctgaagatgtatgtaatctcatactataaacagttaatgtaataataacaaatatgaaaattggaaaaactatatgctaaaaaattaatcttcttttcgtgttgatgatgcagattaagacgaacaagcgttatgcagggtctagtaagtggacagttcaggtatacattagcaacatcaaagagccaaagttttgacggagtacattatagttatagtttgcattctgttcgttttttcaggaaattctgaatagttttaggtgccgagaatatgattcaaatactttagttggaaattatttttctcggtaacttgcaggatgcctactataactagaatatagtttctctagataccgatgatagggtcaaaagtgatactcacacctaagaaattctctctctctatatatgttcttctgaaaatgtgtaataatttttatgcttgtttgaaatactttgcaggaagttgctgagtctgtaaagaatgattttggcagtattgatattcttgttcactctcttgccaatggaccagaagtaatacttactcatcttgttgtatttttatgcataattttcttgggggagcttaataatttggtaatttcatattaggtaacaaaacctctgctggagacctctaggaacggttatcttgcagcattatctgcgtcgagttactcctatatttcgcttctcaagcatttcgtcccaataataaatccaggcatgtttcgttgttttgttgagccaaattcgcagttcatgttgttagtatgcttgaaatttcggttttgacttttgtaagtaaaatttgttgtgttacaggtggttcttcgctttcacttacctatattgcttccgagaagataattcccgggtaatttttcatccattgctcacctcactttgatgcaagtgttattatattttcacttgatcacttttagtgcaatattgaaattcggagtttcgtatttagatatggtggaggtatgagctctgcaaaagctgctcttgagagcgatactcgggtgtgctctcttatcttttgtgttaaaatgcttgtttctgattagttatattcgttgctaatacatatgtcgattcgtttaggtgcttgcttttgaagcgggtagaaaacaccgagttagagtcaacacgatctcggctggtactttatcactcttttttcataagacaatttttgtgctttgtattttgtgattgaataaataggaactttttcctcttcactttggctgaaaaaaatcatgcacctagattattactaaatgttaaatatttttctcgaaggactttcgttaaataattagctattttacctctcgaattatgaccactatcatattttacacctcgaatttttattattgtcaaaccgtgaccttttaataaaaggtagcatgatgatttgacaatggtaaaagttcggagggcaaaatatgatagtagtcatacttcgaggtaaaattgctaattatttaatctaacattcaaagttgagggaaatatttaacgtcgcttattagtgacttaattctttataattcgtctaatataatgctataacaaatgaacctgatattgttgtgtttgaagaactatacaaaccgcaaaactaaaagaactttgctcgtttcgttcgtgttttcctcagggccattgagaagccgtgctgcaaaagcgatcggtttcatcgacatgatgattgactattcaatagccaatgcaccattgcaaaaagaactctctgcaggtaccttccaaacactttaactcggaaacttttttctcttcctttagcgaattacttactgaattacacaaaatgctttttcgaaacagatgaggttggaaacacggccgcgttcttggcatcgccattggcttctgccatcaccgggactgttatttacgtcgacaacggtcttcacgcaatgggtgtgggagttgatagtccaatatttaaagatcttaatattcccaaagatgagaaccattaagaacaaatatgtcttaggttgagttgagttttaataaacggtttagttaaaacacttttgacatttttggtatcttgtgagacttggtattattagtattcttgttttgttttgttttgttttgttggaattattattattattttatgagtaagattttcttgtactattaaacttttcatgaatttgaggagagaaaaataaggatccaagtatatatattttttttttctcaaaatttacatcacacaccttatatagaaaataattaacagaaatattaacataccaaaatattcaaaaaaaataaaaaaataataacattaaaaataacaaaaatatccaaaaataataaaatattcattccagattgtctcaataatacacctttcagtctaacttgatatacttccaaggctcttggagtttcttgttaacacaaaattattcagtaacaaattacataattcaattctttttcttttattttaaattaattattttttaaattaaaattttaatttaataatattattataaattgaaatacaaaaccatattagagaagggaaggctgtaaaattttcacataatatttcagtgtgggataccaaacatgatatttgaaaaaagtatgcttaccaaattaaattgaaaaagtatccataccatacaaaatgttcatcaagaattatttagagttttttcttattaaatattaaattatacatattttaatttaataattattacaaaaatagttaattattcacaaacaataaaacaatagcaatgctccaatgtccatgttgctaggctctttcttctaggattgttcattaaattgttcatataaattatctgcatcgcacgatatcgtacaaaaaatgtggtttaaaatcttttacaatgtggttatggtttgtattttcgtcaaactgcacgatgcggtgcagtttgtgattttaaatttaatagtgacggttaatatttatatattacaaagttattaatttttatttttttaaatatatgtaatcaaatatatgaacaatatatttataatcaaatatatatataatatattacatattttttttaaggataattcaatataaaaatttaaatatcagtatatatgtaatcggagtaaaaaatttctatacatacatttttttttgtattgttaaaacatataaaattgatttttgattttttattgtaatgtttgataataacaagagtataaaccactcaaaccgcaacacatcacaccatatttttacaatgtagttttgtggttttgatcatgctaagaaaataaaaaaataatcacatatgtaatttgatttgaacaaataagttaccacccatactatccacactgcgcgcccacgaacacctagtttcttgtaatttgaataaccttgtaaaattactattttcacattataaaaacaccaatttattagtagaaatagatatcgagttacaaataatcttttatagaaatggtaatcatagaattttattaatgtgaggggaaattattaatgtgtattatgtgagtatcaaatatttaacaaaaaaaaaactcttcacaaaaagctatcaagaatttaagcatctcaaactatgaaaatatacaagagaagaaaatatcacataaactagtgttcattcatccaaattagacaatacacaacaagtttgttatagttaaaaaataactcaatatggaagcaccctaattaagataatatctcataattaagtttgttatgtaaagcctaatctagtctttcacaacagttacaaatggttgattctgcattgctgcattgtactctttctcagagcatactctcacaacagttgagctaatttgttctgcaaccgccaccttcctattcctcgagatgtttcttatcggtgaagccacccgggcaactgggacacctccccggtgtggcatcagctcctctccaaccgccactatgcccttcattagctgcaattacacaacttgttgtaactattttagttatgagaggtaagcaactaacttaacctctaaaacccgagtaccaactgtcataactaacttaacactacgtattatgacaaacatgaacgaaaaatgagtatctagaatttaaaatgtgacataatttaatgtactttaaatttaggacaacattcattatgatatgtttgattgagatttcttaagcgtttttgtgaaggttcctagttctttgtctaatcaaaaactttcactaagattggttacttaggtgacgtttggttagagataataaaatagagtaaaatagaaagaaaacaatttttattacatttcttattctagctatggttttattccttccaaccaaacttcacatgatggaatgtttgttatgtaagtttgagttgtaaggagtaaacttaaaagttatataaaacccgactgttgaaggggtaacattactaccattttagttttaaaaagtagaatccacttagaaacacaaatcattatttggttattaaatttaatttaatttgatattctcattcacacaaagtctaaacctcatactaaacgcccctttaatgactcaagttagttagttagttagttttcagttataactaacttcttccaaagattcaagaaaccattaagattaatcaacatagatggctagttctaggctcaagtgttcattgaaagaaatgaaggtaatacaatcatttcattgtgaaaattcaactaaggctcttccttgccttggagtaggactaatcacattgattgaatccaaaccaagtaatcggttttatgaagtatttcaaagtacataaaagcttaaaatcaagacatagaaactatacctcccaatcattgaaatcgagtctgaagataaaagaatggtagctaacatctcttgacgcgattgaatctgcatcgggagagttccttggccctaaagcaacaaaaataagggacaattaaggtggataaacacaacaactaatgactattaaaatctgataaaaagtagagtagacttacaaacgagttggcgactatttttgtcaacagttattccaacacggccatctcttactagaaatgacaaagcaagcaaattctcaactgtttgtggaaatgaatttcggtttagtatcaaactctccttcacaactccaggcttcttcttcaagatgttaaacattgttgagatatcgtcgtgtgtatcggttttctcttctgttccagcatcaaactgatacacatgaacacacaatgcttgaagaccaagaaactcaaatcttaggtgaaatgaaatcaaaacacacatatactatttaagcaaattagttcaaaattgtaccttttcactagttttagtaaaaaaaactaactaattaaacaaaagtaattactaattaaaaacaatgacataaattaacaatacccttctcctaattccttccaaacttttgactcatagttatagagtcaagccatgagtcatagagtcaagccaaacaatgcttgaagactagaaactatagtactcctactgttggagaaaccctcttaggtaatgaactcaaaagtcaaaacagatatagactaaaacaagaaagttacactcttttagtataatactattcatttaagtaagttagttcaaaattgtactttttccactaattttggtatattcatcttttaaaaacaattgacataaattaccaatgcccttctcctaatacatattacacaatttcttccaactaaatttggactaaaacatcatactcagcatagattgacaaccaaaagagcaagacaaaacacttcattaaaagttaaaaatgaaaactttttaccttctctggttgagaagtttctgttggcctagatctttttgtataggttctagggttcctcattgttgcctttaaaaaacacttctccatagctgtactcattggtccaaccctttgagacataacataacataaataagcacattatataaatatatatatatttatataagatagcaaaattaaggatagaaactcaaattatacatatatatatatgaatactcacatggttgtagagccatgggccttcatgaaaatgttggaaacagataaaccaacaccattccaatcaatctcagaagagtttttcccaaaatttctcaacaaataagtaacaaaatcagatgatgtaaaaccaccaacagaatgtgatttagcagatgttgcaagtgtattagcaagacccaacaatgcttcactatctgccacttgttcccttggcttctgaactgaaaacccaccaagaaaataaaaaccccttattttctcagcaaccaaacagataataaagattcaaactttgaacaaaaactgaaacaaaacaaagtactaaccttgtttgaataaagtttctacctcatcaatgatcacattgaatttctttgactgtggttttgtcaactcatctcttttttcttcattaacaatcataaaaatcaatactttataaccaaatatacatagaaacatatatatatgtatgtataaaaatggtagttaccttggattctcttgcagacattgcgatagttgttacaaatttgtcgagtgtgttcggaagtacgatgatgatcgtgatgaaaagattcctttttgggacgtttgagtggtggtttctccatgttttttgggaaaggaatgagattaacatttgaacagagaaagaaagtgattggaaagaaagaagaagagtttgattaatataagaagaagaataagaagagtcattttcccgcctaaactattttttttttatttattattatttaatttaattgctgaagaagtaaatcagttcacaaatattattatttaatttttaatttttttaaattatttttataatatttttaaaattaatgagaattacccatatactatttttttttttcaaatttaccgtttgagtttttaaagtggttgtagcgctagttgcaataggtgtttctatacgattttttattgcgattaggttggaaagctagttacaataagagtttctatgtagaatttcgtaa

SEQ ID NO: 15832 - DNA, 2585 bp, Cannabis sativa
aagtacctaaattggaaatagtttccttatcgatttgtgttgcattggataatgttgagtgatcaaaataattggttactttctgtcagtacttgataattgtttccagtgctgcaaattctccaaaagggcatgtttgaatagttttacttattctttttgtttcttcaatttatcacataggggatgtcattgttgacaatgtcagcctcaatcccaggcctaaggccaacctgttattcaaaagacgactgtcgtgccacagatgcagaaagtgcagttttctttttagctctttacatagtggcgctaggaaccggtgggatcaagccttgcgtttcatccttcggagcagatcagtttgatgatgatgatgaagttgagaagaaacaaaagtcttcttttttcaattggttttattttgtgatcaacattggtgctcttattgccagctctgttctggtttgggtgcaagagaatgtgagttggggattaggctttggcattccagcagtggccatgggaatcgctgtgataagcttcttttcgggcactcgtttgtataggaaccaaaaacctggaggcagccctcttacccgccttgctcaggtgatggtgtcagccttccgaaaatataatgttccagtgcctcttgataggactcagttgtatgagactgcagatgctgagtccaacatcaaaggaagccgaaagcttgatcacacagaagacttaaagtaagtttctaaactgcaaagctgtgttaaacatgtctagtaagaaccttaattctcaatgtaatcaccacaaatactaatttaagagatgtaaatttcctaatgttactctctatctctatcatgtaccacaatgaaattttcttaatgttattctcctcaggttctttgacaaagcagcagtagtgacacaaacccagcaggcaaaggactcagcagtgaacccatggagactttgcacagtcacacaagtggaggagctaaagggcataatacgtttgcttcctatatgggccactggcataacgttttctgcagtctacagtcagatgggcagcctattcgtcttgcaaggagaaacattggatgccagcatgggccctcactttgagatcccatcggcctctctctcaatctttgacaccctcagtgtcattatttggataccaatctacgacagaatcatagtcccaacaacccgaagatacacaggccacaagaacggcttaactcagcttcagagaatgggagttggccttatcatctccatcttggccatgttagctgcaggaaccttggagcttataaggcttgacattgtgaaaagaaataacttttatgactatgaccacattcccatgtccatattctggcaaataccacagtatttccttattggttgtggtgaagttttcttcttcgttggacaaatggagttcttctatatggaagctccagatgcaatgaggagcttgtgttcggctctggcactcaccacagtggctcttggtaactacgcgagctctctgcttgtgactattgtgaccaaagtgagtacaaagcatggaagattgggttggataccagacaatttgaaccgtggtcacctccattacttcttcttgtcgttagcaatacttagtgtggtgaatttgggagcttttcttgtgatatcaaagtggtatacgtataagaagcccgtgggaactgtccgttgatgcatgacattggcaatttaattgatatgtgaagaaagcaatttaagtgcttttatctggtcttaaatgtttttccacataatggatccttctttttgaaagtatttttctatcagagaattgtgttttaaatttgtattcataattagcactttcacaacaattagcagtcaaccaaattgtgtaaaagagctacggcctaaatgcttgcggaaacaggaatgaaagtaataacactgacaaataaaatacagacatttttatgaacacacaacaaaaattgtacttgacctaagcatgttcttcatgaccccttggagttgttgtgatacatctgcatacatatatatatatataatatacacatataggaaagctttcagatcaaacaacttcataaatgatgatcttaaaaaaagaaaagtactgtagaagcaaaacgtcaaccaaacgggttctatagagctatttccttcattttactttctgttacttcttctctctcttcagttaatgggaaggcgggtacgggtttgccgggtaaagggcgggtctaaccctaaacataaaacacagacgcctaatttctctcagcaaagtcaactcctcagccaccggccctagctagccccgtccatcgatctctctcaaatccagcctagctctctttttccctctatcggtctgatctgtcccatcttcccacaacacagctccgcctcgccaatcttccacagctctggccgccggtccaacacaggtaatgttttatatattatataaataatatgtatagtatatgaattaataatatattattaaattgtgagtttaataccttgtgaatttt

SEQ ID NO: 15833 - DNA, 2134 bp, Cannabis sativa
aaaaaaaaactcttttaatttttaaactatagaacaacattcattactctaaacatattttattaattgttttgggtgtttggcattctttttatattatgatgcatgtattttaaacttatactatagtagtttgtgggttctttcaagagacatttctcacgtaattcttatgtaaagttagttggaagttcaggactttacttggctttttaacacgatatagttgaaaatatataaatgttaggactatatgagagtcaaaacttgttctaattccttcattagttctaagcataaagtcgaattagaaaataagatctcacttgtaatacataaacggaaaaagaaccaaacttatctatcttaatttagtagttaatcaaacaaaaacaaaaaccagactaactaaactctgttcttcctaaggtatgtaccacaaaacatggattcttccactatacacaataatccttgccatgccaacctgccataagatcttatgaagttttagaagaagtcctcctcatcatagttaatggccgtaaaatcatcgtagtcgaaaaaaccatccccatctgagtatccaatatcaaagtcatcatcaaactcatcttcaaactcaagaagattactcaaaaaggggtcctgatcggcaaagggaaaatcatcgtcttcccctgaaaacatctcaccaggatcagaaatacgaacacaaccctcgagtgaatcaaaaggtaacttcacaagtttgatctgctcagcacaccttctccccaaatctcccttcaaattaatattgagacatcggcgcaggtcaagtgattcgagcttacaacaaccatcaagaattgcttgcaagcccaggttattcatccaacttccaataagctgcaaatggcgtagttctggcaagtttttgctaatggcaatcacatcttcattaaaatccacctcttgatcaggaaataagtagttagagcgttgataagcttctgtgtacaatttcaatgttttgaaatgagggcaacagcgccccaatgcttcgataacagtttctgagatttcgcagtgtgtcaaatcaagctcctccaacagtggaagcttttcgatagcttcaatcaatccctcatctgaaagatcagagcaagaagcaaatcgaaggcgtttgatctgacttgaactgttgaaaggttttacaggaaataaaagtaagcactaatgcagagaatgaaactgaaaaaatggggaaaatggaaacaactgcaacaaatgctaaacatattaaaaacaaaaatgaataataataataacaaaagagaagtgataatcaatctaaatacaaccattacaacatcaacatcccaaaactttttcattgacctaatcaagtgaaggatcatcaaattggttacctaaatatctacctatctaaaataatagttcttaaatctttctttaaataaaaaaactattaaaatttcatgaagaacattgtaaattatagtaataatcaataaaacaaaagcataagaatttgataacccaaattatcaagttgaaacacaatacaatagtcaagttcacttctttctttcttttaatcaaaatgaaagagaagtaagaagaattagaatacctagcagtgatataccgaagaagttcgtcgtttccaaacttctcgatgttgaaatcaacgagttggccacaacttcggtcgacaatgtcgcggcacatcttttccgagtcccattcggaatcaatttcgtggctgtgaatgtcaatggttcgccacatagaaggatccttgcagatataaagccacgacttgcaaaccatctgagcagtcgtcatgattttaatcgaacccagacgagagagaatcgacgccgtcacatcgcgcggcaattccagccagttcctcagttcttccggcggagagggctcagtagaggtggaagacgccattggcgatagcagagaatttcgtgtgcaactgcaagctaaggttttccagtgtcgagaaaatgaagaaatttgaatgggaaatgtaaaataaaaaaaaaataaaaagaaagagagaaaattacattatattttttttttaattttttaatttttacattttaaaaca

SEQ ID NO: 15834 - DNA, 7588 bp, Cannabis sativa
ctaatgtccaacaaactaagacaaatttgtgtgtagtaattaacaaaattatttatagtcaattccaacatgcttttagaattatgctatttaagttataaatttaaaattaaaaaaattacttacctttctagaaacctattgatgtttttggatgattgcttgtatattcatgttttttgcttcttttttctttttttaattaataataattctgtattatttcctttttggagtacagattcaccaaaaacaaataaataaaaattggtaaaactactaaaacaatatggtattttttgttttgaaaaactaaaaataaagaaaataatgtttttgtctttttctaaatcaatatttataacatgaatcaaactctgtcacgtcacagttctaaaatgatgccatctatacaaatatttatggtcacacataactaataataatacaaaatagtatctttaccctttcaactaataataatagaaaacaatatctccaccctttgattttaattgagttttaattatttttaaatttaagttttgacctgtattaaattatgttttttaagttttttaataaaatttttgttcaattttattgggtgtaattagaataattatgtaattactaaataatatagtaattatatagtagtttttacactatattttaaaatacaaagtatattaattacatatgaatttctaatattttatttgacaaaataattagtaattacatagaaaaataatattctttaatagtcaatatttaaaatagaaagtttttaataattacattgtaagaacgtgagaattgaagagtgtaattggaaccccttaattatctcgaattacataattataatgtaattacatagtcagacaaacatgttaaattatatagtttcttctaattacacacaaatctaattatattgtgactttccaaatacactctaacaattgcttgtaattcatatagcacaatttcgtaaatatcaaaaattaaccattaatttaatatcaaaacattttaaaattagtataaatttaagtgtgcactcaattttagaaagatacatattaatacaaataaaaaaaaatagtttattccattttttttattccaaataaaaatatctattaaattgcttttaaaattaattatatatactaagtaatttaattatgagcaaaaattcatattcaacaaatgattaataataaatttagtcaattactttccaaggtatagatctatcatttacctaaaatggaaggactaaaatgatatttttgaaaaataataaaaaaaacgtttaaatattttataaaagtttactataaatagatttggtgcgaaagttttgaatttacagttttgtcccttttctgttcttattttatttttacaatctgaaactgaagaagaagaagaagaagatagatactgagttcggaccgagtcaattatggattctaactcagatacaacgagtcctaaaacaccgcttttgggaccagaagctcggagaccgagtgataacggtcgccggaatcgccgactcagtcgaagatactctgttaactcgctcaggaccgaattcgtttccaggctcccggaaaaagtccgttctggtttcgacgttgagtccagtccttatgatatcgacctaactcggaccactggcttgagcggaggtttgtttgaaatttcaattcaagaaaaaaaacaatactctgtttggttactgagaaaatgcgttaaagattttttataattttttttttccaatagttttttgttataatgagcaatcagaaaatgattataagaaacgtcgttataatgaacatgaaaaattgggtgatttttttaggaaacagagttattgtttgtggtataaggcattgtttgtttgttgagaaattgggggagaaattttcagttgtttagagaatctgcaaccaattataacgatgaatgagttgattcctttgttgtttttatatgaatatgttgttaacaattttgattcttgttttttgaatttataggagaaaaggagtactatgaaagacaacttttaactttgaaatcttttgaggaagttgattctgtagtgcaatcagagagcattgatgaagatgataatgaagaacaagctcaacatgaaagagccatgatgatctccaattatgcaaacataattctcttgggacttaaggtaaattatgggtcttttctatgagaactatggaataaagtatttgagttgttaagagcttttacagctccaaccaatggtatctttaatgttttaggttatatacaccatgatatagaaaattcattctcagttcacaaacactgaagttgaaatttgtgcttgattgtgtagatctatgcaactataaagagtgggtccatagccattgcagcatcaacactagattctttgttggatctcatggctggtggcatactttggttcactcacttgtcaatgaaaagtataaacatttatagataccccattggaaaattgagggtgcagcctgttggcataatcatttttgctgctatcatggctacactaggtatgattctgcaccttaatttcttcatagtttgcacagattttctctttttcgactcaatgaagggagactgttgggcttccttggttaacatacatatcatctagtgtatgtactctgtttgatacataatcagattaaggaagaatttcactatgctcttaaagatgctaagttataattatacagaaataaaaaataaatgtgtgtggagtagcttaggaaggaaaggtttgccactttatggaaaggtaggcagctttagaaaattataaagccaacaagtgagtttaaattagtttatgctagttttgaatttaagtttaatttcaactaaaaggttcctccaggtagtaggcatattttgaggaattctaaacatagtacaccttgtgctctttatctaaacatactttagagttactcaatgctttaacatagaacatctcggcaaccttagagatggttttgttctgttctgttctttcttttaagtaatcttaggccaaattagattctataccaaaataatttccaattaaatttcaacttacaggttttcaggtattcatccaggctttagaacagctaattgaagctaatccttcagagaagatgtcctcagaccagttagtgtggttgtattcaatcatgctatttgctactgtggtaaaactcgcgctctggatttattgtagaagctcaggaaacaagattgtccgtgcctatgcagaggttttttgatctctctctctctctctctctcatttacttttatggtacttgttattaaatgcatacatctttttcaagttgaattgatttttgactttacaatgcccattaccaggatcattattttgatgtaataacaaatgtagttgggttggttgctgcggtactagctgacaaattctactggtggatcgatccagttggtgctcttgtccttgcaatatacacaatagcaaattggtctcgtactgttatcgaaaatgcaggtacttttctcgacctcttagctccttttgctgcaaataaatcatcctcattttctttcttcttgtctctctttgaaaattagcttaaaatatggtatcttttacagtttcactagtgggacaatcagcccctcctgaagtcctgcagaagcttacttatcttgtcataaggcatcctcaagtaaagcgtatcgacaccgttcgcgcctacacatttggtgttctttattttgtggaggtaaaccaattaacaaacacactgtgctcaaacaagaaaatagagatttagatacaattcaatctctgtaaaaccagatgagaattaatttaagaaatcaaaacataacagcataagtaatgagatcaaatcaaaccactttattgatcaatcttgcaactcaaagttacaacatacaatctctctctacactcagtttcagtttgtgtgttgtctaagaaaagaataaaatcgatcaactaactaagcctagacatgttctatatatactttgattgagtagttatacaagttgatatagagacagttataacaggtatctaggtagttaggacttaagctagtgactggacctatagctaacgaaagtgttcttctttgactgccaatgttagctaatatggcacattaacacaatagttacatataactttctctataatctttactctttggtgtcataacaacatctcatgatcattcaaactccatagtttggtgggatttgaataagttcacaagtgaaataatcttactgttggttggaacaggttgacattgaattaccggaggatttaccgttgaaagaagcgcacgcgatcggagagagtctgcagattaacattgagaaactgccagaagtagagagagcatttgttcatcttgattttgaatgtgatcacaaaccagagcattctgtactccacaagctcccaaattctcagccttgatttttgacattactcccaactttacaatagtaacaataaaaaaaattataggcatcttattctcactgtaatttttttgttttctatacaactatgagagatcttcaggttgcttctttgaaaaattacaataaaaattttaaaagaaaaacattttctgagttggtgtcagtgcacagactaattaggccaggtcttaggtataaacggggtaggcttgtgcttagagcctgcttagcttagggatcaaaaaaagtttgtcctcttttaaaattacacaattttttattgtattgttttttaaatcaaaaatattttttcttatagtccactaaattttaaagctgatcgtgagactaatatactatactaataagatcaacttattattattaggcatttgaaaataccatattcctatattaaaagtgttgcactgactaaacattttcaatgttacattatattataaataatgctttactttctaaaaaaggtgaattgttgaaagagaatgttactattaaccttttattataacttgttaattaatttttgtactgaaaaacatatgttgaaatacttttttttttaaagttgtgtttgttataattacaacattattcttataaatttttttaattttttgaatagtttaaaatgtcgaaaataagtttgaagttttttgaacacatttgataaactggaatatcacactctgttttcggtattgtaatttattcaaaaaaatttaaaaatttacaagaggtatattgtaactataacaaatatcactataaacaaaaatattccgacatatgattttagacgtgaaagttagctaagagattgtattaggaggttgtaattaacacccctctagttcaaataaagtaaaatagatgataaattgtgaattttgtctaaccaattacaattacatgaagaggagaatttaatttatattagttggattaatagatgataaattgtgaattttgtctaaccaattacaatgacatgaagaggagaatttaatttatattagttggaatattttgaattttgatgattaaaacttgccaatgtgctcaaaagttctgaaaataagagaaacagaattatataaaaataacagaaaatccttttcactatctgctactcaaatcataccttacataactatctatagccacatttttctcaatgtgtaaaacatagcaccaaaaataagtaacaatggtaatagtttacatccctcaaaattaatgttcttatagatgggagctctatctttagaataatctatacatatatgacccttcttctaacatgttgtatacaacacaaggtatgtaggtaaggaggtaagaccccttctgtgggattttccatggcagtcgaaacgggttatgaattcggtattagatgaccattgtacatcttactaagcaacttttgtgcatctggccttctgagaagccccttgttgtttggtacaccagtccctaaacacacagggcaaacaagctttcctctacctgatggcaacaacgatgaagatgaacgattaatcaagaaagaaaacttatgacaactactcttattccatgagcaacataacattaagtttcatggatgtgaaatttcatatgcaacaacagaaagtaagagtgggcatctgattcaatccaattcaattagtaatagattgaattggtttaacattaactaaacaattataaaaactacactgagttttaggatttttttaagaatgtggatcgattttaattggattttgaaagtgtcatccaataaccgatccaattcaactattcacatccaatctaatctaactgtaattgaatatccaactttctgtaactgaactggattggattggtttgaatgttacccactcctaacagaaagtgcatacataccataacaatttggacattctgtgaactcataaacatctttggctctttttctattgagtgctttccattttcctgtaccaccacacatatcacctaaatcaaaccaaaaaaagaatcaagatttcatcacagataatcacaaacatggttaaacaaaatgggaaatatttcatacttacaaagtacagcaccactgcctccacaatttcgacatcctggtctgtccattccatttccatccattgctaaagctttggttttggaactagaattgctgaaatcgtttattaatggaacggtagagcacagacaagcaagacataagcgtcgattgattgctggtttagatccctgtggtcagaaaggaacatgtattggatcaaattgaagtctatgctttcaaattttgcatacttaaaagctaaagcaccaagagaaagttaagctttggagttcaattttgaactgttgaagaatattggtgatgaaattcccaaaaacactaaatcatgaccatgtgatgaaaaaagtaatgctatgtttggaagttggattttagtggggaaagaaaacagcgaggaaaaagtaggcaagaaaaaagtgtggaaaatataaccgaaaaatccaacctccaaacatagcttaaatgttatcatgaagagaaagagttgattggagtgtgttcaacatgttcaatgtgatccaacaaaagttgtaaacaacataaaaactgcccttaatgagcacaacatttgtctatgctaactactaagaccatattcacaagtaaaaaacaatatataattggttgagcacattaggacgagcagcaacacgagatatgaacaagcccttcagtatttttgtaattagttagataccaaaatgaatgaagcccttaccttaagaggttttgatgatgagttaccagaatcctcagtgccattgctctcattttccaaacttgacctcactttgagcccaactggctttgagttcactaccaaatttaggcaagaaattaagggtttaaggttaaggaaaatataatcaaacaaattca

SEQ ID NO: 15835 - DNA, 12149 bp, Cannabis sativa
  modified_base (422)..(433): a, c, t, g, unknown or other
  modified_base (4125)..(4126): a, c, t, g, unknown or other
cttgcaccatgcgtttatctcacctgtagaccacgagccctctcgatttaccctcgttgggacttcgtcatccgatagagatgttgggattaaactatcatttttttgagattcatctgcgaaagccccatctccaaattcgtacaattagctgtttgaaaaattgctcatctaaaagatagaagattttttcagcgtggtgcgagtgcgatttaaaagaggagtgtcgtcacccgaacaacagattttatattcaacaaaaacaacaaaactaacacttgagcctcaaaaagtggttgagtgtatctcagtgtctaaagaatcatgcatcaatatgaacattaagttactgagaaacaccataccacttcaaagcttagttagttctaaatcgcgactcaatatataataataataataannnnnnnnnnnntaataataataatatataataagagaacaacctccagaatagaacaaagtggttgggtgtatcatagtgacctaagggttataaagagaaataagcattaaatctctgtgatacacccaaccactggcaatctcaatttggagacagttcaaactaagtatgcaagtatgcaaagaggctctaatgaaaaaaagtgcaaatatttaaagttcatcacaaggaagatgcgaatattcaagttacaggtagggattttccagaaaattccatatttagccttacttcactcaaaatttcatcttccacaacatattctatttttttcatacaacttctaccccctaaatacctaggaggtatgcgaatattcaaagaaaatagattatagagaagttatgaaggaaacaaaaacctttcatatgatgttaattcttttgaattcgattgtcactctaaaaatttctgaaaaaatttctagaaaaaagaattcaaaatcttgaagatttttaaaaccaaaagatttttagaagagagaaaacttcaaaaaagtgaaaatggtagggaaatgaagtgtgatcgattttgcatttgagagagttaaatacaaatcattaatatttgttgggatatagacacgtgccaggtaaataccaaaggccacccaatccaacgattacttaagatcatgcctacacacacttgaaaattttgatgacatggcatcttgggaaaataaaaataataaatgtagccgtcttttgaaaaccctcgacaagacaactaaaaattaccatctcgtgacaataactcgcctgcctctctaatagtttccctatatgacacagttgtcactcgcaaaactagggacatgtgttatagtgggaatttctcacctagaaatacagagtagtctcatataaaattgacacacagattcaatttccgaaaagatgacatgttaattaataactcccataaagttagcctcacttgatctaaactcgcgagatgatgcgaccatgacatggtctagtcgcatactatgcctcgtatagtcaaagacataagcaggaccatgaggatttgatattggtcgtgtatataccgattacatgcgatgaacaagtagacctctcctgcgactagtaaagatcgcttctttacacaaggattagtccaaatgactaatatgttcgatggctcattagggacttgcacgtttcacgttgtcaacacatgagatgtccgtctatgccatcaaaggtgaacacagagatccaaacataggcccataggccactgtgaatacaaaacacacctaaagcctgcgagcttgtgcaaggatatgaacaggcaactcgcgcttaacaagtcgcatacattgctgcacttaatacaagaacgaattaaaatgttcttcatttattctttaaacgtttattctgctttaatactatcatttattgtaaaacggttttaaaactgatcagttatctaaatcctaaatgatacttactttgtatataaagaagtgaccaaatcaaataaactaagctgaaatctttgcaacagtggactaagcagactaatctctaactgaatcattataattctcttgtgtacttattatttcctgcatttattccgtttgtttattagttaatagtttaagtactcgctactctaattgagtactcacacgttttaattaagtgttcttatttgtattaaatactcgcacaaatttagtgtttatctaaatttctcccataacatgttctatgttgtatgttaataaagagaaacctaaaaataacaaaacataaaaattatagttaaattagtgagtagtttttacaaataaagggtttattattcaaaatagagttgcataatatatattgtattttgacaacacacaaccatttggcatttactctaacagaaaacaccgagaccttatcgaaaagcttttggagccctacaatggcgttaactgcttcagcagcagcgctttcacctgtcaatttcaacggtatgctctctttccccctctcacacatacacacacttttacaattaattgaccccattttctcaatttggtcattacaggcagcggggttaatcaaaggaccaacttgtttccccgtttttggagcagaaaagggaccaatttgacgttcctcacgaattctcgaaacaaaggagctagtttagtcgcttctgctgccactggggataatggaggtgtcactgcacgcaaattcgaggctgaaactgcacctggattgtactcttggccagataataaggttccagtttatatttatttactcttatccccaattaacaaaatgacttcactcatgtagccatatacaatattaagaatttaagggctcagggtatatgcatttgggtaactgctagacgaaatcaatggaaatttaaagttgtagtgagttctgttatgtaatttcttggacatatttgatgatttagttattgttttcttgccattcattatcttggcgagtagagtaaattgacataaaagtgaataataaacttaattctccagctgcaaaggaccaccaattgttgaattgtatgttaagcaagaaaattcaattagataactaaattatacggctaaacgatagaaacagttaatgattatttatgaacaaagtaattataatttcacataagatattggcatgagagacatattgacattggaatacatatcaagtttcaccaccagcatcgatggatcagtttgattatatatttcttctgttttatagttttgaaaatgtcttttttcttttttctttctttttcattattatggtcagaaattttgtgtgaggagttattatgtgattcttttagctactctgatctttaatttcagcaacagttttttccttgcagagaccaaggatatgtatactaggtggtggatttggaggtctatatactgctttaaggctagaatcacttgtgtggccggatggaaaaaaacctcaagtaagttgatattcaaatttgtcttcttttcaggcattatgtttgtcatagtatatggcatggttatgtgcttaatgcatcaatttcacagcaaggtaatagcaagaaatactgttttgagaatgattttttattttttttatttattatttattatatatatattttttttttttggagaagataatattctcagtgattgtttttggtccttttatgtcattcttttttgaaacagtgatacttatttccatgtacatctagttaatcaatctaaacattttgttctcagtaattgtcttgtcttgattgtcttctgatctataagaacatgaagggaaacttgtgcaaaccttttggtctttttatgccattcttcttaaaaaacatggatacttatttcccggtacatctggcctatcagtcttaacatgtcattctcaataattggtttatgatccataagaacataaggggaaatgtgtgcaaaccttttgctccttttatgccattctttgaaatgttcatactcatttccaggtacttctagtcgatcagtctgaacattttgtttttaagccaatgttgtacgagcttctatctggaggtatgtttttttgagttaaatatcatttcttcttcttcttcttctnnttcttcttcttcttcttccttttgctgggtatgttatttagttaaacatcactttttctttgttgtcttccattttatttaattttttatgacattaaactaatttatgtaagtttttctattacatgcaccaacttgattgttcgcagaagtagatgaatgggaaatagctccacgtttcaaagatctgcttgcaagcaccagtgtcttgtttttccaagacagggtcaaatctttgcatccatctgatcatttaggaattaatggacctacaacatctagttgtggagggactgtgcatcttgaaagcggtcttcttattgaatatgattggtatatctataaccttccttgaggcatttttttatagtttttattaggcctagaatgtgaaatgctgctttaatttcggagaggcagaatgggtaagctgaatattattgaataaaatgtaaatgagttacaaccaaaaagtctttttatggactgattaacagttcctacatgaatggaaattgtgatttatgatgtataatgagctggatttagaaatcctaatcctactctgataaaataaagaaatacagaatcctcgtagtagtaggacatcttgttaatatcaactttgttatcacgtgatgtccaatatcaaatcctgcagttagctattagaaacctgtgcaagagcaaaacctttcactttgtattataataagtagcctggtaaagagtggcccatagatagctcaattactctatttgatagaatttattagtgatgcagtacgtagttttaaacctgtattagagtcattagacagagtcaggttggtttgatatatcatcactaatgtcatgtacactgtcgactcttttgtggattttgtgtaaaatatatcgttaattctgatatgatgttttacttttcatttctcgctcttgttggctctggacagacaggctggttctttcgttgggagctgaaactaaactagatgttgtgcctggagcactagaatttgcattgccattctccacccttgaggatgcacgtgtgagtttcttaccagttgaagaacctgcttagcagtccatttgggttaacattttcagtgtctacaccataccttgtctgcctttttcattttttgacatttttgtgatgcagagggttgaccagaggttaaaaacactggaaagaagaaattttggtaaaaactccctaataaatgtggctgttgttggctgtggttatgctggagttgagttagcagccacggtatccgagagattacaagatagaggtatagtaaaggcaatcaatgtggagacaacaatttgcccacaggcatccccaggtaacaaggaagctgcattaaaggtaagttgtattctattataatgcttgttgatacctttaaagcatctatctttgttttgatagtattatggatgatattatttttctgggtatgcttaaaagttgtcattattggagatgatcaatctgaactcaaacgtgttccatcaaaaacaaaaaaaaaaaaaactgaactcaaatgtggttaataaatatatcactattaaagttattgcttttattgtctctttggtaatttatatactattgtaatacttgttaataataccgttaaaacatctatcttttgtttctattattatggatgatatttttattttgggtatatttataagctatcattatttgagatactcaatctgaaattctaaaatgtagttaatatgtcactgtcaaagttattgcttttaatgtagttctgcattgctttgtctatatacatatattgcttttattgtctcttaggttctctcaaccagaacgctcaacttcttttgggttgcctttattgtgtctcttaggttctcttaactaggaatgttcaacttctattggggtatttcgtccgctccattagcagagtggaagatgttgaatcttcaattaagccagatgattgtgaagttgtacagtgtgattcagagaaatacatattggaacttaatcctgctgagaggggattaaaaaggcaaagtttggaagcagatctagtactttggactgttggctctaaacctcttcttcctgagctggaaccctgtgaaaggccccatgagattcctctaaatgccaggggtcaagctgagacagatgaaactcttcgtgttaagggccatccacgcatatttgcacttggtgattcttcttctttaagggattcacatggaaggattcttcccgccactgctcaggtattctaatatccgatttccttcgaaggattaacaatatcaatagtttgagggtaacttttcaagattagtttatgaatatagcactcttctaaactgctttctcttttttatgattaatctctatagactttcaaagaaaactgtttgttatctgatctttggctcattgctacttccaggttgctttccaacaagctgattttactggttggaatctgtgggctgcaatcaacaaccgtcctcttttgccgtttaggtacttgccccttgctccttggccctggtattgtcattaaaatattccatgttcttttaattcataaagtgcacatatctaagatgaacctcaaaatcaaattgcgtggaaattgtgatatgttgcatatgttgttaaactagattttgaagcattcaatactgttgggtttttgctaaggctttgacttagagaagcaaagtgaaagggtttattctagttatggacctattaggaaataatgtttgggaaaaaaattgctttgtgttattgatgatcctaaccaatccccctcatacttggggttgataaggatctaagtttgagtttgcttcttagctcaaagaaccttgtactagaaatagctttagttagtaggttagctacttgatctagagaaggtacacgttttatagtgagaatgccatttagaactttttctcagacaaaatagagatttagctcaatgtggttggtcatagcatgctcaacaggattgacagagagcacaacaatgcttagattgccgtagcaaacaagtaaattgctatgaagcttgatttgtagctcatcaagaagggatttaagccatgtaatctcagctacaacatggtctagactttgatacgctgctttggttcttgattaagaaaccatattttgtttctttgattgcggggagatgaggttgttgccaagaaatatgcagtttcctgattttgatcgccggccatccggatccgatccaaattagcatcacagaagacttcaatggtattctggctagattgaaggtggagtcccatgtctaatttgccttgccttggagatgcctaagtattctctttaccacttgccagtgtgctccagatggattttgcataattgacaaacccaattggcactaggaaatttcgggtcttgttttggtagcatattgtaatgctccttctgtacatttgagtgtctcgaactggatgaccatcatatgctgttatcttttttgtcctgaggtcataggagttgtttgtgagttgtatttctaagaagtagttgagatctcccaagttttttagagcagactgtttgtttgtaattattttgattgaaggaattagaattgtttcttgctttaattttgttactcccgccattgttgttgaagtaggcgggattgttgttctacctaggcatgttaaaagtaaaggaagagttttgggtaacaagatttgcagctgcttttgacgatatcatggtcagtgaagggttttcaactcttgatttttgagaaagaagcaaagattcaagttgttctaccgagtaaactcatctcagcttcagatgaaatcattggtgccatccatcaagaaaatgcatcatattttgaccaagaactgctgcagtattttgctgtttctagagaagatgattgtcattgttgaatttgagtgaaggagaacgattgaacagaaccatactagtattgttgaagttagaagagtagtgacagtagccatggtgcttggaaaactttgttggggcttgttgccaaagctgaaggagtagcttgagtttcttgatagttggtttctgataccatattagcagagaatatttgacggaaagaattgcagttgctttgtattatcgttgataatagacagatgagtcgattgatacatgtacaatcacaagtaacccgtggtaactaacagtttaaacaaccttaactaatcttcctactaatctagtttatctttaataggaccaaatttcccttcgcttctccaaaatttatagatttttctccaaggagtccatctcagtaaagttggtatataacgctttaagtgttgatgctactgtataatctcaatatagatgtcaattgtgaacgtatctttgtggctgccaggtttcagaatttgggtgaaatgatgactctagggagaaacgacgctgcactttctccaagtttcattgaggggctaactctagagggccctattggacataccggtaaagttctgtaaaatgcacccttttggttatgttttttctcatttatatttggtaaaacctaccattataaaaatagactagcatctatttagttatgaaaagatttagtcccaacatggatcagttatgaataggaatactgtaatacatttttaagtatcatactaagaaaatgcacagacaatttactaatgtagtaataattatatatatatagagtcagatttattgtttatgagataaaaatataattaaaacatattgattttttcaataactctaaaatttaaaccaggatgtcaaaaatctttatatacatattttttaaacaataattattagggattttggtgttttgattttttttttttttaaccaatacttcatttcagttataacttctccattaatgtatacatgtaatgtatttacgatttgttgttcctttccacagcaaggaaaattgcatacttgattagattgccgaccgatgagcataggcttaaagttgggatgagctggctcacaaagtctgctatagaatccattacatctgtgcaaagcactctatctaaggtactctcgagctcgtgattcaattcattttggaataaagaaacatatatatatatataagtgtattttgtggttgtaaagttgtgacactgatagttttgcgtctgtctactcatgtatcagttgaatttagtgcctcttaaacctaaggttttttttttcataaatagatatttgttatggttgttttacagatatgagtaataacttttggtatccttttctgctctatctcaattgatccattctctatcaaatacaaatatatttattgatgaatacatttatgtatgcaattactatttagtactgctactggttgaccactattattgtagtacaattatccgtaatatgatatataacactccctcttagaattgttgtgatgaaaactaacatgcaagtattgttttgcaagtataaactcacttgtgtaagattgttccacaagaattgtaattaaataccaagtagttgaatttatatttttatttggcaaacaaaaatttgttgtgaaactaatttaagcaagaataaaataactagcaaatagcaagatttaattaagagatgaaaatagggaaaataatttcaattacttcaattatctatttcaataatgcaaaataattctactttaaaaaaaaaaactatgttcagacatgtacgttttaaattgtaaggtaaaattctgcatttatgagctatttcgtacacaattcgcattaagcaataatgtcaagtcatacaaatattttcattttgtatcaaaacttgtgtttattttgttgactaagaatttagtcaacttacggcggaactttatttattgttgataatcaccacgtgtaaataataataacaaataataaaagcgacatgggaatttatggtttgacccatttgattagcgggtaatgatctactttctttttaattgtattgattcttgagataataccacacagattagaggtttgaaccttataatatctagctgtgactctattcaatattaaaatagtgagaaattgagtgttaaggattgagaataagtgagactttgtgaagaatttagactaagtgtctagtgagtgaataagggggcataagagaggggagctatgggcgtgagagacttaaagtccatgtccttttctatcttgtctaatgccctttatatagtacagggctcacaaagatcatcattcaaacaagtaaatattcctttaaaataggaaaaataacctctttctaccttatatttaaattacaaaaaaaaaaaaaaaaaaaagtaatatccctaaagaataggttgatactagtttgtggaagaatccctatcttcatgggtagttaaggttgtttcgtaattaaaatttagcttacggaccacatcattaacccagcctctctttgaggctatctacatatgctggtcgcccaactctatttttagggcctagccgtcacataggactttattggccggccagggtgtggttcggctagggttctctggctggccattttctccttgcttgatcgccttagaacccttgacaattgacatttcgtgcaaggtgactttgttcggttgttgacagcccgtatgccacatggttttagttttgtctatgtgaacatgccacgtcaggtgggcaaaaattgagataacatattcaattagagcattttcaagatttatttttcaaattttatattaaaatcataaatataaaagatggcaatctaaaacatgtaataagtacaaataagaataaatcacacatcaatagaagacactagaatagcataaatctacagatattcttaaacaatctccattagcaacttcatagctgaatcaaaaacaaacaaactagtttgggattgtcacgatttctccaacggttgctctaatcttatttttctaggttttgagaagtccgaatgcctccaatttgtgattctccctgactactacaaagaccaagtgattccccttctaaaatgacaaaaatacccgtaaaattttgatgcatagagacaattgtgttctggcgccagtgtatttgggaattttttgaagttcctgtaaagggtctcaccgcatgtcgcgatccaaattggatttcaaaaatgctcatctcctttgtgaatgagcttgtcgcggccataaaaatgtcagtgtcatggctcagtgggttgtgttgcagatctaatttaatttttgctatactttgtcttaatttacttggtttagcacattctcaccacattcttctccatttgttaaaataaagtgtataaacctgaaattaataaaaactcgcataattctgtatcaaaacatggaaatgtaaagaagagatcaaaacacataaaaagataggctaaatttagcctaacaagtatactcaatttgtttattatcaatactcattaaaaaaatcttactaggtaaaacctaatgggaaaaaaaccttagtaaagaaaaaagagtacaattgaataaattctcccacaatgacattaccagtaacttctcacaaattttccagatgacacattatataaaatcctcattggcatatttgataatcttgccaaaattatgattgtaaattcaaaatatattatgtatggtatgtttgaaaattagttgttacttgttttagtgttaaatgtttttaaaattagaatattctatttatgtaaataaataaattaacttttctataatactttgatatttatatttatggaaaaattctagtttgaattggttgacttaaaattttgttaagaaatcgtgtacaatgtatatattgtttctttatttatttaaggaagttggaattaaatttg

SEQ ID NO: 15836 - DNA, 6546 bp, Cannabis sativa
  modified_base (85)..(92): a, c, t, g, unknown or other
attttgctacaaccaatgtaaagttttttcataccttttatgtgtttattttatatcttcttagaagttcatatttaggatgttnnnnnnnnacttgttagtaaatttaggtcctgctaaaataaattctaacaggaatgatattccttcagatgttaaagatgctttgtcatctaatttgatttaatagaattcttttattaaaaaaattattttttgaatgaaaaattcaattttattaaccattaacttctgctaccaaacaaggtagcaaatctgttggaacacacgccaaactgaaacgacaatcaagaaataaaatagaaactctagcaaagttatgaacgactatattagctgaccattttacaaaataaacagagacattgctcaaggaaatcaacaatcttttacaatctttagtcacatgaccaaatagagaaatcatagtaaagttgctcctcaaagcttgcacaacacaaagacagtccgcttaaagagtaacaaattgccaatgataatccttgatctagctaagggcctcacgaacccctatagcttcagctagctcgggttccactattcctgaaaaagtgcagtgtattcttcaatcaaaataccatttgcatcacgagctacaatacgccaaaattgtggctgtccccaaacaaagttgcatctacattgacattactattcaactgtggtgaaattcaatgctctgcaccatcacgtacttgagttttgagcattcttccattggtcaatgtgcctttttgcatacacaactatgtcacttgcccctgtcaccttttttgtttcaaaccaaatcatttcgggcccccatatggcccaacacaccatttgcaataaatacctcaacatccacttgcttaaaagaaattatgcaccagtttaagaaagatgcatctggtggcagatcaatgctaatgactcaatcctaccagaacttggtagcaggacaagttaccaagtgaaggattgattctttatgaccaagacaaacaggacataggaaatttactttcacatgttttatttggaactgaaacttgaaaaactcgctccatgtgcaatattatttcataatttagttagagtatctcattttttttaactgtattttttattattaaagatatttggtcatctaatttgattcaataaaattttaccttttattaaaaaaggaaaaaaaatattgttagtagcatgtttttgtgttcaaaatatggttaggggaattcacaaataacaaaatttgtgagtaatttgtgcgtgaggttatcttatctcaaaaattaattcgaaaagagaacgttgaaatgtcggcccaatcaattggatccacataaggtgaatgcaaagcaaatataataaaggcatcgcacctgattcgagctcccctttaggaccgatccgaattcttctttcttttcttttcgtcatcaccgtcttctccaaccaaataccccagattctctctctctctctctctattctattttctgtgtttgcgtcaaattcaatctcttgtgttttttcagagagagaaagaaataaagatcaaagagggataaagatgaagatcacagctttactggtccttaagtgccaacccgaaggatccgaccccatcattctagcaaacgcttccgatgtaagccattttggttacttccagaggtccagcgtcaaagagttcatcgtcttcgttggccgtactgtagctaaacgcacccctcctggccaacgccagtccgttcagcatgaaggtttttcccctttctcaatttcttaggcatttatttgatttgaagtttgattcttgattatttcaaaaactaaaaaattgattattggtctagatgaattttgtacgaaattggcaatttttttatgtagatttgaattataattgtttgttaatccaagtaattgggtaaattttgataattgaattggactgtgtttggctgtgttaattctcctttttgattcggaagatatgaatatgcaaatttttttgttttgctttgcttgaaatcatgtgattgaatgtttgttatggctaatacggtttttggttttgttgatgtgtagagtataaggtacatgcttacaacagaaatggtctatgtgcgttgggctttatggacgaccattaccccgttcggagctcattttctgtgcttaataaggtaacttagtgttcattcgatcaatttctttaacatgttggctcatatactaatttatacgtgaatgcaattgcaaagaggttgatgaagaattggcaaataaagtaaagagattcgaattaaaaactccttgcatttagtgatactataatgaattagaatttgcaggatcttaattattttcggtctatgaatatttacacgatatagtgaccacaggtgcacgtagtagtaggttggaactctttgagttcatcccataatgatttaagctttgtaaaataggaggtaaaaaattgatctccttgttgcaaatggctgagttgagcttgtaattgaaagattctagggccttacctcattgaatctttcagcaagatcattccaggaggattgccaggaggtcgacaattcagtgagcagcgacgaagctgtttttgtacctaatgccatggatatgacatgcttccaagatcggtagttaggaccagtgagaacgaaggaaagagaatcaggccaaggtgatctttggacctcaggaagaatgggcttgatacatcttcatgggcaggtcgatcatttgtttgaggttgggattgttgtggagctgcaggtggtgggagaattggatcagaattatcactaggagtgggatcatcatgaggattgataggatcagaggaaccagatccattgtgagattgaatttgaggtttggggtttgagatcgtcgtggagcattgttggtggtgaaatgattggagcagaagtatcaccaattatggggtctccacttggattgatagggttagatggggcagatttgtctcgagaataagtattgggtcttgccattggatcgatggtggaatttatttcgtctgatattatgtgagatattcaagaacagagtaaacagaagaaaaggtttatttctgctataatctcaactgagtcgtacaaggatatatataggccaggaagagaatcaactggaagagttaaatgttagttaaagaaactaatttctaacacaatactgattctcaaaatttttatttgaggtttgtcaaaagtaaatagtaagttagagtaactttttgggaatcaaatttatttttcaccactcttcatatcatgagaacttgattcatgattttgtggtaggcttcataataattaaatttataatgttcaaatgatcacatgcatttggaatttgccatttcttattgtggtgtaaataaacttgtgaactatgtatttcactacatttttaagatgtagggtagttgattaggagttctttttatgttcattgtgcaattccttgtttagattgtgttttgtaaattgtctttggttaaataatacattttctattcatgctttaatcgtgtcacattgtgtttcccttttcaccatttatggccttgcttacttgtctattgtgcaagttcttgttatcaatattttacattatacaactacttgtttgagctcactagcctaagagaggacggtgcccatgtagttatactactaaccaatctcatacttggtcaatgtgggaccctaacaataccctcccctttggagtcgacgtccacgacgatccactccacggtcgtctacttttctgtggcctactctgggtttaatctacaggtcgccccttccataggtaacccttccggtcagccccacttgagggtgatacaaccacttggtaaagctcacctccaaaagctagcctaagagaggagggtgcccaaatagctatatttaggatagaagttttggtaaatcattcacacgattaagtagattaggaagggaaggaaagttcagctttttgttttttcttattcatctctacagtcatttactatcgtctcattacaaatcaatatacttgccctataatacaattctattttcttaagagttgggttttcatgattcagtggattgtaacaaagtggtttattttagaaagtgtcatttattgtatgatacttcgcattaattacagagttacaaattactggcacatcaattagaagtataaaattaagattagagttggtgtgacgacaatggtatcagtatcacactaggtttacaaaagatgttaattcagatactttgaatcttctttttaataagattagagttgttgttttcctttcaaacattaaaattacctagaaggctgaaaaacttgatattgtacttagtttagagtggtgcatgagtgtgctctctttcctgatcttaggttgggtgtttattttattatacataataataagggttcagacaagtgatcaggcctaagatgcggggtttaatttcttgcgggcacttatctagcagtttaataattattggctaataattattataattttacggattaggggtaactgataaatgtatattattggcaggtgctagacgagtatcagaaaacttttggtgaatcgtggaggagtgcacaagcagatggctctcagccatggccgtacttgaatgaagctctagcaaaattccaggtacctctcttttgttactctgcatctggagtttaaagtccataggtttgttttcttttttcagtaacatcttaagctattttcaattaaggtttctttctcttatgaagtcgaataagactgactaaaatcattgtgtttctttctctcccatttaattttcaggatcctgctgaagctgataagttgatgaaaattcagagggagttagatgaaacaaaaattatccttgtgagtactgcaattctgcatcagtgtagttgattttataatgaatgtggttttattctctcaagctgttctattttagctttatgtatttgttctcttgcaaggtttttcatttttttaaatgattattttatcttttgggtatatatttgtttacattatgatgtagattttatcccggctcatctctctctctctctcccctctttctttgttacagcataagactattgacagtgtccttgcacgaggcgagaaattggacagcttagttgaaaagagttcagatcttagcgcagcatcacaggttcattactttcatattcattaccattattataatatattaaacctgaattacagaagttatatgcaattcgtgtagtgaaatatttatctcgggcatttttaaatgaggcttgatgctgtaaactacagagtatagacctttcaattacttatttgtagaattttaagacgattgacaaataaatcaaaaagttatgaaacaaaaggtggttccaatggctgagaactcaagaaattatggtattgtgcttgctggaagctcatagaagtagaaagagaaactttaagtaccctgcagattgggattttaatactctcgtgtttaaatgaaattatttagtaagtgataaaagttcctctacgaagaagtgccatgacatgctaatagattcttaaactgttgaccctaacatctttttgtgcaatcgtaattctgacgattagttgcttttatgtcagatgttctataagcaagcgaagaagacgaaccagtgttgttccattttgtaagttgaacagaggttagcagcagcagcaacaacaactgatggtttctctttgtatttgtgtctgaattgatgaatgtcaaagtggtgattgttctatacttatatgttaataccatttacccaatgtttgttttgaaaggattgtggaatgttgcctcgtttttctctttttatggctcgaacattaaattgacagaatatcgtatcccctattttaatattaatttgaatgtggtcgacacctcagtctgtaactttctcgtgtactttttataataatatagagattatcttattctttttaagctaactcaatctaaatacccttttcccttcaacatttatttctatcccttgtctaaatttctagttgtcaatcaccattttgcccaaatttgctttccattgtgagatattgctcaagattacaaaaccagaattaacaccatgtttgatagaattaaatctaaaaaagaggattgaaaacagaagagaggaaaaaaaatcatagaagtgaaagagacaaaatttatagtacactttctattgttttgatatattaaaaaaaaaagggaaatttgaaaaactattcataaaacattctaaaattatttccctaaatctatatctattaaaattgcccatatttgactacatttgattttttctcataatacccctcccatttgaaaaacaaatcccaaacaaaaatcaaaa

SEQ ID NO: 15837 - DNA, 5585 bp, Cannabis sativa
  modified_base (1695)..(1700): a, c, t, g, unknown or other
tattgtgtcatatatatttgactctacttagaatattttgaaatacttgttatggtctatatttattttaattttaatacatatatataataaactatttatattgatttttttatttaaaaaataaattttataatcatttttaatagatactttttaaaataaataaataaatattattagaaaagtataatgttaataaatattttcataaaaaaattataaatagcacgtatgaatttatatgaacaaaacacagatatattgataattatggtcattttgtatttaccagctaactcaactcgtatgaagattttccaactcacagctgctttttcttaccacttaaccaaactggcccctggtatcccttatctcgaatctcatccattcacaactacaacttttcaccgtttccgatcttttgctatttaagcattaaaatatcgtaactgtaagggcttggaaaacagcgagaaattcattacaaaaaaaattggcttcccaaaaacaggaaaaaaattctcaaaatttaagacaaagggcagaatataattataattataccgataataagcataaacaattacatggcaaccattatcttctatcagagtaccgaccggtgcatgatattagagaaaacaaaaactctacttatgactttctagttggatcagttctcgaccaaaaacggcatttaccaatccgttgcattactcttcgtgcaatgccttcatcaaatacaatctgttgaagctttgaccagcaaccctggataagtatttcacccaagataaaaatgtgaatttgtcatcaattaattacaggtcaacaatgtcaattggtagccagagcaaaatcaaacgcaaatcttcatacttgagaaagaaaaataaaaacaggacataattacatgcatgaaactgtaacatacccattaatctggttgcagtagtttgatatttgatttgtgataaggaaactctccaaacgagatggctcgggaagaggcttgaaaataggatttgcagcatcctcctccggcaaagggtcttcaccagatgccttccttgcagcattctcagccctacaaagcattttcgatattaagttaccaacaatataccattacgaaggaaataaatgaagaaagaaaaagtaaattacttactcaaaaaacatcacttaatgcttatagtttgtagagcaaacatgataatttattctaccacaaatacaagcatcctaaatagcttttaaagtatttctagaataaatgatagaatcctaatgcatccaccagggaaaaaaagtaggcaaccatcaggacaagaaaacaaaacaaaaccatatctttgtaagattgttgactacccacatccccaatatgcagcaaataatgcaaaatattatcatttatatgtacatacaaatttccaatattaggaagccatgatgacaaagacatcgacaaaaacaaactaacaattaaacaaaattttcaccttctcttctgaagccatgcttgctgttgggattgctgtcgtgacaagcttcgatagtagaattggaactgtaaaaagatactcatcatgttatgcaaccatcgaaaattaccatacacagtgtgtgtgtgtgagagagagagtgggagagatagagatagagatagatatatatatatatatnnnnnnagagagagagagagagaggactgcaaaccttttgctgctccattgacaaatcatccatgcattcaatcaaaaattccatattcctctccataaatggaccagttgataattgcaaacgatcatagtcacactagtatggaataaacgtcaaatcagaatgcaagtatgtaaaagatgtagaatacttcagagcaaaagattagtaatacctgggtaacaggggtatcagcttccagttcagtcataaaggcacttataagggcagaatttgagactttaatctatcaagtagaagaccatcaatcagaaaatgatgaaatccatattgaattgtgagtgcacacatccaatgttaagatgggaagtaatcaaaatactctcgataatatgctactaatgataacagtaggtagcggtagccacagaagttattattaaacagaatatatacatatatatatatatatattaaaaacgacttcattgtcagaaatatcagagagtaaaaagtaaaaaaacttacaggtatttcctcaaaaatatcaacccaagacaagttcttctccctcaacctaaaagtagcacaagagaaaaataagtcttcatctcatagtttactttcattagaataagttaaaaatccagaaagacatacgtctctcctgtaaagttctttttgcggtgaagttccatgaacgcatcagaaagctttaacgccttcagtgctaagacaccctggtttgaccttgatggatcataaattatgcaaacacaccgcttaatattttcctgcaaacaaatgaataaataaatatagttaaaaacaaactcaattgctagaaagagaccaaccaaacaaaattgttaaattctgtacataaaaccagaaaatttaaagcaaaatatatagaaactaaaactttaccaaaaataatataaaatctaattcgtcagcttaatgtttgaaagctcacatcaaaaaatatgaaatacaaaaattcaactctatgtttgcaagtttacatagatattagcaattagatgtggaaacatagtttaaaaaggcgtttttgagatgtgccataatttgaggcactggaaaagtgctcaaggcttatccattgaggtgacagagaggcgtaagaggtgaggcgcagcaggcgcctcacaaaattgggggtggagaaagtaaatctgggtcttttttaaaagccgagtcattaaattattgtgatcagaaaagccctgctgcccaaatttcattaggtgaaatgaaaataagctcccccctctccaaacaaacaaaacaaaaggtaaaaaaaagcagggaagatgagagagctgctttccactactcaagtttgttttagtatggtcgtagaatctagctttctagttttagaaactaaatttttctccttgttttagagttccaaaaaattatgtgatgcttatgtatgttaactttgaaattaaacattgttacacagaacccaaattaaattattgtgagttccaaaaaaataacactcaaatcagaaaaaagacccaaagcacttggctcataagataaaacatacttaaaagagtgaaattgacttacaaaaaatgatatgaatgattgtgtcagtcaatcgaactacaagctagaaaaattttcaaattccttccattaatttagaaaaaactacttattattcatcaaggtcacgaaaacctattatacaaaatatactccattttccttaaaactataatacatagtgacattgattatcatgtatcatacttttgagctcaattacaaccattgatgtttggcttagccatctatcacagtactattagtagtgcttgataactaaaattgatagttaagctaaatttgtatacttcttttatcaacacaaaaattaaacaattctccaacatttcagcctttgttttcttactcatgagactagagcctatttcctttgcactaaatctcactactaatttgcaaagatcaaacttatataccttccatgaggtaggtgagaaatatatcatacatatatattcatccattttttgtcttctatcttccaaaataaacataattataaattataatatgatgtaaaaaagaagttgtatatatttttattaaattacaattaagaaactaatataaaaatttattacctggtagttcatgaaggtctcaattagttctactgtttgataagaaccaaaaagagttgactgatacctgaaaattaaaataatggttgcaagttacataggagaaaagattaagaacatctttacaaacaagataggctcaggtttttgtgtgtagcaacaccgacaacaagaacataccatccaacagtgttgttgtcaacgttaacctctctcaaacatctcatcatctcaagctgatagttagcaccttctgcttcaatctcctcatcctcttctcttatctgaatgattatatcataccaagcatagatacagaagtcagataacaagacagttaataatataaataggcaattttctagattggccctaaaagtaccgtaccggaaaagggaagcaattagtaacttcaagaacactgccaacatccaatccaagaagttggcctgtgactagagctggtgaaaactccttgcaatgcttgattatctttaatatagcctgttcaacaaaatacataaataaattaaaaagtctctagcacacaaattgaaaaataaactgaattagattcaaccataaacatttgcagatcagtaaagaacaccatacaattctaagtgcacttactacattccaaagacagatatataaacatatcaaaaccataagttaaaaattttgatcaaaaaaaaaaaacacagtgagagagaaatattaccaatccttcgatctgtacaactctgagtggagaggcaacttcttccgttgctgccacttgaaggaacgacctcgccactgcaatgcaaaaaccataaccagtcaaaacaagctcgcacaatcaaaaatgaaaaattaacacagaatttcacgcactgttcgccgccattatcgcacgcttccaaagctcaagagataataatcgcagagagagaaagagaaagcaacagcgcgagcgagcgagcgagtaggagcagcaaaagtttcttcctctctctgcagaaaaataataaaaccctaatcagttttgaatctctctacgctcgtcggaacgcacaatccgtattgggcttggattctacataaagcccattaaggcatcctgggcccaaaaactgtaggggtgtaaacataattaacgaaacatttaggggtatgagtgtaaattaacagatcatggtttgtataaatacagaagcaaaactaatcgaaaaccctaaaagaggttctcttagacgcaaactgctgtgtgagattaacgagtctatgaacacagcggttgtgtctaaatcttatttccatttcaaatggaaaagagagggaagaggatctgatagcaaacgatggtgtttcagaaagccagtgcttttgtttcaatcagctcttggctcgctataatgcctacatttttgttttcttattatatgttttttctttcatttgattttggattttaaatttgaaattctacctcggggtctattttattttaggggaaacttaagaagttgtgatatttttttattagattgatggagaagtggtagttttaatgctcatctgtgcatctgtgaaaccggtgatgacttgttgcttgtattcattttagagctcatgataaaaattaggggtctttttaatattatacttaaaaatacattttatttacaaaaatatcattacgaaaattatttg

SEQ ID NO: 15838 - DNA, 5388 bp, Cannabis sativa
ttgtttttatattttttttttataaacaaagcaaatcagatcttttttctattctctcggtcataagagttcccatcacacagatgacaccacctatagctaacattacctttagaatagccaagccttaatctctttcgagaagggctatggtgattttcgaacccttgactcaagcaaggacggatgacagtaaaaacaattcctaccactacaccatacaacacgtggttgtttgacttcataatttaaaaattgtttttactttttaaaataggaaagaacttttaaaaactaatagcggcgtttggctaaattttttaaaacagttttttgaaaattatattttaaaaaattagaaaaaagaaaatatcaaaatgtttgttttctattttcaaaaataattttttttatctaaatattctttttttcttctttgctcacataccagaacttgaatctcgaaccaggacccgatcccgaaccctaactttaattcggaccgagatctgaatcccaaacccagactccggactcggaccccggtcggacccgaacccaaacctcggtcggacctgaacccaatcctggacttggacccatatccaaacttgaacccgaaccccaaactcgaccccgaccctgaaccttggacctggacccaaaccccaaactcggactcgacccagacctgaaccgaactcggcctaggtacaaggttcaggtctagggtcaaggtccaggtctagggttagggtccgagttcaggtcgggatacaagctccgggtctgggtacgagcttcgggtctaggtttcaggtcgaggtccggatttgggtccaagttcaaggtccaagtccaggtctaggtttgggttttgggtccgagtccaggtcttgggatcaggtttgggtccaggtcgtggtccagggtctagatctgagtcgaggtccgagttcaatctaaggtgggatgggttcatatcgtagtatgatgtagaatattgatttcttttttattattaaaaaatctaaaaataattttaaaaacttgagtcaaataccattaaatttataaaatgacaaataattattttttattttcacttttaaaaatacaattctgaaaactgaaaacagagccaaattatctctagtgcatgtgttcttagattatctccaaagatacttattaactagtacttataacttaattgttacttaaaattgaatataatataactaattagaaccataaaatggcacttcatacaagtcaaatatataatattatatatatttcagataagtttttgggatatttgagtgtcagtgtcacctctgggtaactgatagtgaagtagtactatgagagaaggataaaaactgaaaaagaaccctatcgaatttttgtttgctcaaatttaattttcacattacttaataattatactttataatctatttgatcttgtagtatatacaagtatgcatctcaatagaacaacaagtgatagatttaatcttcttatattaaataaacatgcataatacattactaatacattcatattatataatttgcatacataacattattcattactacaatctggatatcagatatcatcagttattaaagtttcttatagctaaggttactatcactactacaatttagacgtcagacattatcggtcattaaagtttccgaatagctagggttacaaattgatgtctaattttgaatccacagtatatgaagctgaggaaggaaatgacaaattggaacggttccgggtttaactttaagaatttgaaaggccagatgcttagggttccattgagaagtatcttcatgacaaatagctataaccttattatcattaccttcttcttctaaattcaccacataagcttcaacgtcttgcaaagagtgacaataaaacactgcaaatggataattttgcttgtgacacacaacaattgatgatgactttctcttcttttctacttgtgttattgttgtgaaatgataatattgatgatcattatttttcattgctacttgtgtagaaattgcttgtatgtttttcccaatctttgaagttgtaaagtcaaccattgactctagtgacgtggcacaatagtgttcatcatgatcatgatcattatcttcttcacactctttgatggttttcttcaccatttcagcctcaactgagtgcggttttagtgaaaatttggtaaaaatttcgagtaattttttagatgagaaagggattgattgagctatttggcgaggcaagaacaaagttggtctagtagtgttgttgatgatgaaatttaagtttgttttgattcgatttcccggcttattaatgtcattctccaagaagaagataccttcataaatatttgaattgatattgttttgatcatcacttgtggcagttgcataagaggtcaaagtgattgctggtaaagtgattggtaaggtgattggtaatgcaatcggtagttgtgcaggcttgtaaggtgcaacttctactgtcggttctggagtaaggcgggctaggtcatgatcttttcctacacagacagacaataaataattaattattaatttcttgtattatataaatacatattatgtataatgtgttacataatactttttttattattattaatattataaaaaaaatataataaaaaataaataataattaacatgatgtttaaattaatattatcgtagatctattcatgtattttcacaataatataatataatacaatgcaaaattatattaaacacgtttttaatactgagttcaatcttagtagggtttttatcgtttattactcgatggtagaagatcagtgacaactttcggtattggtgtgttcgggaggacagacttccaataaagctctagatcaaagtattgcacaccataacttgctccaaacaacacctatataaaaacatatacatatataaaatccatgaagaagaacataataataattaagtagttaattactaacaaagcaagaaattgttaaacattattggttaatttctaaaataacaacttacaatgaaataagctagcatgtatgagaaatattgaaaccccattattcttaattagccacaaattatagtctctcttttataaatataccaatagaaatcaaggcaagctttcttatatatagtgtaataaattactgcagtaaaaaaatgtattattgcatagtaattcttatgagcaacattaattcccttaaaaagaaaagaaacaaaatcttatcaacaatggttaaataatttatttcttttttggtaaataatatcattgatatagatattctagacaaaactatacataatgtacttttttttcttcttctctaagataacttatttcataattattattacattggctcactctaattataaactttgtcattattgctttattgaatatacttgttcaacctaaagataattctttgtatagacaaattagagaaaaaaaaaactaattaagctagtgatttatataattaattaattagagtgagccaatgtgttcacttaaaataataaaaagacattctttttaattcccgtgaatcaattattacctttgttcactcaaggaaaaaaaattatttacactccataagtataccctaatattaaaaatcaaattaattaattttcaaaaaattacttttaatattttttcaaaaaaaaatcacattattttctattaatatcaatagctatttaattttattttcacattttttttttaaaaaaaaattatgtatattttattttagattttttcttatttaattttttattattattattattttataagtatatttttgaagaatatgagaaggaagaaaaaaattttaaaaaactaatataaattaaatatatattttatattaaataaaaattattaaaatgggatgcgcttatatttttatggggtgcaaataaaactctccaaaaaaatatcaagtacttcccttgatattttcacaaaaaataattaacatttttgtcctctaattttttttttatattactaagttgtgccccccaagatatacggcttgttactaatagtaatactactcaaaatataatttttacattaacatggtcatttcatcacactatattcaattttttcatgaaatgagagtgactcactgaatggtagctggtaaatagatgcaaattatataaataatacaataaaagacctttttttttatataacaataaatatttttatttttagttttttaattattaaggtaaaatgtgaaaagtacataatttgtattcatttatcaactacaatctaatacgtcactgattttacaaaaatattgaatagtgtgattagggccgaccataggaaaaaaaatatttttgggctctcatttagacaaaatatggtatttttcaaaatcaatcaaaaattgtatatttttaaaaggggaaaaaattttaggcccttggactaggtggaccctaggcacaagcctagcccgcctatgcccagggtcgagcctgagtgtgatggaaggactatgttagttatattttgagggatattatttacaagttgtatatcttagggggcacgacttagtacgtagtgtaaaaagttcaggggacaaaaatattaattgtctttcacgtaattagcaactaataattttattaataattagttgtcgctcttaaaaactttaggagtggtgacatctaaccccacactagattttttttcttttagtcacaacaaaatttctcactaaaaataaaaaattatgcaatcaaaaaattatttcagagcaatttttttccaaaaaggaattcattcaactaagacaattacaaagaaaatggctcatcaaaccgaaaagcttgacgaatacaaggaggtacaactccaaatccacatagcactagctttgattgaacaaagcttgattggctaaaatgtgagccacaatattggtttctctaaaaataaaaaacaaacccaacacactaggatgttgcaacaataaatgaatctgatcgggtaatacgtcaatgtcccgacaactaccttcactttccttaatcagttaaatcgccctcaaacagtcaatctccacactaaaccttaccctgttgaatactagccaataacccttcttgaatgcccattaatcagcctccagtggttgtctttcttgctgcaaaaacttagctgctacaaagacgacgatttaatcagaacaacacttttaatgggttttttaacttttaacaacacttgtatgtgataca

SEQ ID NO: 15839 - DNA, 1972 bp, Cannabis sativa
aacagatataattgacagaattttcagacactgaaattgacgataatccataaactttatagaattgaaaacagtgtagattgaagaaaaagcaaaagaaaaaggaacccattttaaaagctaaatcccaacttcagccctgaaatctagaaaaccaaaacccaccaaaaacaagaaagttagatcctaattgtaataatgagatcaactaaaacccctcataattgtttgcacagttgaataattgattcatagaggcctacaacataatatgttttcttctatcttattagttaccctcaaaagttttttgacagtcagcagtataccaagcaagtcaggatttaaagcttcaaatatcttcattgcttgcagctagttcaccataaactcaaaaacaataacaaggttttcattttaggcacacatatcttaattgttgttattcaagaaaaccttgaagaacagaaggttaagaacaaaatggcaatcattatttaatttcacacagaaacagaaacagtttctatgtagcaaattcccaattaccaaaaaaaaatacaacaaaagcagtaaacttttaggaaagtccaatcacaaccagtaaatataagaaaaccccagatgagaaaatggtctaaataatccaaaattagtatatacaaaaacgaaattaatcaaatcaaagaacttcaaaattcagagctaccatctacctaaaagagaaagattcttatggattacagcgcgaaagctaaatacaataattcatggacttacctcaataaaaaaaaaatgattaaaatgtgtgtatggtccagaaaattgatcaagaagaccagagaacggccatgaattgaatcagatcaagctctggcctcccaattagaaaacaacccaactagcgatccataccaaataccaagatgaaactcccagaattcaatgatgaaaagagagagagcaaataggagagagagagaggagagagaaagataatgataaatgataatggaagaaaaagatgaggaatattacatgtccacctccacctttaattattttttaatattattttctattattatgtctttattgttttactttgatactgttattagttttattaagcttttcttttttaaaatttatagtcatgactcatttatgctttatttatttattttttttgcttgttgggaaaataaatttaaaaccctcttcacttttgctaaaaacaaaagaatatcaaagaaaggatcttgcttttttttttttttcttcttcttctttaaatagcttccataatcatgaattatttatagtatgttttgagtgccaattttaccttttttttttttatattagattattttaataatttgtatttcttagctggaagggcattcaatcattgtttaacattcaaaagattcacaaaaaatcctccttatttagaatagtggtaatcatatttaatttaataaaaagatctcttttttgtcctactctatagtggtcatgacaatcaacagcatccttcttaaataaataaattaataataactcattaattctcaatcatgaccaaatttaccaaaaatcaatgaaataattcatgcactatcgcaaacttaaatgcttgatctgatctactactaaatcaaagaaccaaacccaagaaaaagcccatgtcccaaatcttgtttggtgtgaaagaaacttttgtataattttatcatttctgattttgataaaatgggtcacacatggaagaatgtgaaagatgggtcaactaaaattttaattggaccctatttaggctgctttcaattccaccatcaatggcccttttttccatctacaattaaaactctctcgagtttcagagaaactatttatatgactaaccaaatattgactaataattatgtaacttattcaataaaatagtcccttaaatatgtcaatt

SEQ ID NO: 15840 - DNA, 5831 bp, Cannabis sativa
agctaataaagttttataatttattaccatacataaataattaccggatagctattgtgtaggaaaacaatcacttgaaaaagaatcacttaaagtggtattatctacaagtgataaaatttcattatatacaatattttttgtgtaaggaatggtagaattatcattggaagaattttttataagaatcttaatggagttagatgtttttgctctagataatgccacatatagttgtccatgtgagaaaactggctcaggaagatataatcctacaaaatctaatgtttgtccttgtgctttatttatagtcatcgcaaaacatggacgaacgggaaattgtgttctcttaaaagaaaatggatttttgttattttcgagtggtataaaaggaattctaggtaaaaatactcgtttaccaatatactctcctgttgcaatttctgcatcaatgacatttttttcaaatctacgacaaattaatcttgttccattacaaagtccttcggtaggattaagattacgtagtaatataattggacaattaatttttaaagttagttcatgaggtggtataccatttggtgttaaagtattaagaaaatcttcttgtaaatttttttctgttgtatctaaaacttcatcataactgtaatatttcatcatatcaccaggaaaacgtccaattaataaattattaatttgatcgacgtaatcattttttggagttaaaataacatggttaataattaaatataatttatctttataagcatctaaatttggaaaaacaatatcaatcaatttgtttaaagagatagtatcatcttcataaggtataatcatgttatgtggaagttgaattctattagaagaatcaattttttcctcaccatttccgatcctaagcaaatatttagaaaatgcaggatccaatcttgctctcatattttgaattaacttaatttttgtaaataatgtccataaatatgaatttactaaacttgcattgatgatatctttttttcttcctttaggaacaacaggtagaacttgacgaaaatcaccaccaaatacaacaacttttccaccaaatggtaaattacactcagttacatcttgtaacattctatctaaagcttcgattgtttgtctatgcatcattggagcttcatcccatatgattaattttgtaatttgtagcaagttggctaacgctgattgcttactaatactacatgtaatattattgtgtaattgaagtggaattttaaatctagaatgagcagtccgaccaccaggtaatatactggctgcaactccagaagatgctgttgcaagagcaattaatttttttgaccttattttagctagtaaagcacggtacaaataagtttttccagttccaccagggccatcaataaaaaacatccctccattatttgtaaaaactcgttctaaaatgagattaaatgcatatttttgttcttcgttcaaattatgtatagatgcaaggtcatcatttgtgacaattatactcatttcttcgtgaattgcattatttattaattcttgttcttctaaattaacattgtagcaaaccaaatgataatcatttatatgttttccactttgttctagaattaagttaatgtgttttaaagctcttacttctgcatcagctaataatatgccatcttgaataaaatcttcacacataaaacttttatatttttcccatagttcttttggattgttaggactacaaaatattaaaagtgtggcaaataaacgacgtaatgcaaatggcattttgtataaggatgcttcttctaagcataaatcacaatagttatctccttctaatagtccatgtaataaagcagattcacgaaatgaagatacgtgaatatgatttacatttttcaaatcagcaaatgatgtgggtcctctaatgtgatttaataatatgcgtaaataatagcgttcaccttccattggatttgctgtgacaattctcccgatcactttttgtttctttctttcagtccaaattttaaattgtttattccaaacaaagtgttcaggaaactctttatacaataatgtcttagcttttttattagtagcattcattttaaagaattcagttaacattgttctagttaaaaattcacaggtaattactttagtaagattatctgatttattatatgtaattaattgactatcttcaagatgtaattgtaatggaagtactgatggatatatttcactcaaagtaaatccaaatattctccatgttgcttcaggtggagaaatccacctagcagactgaaattgttgaatctcatcaatatcatttggagcattatcactatttacagaaaagcttattcgatcatgacctttgtatacatatttatataaatattttacggctttaatagtagaacaaatttcaacattaatatgacaatcaaatttacatagcaaatatgaattatatgggattacccatccattatctaggtaatgtccgcgaattttgacttttttattgttatttcgtcgcttatatttaggataagaatcttcaccgtgataagtttctggacaataaggttttggataatgacttctacattttccatgcttttgcatgcaaacatttgtagggttaaaaatgccacaaggaccatggatcatgtgctttagaacaagtgagtataaatatggctgctcattttcattaggaatctcagctgatacaatcctatcaaaatcttctgggttaacaatttttgacattggctttaaaataattagaaaatgtgcatgtgggaggcctcttttttggaattccacaacatacacgtatgcagccactactccaaatatttgtcttttaaataaatcaatttttaattcttctaattttgctctaaaaatacgtgctaataaatcgggcctattttgtgccttatcattatcacttaattcttgttttatttctgcccaattaggattgcatgttactgttagaaagatgtcaggttttccaaatctttgtactaatgtcattgcatccatgtatcgttttcgcatatctctaggtccaccaataaaagatgctggtaaaataattcttcgaccaattttgaaacctctactttctcctaagtctatactatcaataattccttgataaagctcagcacgaatttctacttgtttatttttaatgaaatctagtcttgatgtttcaatttttacgtacatatcaactacatattgttgtaataaacgaccgccatgtaatagtattgacttttgtaaggatcgaatttgtaatttatagcaataatattcacgacaagagatacaatttctcttcttcctcgcttcttgagctaaaataatataaaaatattttaatcaacatattataattacttaaaacccataactgaaaattaaaataaaagggaagaaaaaataataattactaatgtaattacctctttcttcacaaattaacaattcagatggcgaatgaatttggctaaaatcaattagtttctcattagaacaacaggcttgatttcgtttagcaatcttttgaatacctttgtgccaaccactgtccccataagggaacaataaagggtattgtaaaggatcgtaacaggcaaaataatagttaatcttatgaatttgaccattatgacaaaaaacatttatatcacgagtaatacattctgcagatggatcatcatcaacccatactgctgcaacttgagatgccgaaggagtattatatactctttgatcaagtcctggatcggatcttattttgatttggtgattttctaacttagaaacatacctcaggtttcgaaaaaactgggagtatggatttatgttaagtatatcaattattttgcttagggtggataatgatagtttatctgaaaagttgaatcgattttctaattcatgttctgtatcatagaaatataactgaaggtatttaggatggttatctggtggaactaattgattgatgtaatgataaatctgaccctggactctaaaagtgtaaattcctttattacttctacataaatctttatcatattttacaccaaatgaagtgaatgcaaaattactattatatgttcgtacataagttctaaaattttgtgattcatctgaatttgaagtaaataattcatataaattattaggagtcccattaatttttaacacaatttctccatcagaacaacaaaatcctttactttcatattgaaacttttttgcaccacaatatttgcacaatgtcgacaatgttaaaagatgagtttccataggtaagtcatgtagattaattttttttctaatgttactgttcctaataattgaggctaaacttgtattagaattattgttacatacacttgtaacagtatcttcacctatgatcaaaagtacacaaataagtatacatgtaaccattatttgtttgtcaactctaacaaaaaaaatatttatacctgtataatttggcagacaacttaacattgaagtggatcctacaaaaatacacatatttattaaggggtatatgtatagtaaaacaataacttaataaactttaaatatatttagaattagtattatacctatctcaaaagtactgaatttagatagttgactcttccctattctactattaaaaattcctgtaaagacaaaaagaaatcaaaataataaatattaacttatatatagaaacaactaattaacatagaaatgtttagttgacttcaaattagttatagcatactcataccataatcaggagtaccctgtgcttggcatgctgaatcagttgtttctctaataacaattccatggtttctaacataattgtcacatgtatttgttttatttccatctcttttctcagccatgtttcccttttttattgcatacagttctcttctacgcttgttcctcttttctttttcttccacactccaatctttataagatcttttattttttacgatttgtggctcttgttgtacttcaagtttctttgaccaacccacagaacgactatacttatccattagttatatacctttactcttgcatatgtggaactgagagtaataaagtaaactatatgtaaattcctaaaatatcatttagttgtgtatttaattagaccttaaaattagtatggggtacaaaagtgcagataaaaagaggtatgactaattatatcgagaagaaattgagtacagaataggatagtatgaataggtgaataagggaatagagtgggtatgtaagaattaagagattgttctccacattatggagaaaggctaggccatggaaagtactttgtagtgaaaatagtaattcaaaaattttaacctcaatttttcaaatatgttaaaactattacagttcatttacataaagatttatttgaattatacatatagacataaaaataattatataaagatttagttgaattaagattgcaagtgcaatcatataatttagaaaaaaatatggacaattatactcatttctggaataatctataaaaatattcttcgtgaattaaggcaaggtcacaaatgatactcattatactgagtatatttaatgagtataaatattttagcatatactcattccagaatcaatatattaatatttaataaatatttaatgagtatatttttttttagcagtataattcccaattccagtatgtagtatgtatttaattaacattcagc

SEQ ID NO: 15841 - DNA, 14571 bp, Cannabis sativa
  modified_base (52)..(53): a, c, t, g, unknown or other
tactaaaaataacctaacagtcattttatgctcacttaataatttattaaannatataaaataataataatattaatgcaaaggtaaatataaaatttaatagaagtcatttaatgtaaaatatcatattaacaaaatattaaaaatgacataataaatataaaaatataatatttattataatacaatttatatcatgttatactgtctgtaatctaaatttacattaattttttttatgtaacatatttacatcataatttactatattagtaagtttttaaaaaataaattatattttatgtttgcaaatatctttaatgtaatgagattacaaatatatgatgatataatggccatattgcaatgtaaaactattgcaaaataaaggaaacaacgtaataaccaaatttcaatcaattaatatgaagcatgaaggtatatatatatatatataaatatattagtaactagattttagtaaaataaaaatcgtataaatattaattaaaattggaaaggtgacttctgaaaaaaaggaaaaaaaaatgaaattaagtaaacataagtaatatagtattcttttcattccatcctgcaaattgatggaataaaatttaccatacaaaaatatattttatcgattgtgccgtgtgtagattttttttttttactttggtcaaagttagccattattaatggagaaaagacaaaaaatatactgattggaaaccacaccatatagacatataatacatatcatcgaaaatatgatcctcattcaaataatcaggcctactttaaagacaggaacagtagataatttattggcataaaagatgaatttatggttaataataataataaattctctatggctaaatacttgtccttcattcttattgttcaatgtaaatataattaaaaattgatttaagttattaccaattactacatgctattgaatcatatgtctattaggtaatgattaataacatatcaaagtggaagaaaaaaatgccaaaaaaacagatgttggtaccttactctatattggtatatataatatataaaacacagatcaagtgagataatttattttaattaaacatatatgcccatataacataagctatttggtcaaacactcaaagttgcttttaacaaataattttgtttttaagcttgaggcaaagccaagaacatggttctctactctaattttggcctcttattaaatttcttacttgttgccacatctctcaaaagtattaattggaaatatataacttaaataccaagccctacacttaggtggcttgatggagcatgcctttctctctttttaattttttattttttctatggcatatgcaattatatatatatatatatatatctatttttctttgtgtatatttaggaatatttattacaaagtatcatttttgcccctactaatagaaatgtctcagttaaatattttaatagtatgttcaccataattatttaaaaaattaaaaacagatatattaataactatataatttatatgattatatttaaaaaaatgaagttataattttttttaattaccaaaaacaaaaagaaaaatattcatacttctttttttttgaaaggtgtagcttgcctccataatcaattaagttctagttacacattacaaatatggaaaattactatttcaaatcttctctttatctaccctaatacaaatttagtaaagtaactgttttttttttttttttgctaaaagcaaacttagataattatgagctgttatattgacaaacctacttatatataattaacccttacatttttttttgtttctttggatgaagaattcacccttacattaggaaaaaaataaggagaatttcgatactaccaaatagggtagagaaatataaatatgaagagtttatatagtacccttttagttggttgtcacatatatatttatatgagctttgactaccgaaatttagtcatatttattaataataataaagaaataaaaagactttaaataattaatgaccccacacgtttgcaatctgcaaagcagagcctcgtgctacccacgtctaccggcctacaaagttcagtaactcatacagtactattttattttttttatgtaaatttcaattaaaaaaaactaatcaatatttgatcctaatttgaaatagaatagaaatagaatgaccatccaaggtcaatcatgcatcatccaattccaaatactttattttgactgttgttgtaattttatttataataaccaaaattctgttaaaattaaattagaaactcaaacaaataattatatataagtgcaattagttatacatataatttttattagtgctgtaaaaatattaaactatatataagaatattaactacttcacttaataatcaataccaattaattttaagataaaattttataatttttgtcatggtatcagagtcatatctttagttgactttcaatccatacctagccgcaagcaaacaaaatgacactctcagctatgaacaagaataaacgagcaaataacactatttgtaataggtgatttaagattagtaaacgaaaaatagctatcatctcaaggggaatattggataacattatttcatattgatcaaatatattgagttatatataagaacataagttacaccatcattaccaattaattttgagatgaattttcataattcttgttaggctgtgtcatatgttatctatcgtaaactttaaagaggagtgctactgtcaacctcctattacaacctcttagtcaacctccatgctcaaaagtcaaaaatacatgctggaatatttttttttcaatttttttttttcacgatcgtgttcgttatgcttacaacatcattcttgtaaatttttaaaaaaattcgaatagtttatagtgtcaaaaatatgtttgaggttttttgaacacgcgcgcgtggtaaactggaatatcaagaactctgttttagacactgtaaactattcagaatttttaaaaaatttacagggatcatactgtaactataacgaataccactatgaaaaaattaattaaattccagcatgtaattttgaacgtaaaagttgactaaaaaattgtaatagaaaattgtaattagtactcctcaactttaaatacacttgtaatacatgtcaaccacattcattctacttgcacaaatttgatttattttatatttattattgtatcaatttatttgactcattaatacactatataaaaatatataaaactgtaaacaaacaaataaaattaataatttatcacaaaatattaatacactaataaattttttaatgttaattaattgccaaacataaataaattatgatatatatattccatgattttattcccttcaactttagatttctcttttgcaataaataaataatatatgaaaaaattacaccgtgcaccattttttggaaaagaaaatatattttgcggtaaaaataattaattacaaatattcaatacttaattttttgtaaaatatgtttataacaaagagtgtttgtaaacatgtaaaaaatatttagaaactatttacaaacatataaaaattgtttacaaacttttatttcttattttcataaataaaatttatatttttataatatatcatatttttaatatatatatatatatatatttgagtttttgggtattctaattttctcctataatatattactataaataaacccaataattaaacaattctgggttaactttaaaggttaacaaataaataaactcaataattaaacaatctttttttaaattaacaaaatattttacccacatatctctctaacaactatttttgaaatttttttaaattcaaatttcaaaaaataaacccaatcgcctttgtatcttacaaattgatcataatctaacacaaaatactgtcgtgccaaagaggttcgatccattttcaacacgtttaatttttttccagccttaagttacaaaaactgtgttattttgatttcgaaattcgttttgttacttataaattttaatagttaataatactgagttgatgagattattattatgttttacttaacttagtgtttggttataatacctatataataaataaatacactttatgttgattaaaaaatcatctggttgaacccaatgccaagacaagattaatgagctttttaagacaagagtaaagtaccatgtgagggaaaatgaaaaaaaaataaaataaaaagagtcaaggttgacaaaagaaagtcaattatacactctcatagtatgaaaactagcttcacactctcgtattcatctttactcctaaaaagaaaactttaataaaacgacaccgtttggatcaatcttcccatagagttgtgttcaaacaaagtggtcctaacccataacccatcacagtctcacacaaacacacacctacctagccacgcccacgcgactcagactttgctctgctctgctaaattcagttacaagctttattaacaaattattattttttctaagtggaccccacgaatttcaccttcacgccacctcacatcatctctccttcaccgtcaatcacacgcgctgggaatccaatctcatagtgtgaatcctctatatcaaccgtcagatgtgattactttttaaaacattttttgacagatgagccgttaaactgtcgcctcacaagtctcgagtatgtacacacccacacacatgaaaagattcacacgcgctcgactaaagaaaagaaaataaccactctcttattagtcgcaccacgtggcactactttggttgagcacctcaaagtggcctggccttgggctcgacgtgtcggttacgagttctacggatttgggcgccgcaagtaaggttgggtgggtgcccctagtcaaattaagtgaaagacggcataaataaataaatctgattttttttctttttaatttggtaatacatcactattttcaattattattattcctcttttatttttaattatgatcaaatttgagaaataataattgttggttccaccagaaagtactgaatagtaaaatttcgaggtagaaaatgattatcagtttaattttttttttaaatatagcaataatgatatatcataattgtttaaaaaaagaagaggaagaagaagtcaaatggcttattggatcattattgttggtgttaatgggtaggaggtgcaatttttatgagaaatattgaaccttgagaacattgaaacgtgacggacataattggtattagatttgaaaatcataaatgtaacatgagatgtttctcgtaccaaaaacttttttatttttgttaatgattcaataaatatataacgagttatatcctagaagctagaactttaatttctagtaggagtattattactattacatgcatctcgaatttttatttatttttcatgttgattcatgtgatcactattttttttttgtttaattcagatctataaataattaaaaaaatataaattaaacatgatgaaaaaattatattttctatagtcattaatcgttttatatttatgtatcttttaaatgaaaactatatgagtattattttgtctgtataacttgcaacaacaatgtgattatatatatatatatattgattcatattaatatattattgcttttgtagttggaaaaaaattaattgaaagggaccgggaaagttataaccatcacttttttatttttattttacgttgataagaataaacaatgtcaattaaaaataattatataacttggtttcatgaattatgaggctttttaatgcattactcaaaatattacgagtgagcaatttataaaacacgagtttatatggacatataatttgaataatcaatcacacattccaaaaaagatatataaccaaaattattttgacaaaaaaccccggaaatttggacttacattatccctaaattaagggcaataattttttctagatattacaaagatatttggagagaccagaccggctttcctttgagtctcaccgatccattcaaatctaccaaaattaaccatcattctaaaagaaatttataagagcacccaaaactttggtttttgtttttttttttaatgtgattgtattattttaatcgtttctgtctctttttgtcggtatatctctatagctccactccctagacaccgtgtggaattttttaacatcatcaaatccggctttgacattttccaaagtcaaccccaaaaccaaaaccagttttcaatttcttcaacacacttaatcagataacattaattttttttttttaaaaaaaaagaaaaactctgcatagagatgccaaccccacctctttctctctctagaaaaagcccacttgtgtctctctagtcagaactcttttttcttttatttatatatttatttatttattttgtaaaaacccgctttctctttctatatatacatgttgttatatattattcctttcccactcatttgcatccttatctttctccctcatcaaaagtcagcgccttcttttgtctttctctctctctttctcttcctctgtcctcaaagccagagcaagagccaacacaggttacagagcttgtcggagcaccaccatggaggtcgactgggatcttcaggcagtcgtgagaggatgttccatcaccggcgccggtgtcagggcttcaactactactactaatacaacaaccagtacttcaacggccacaccaggctcaggctcagcctcctctgttttcacggcggactttctaaccacggctacaacatcctcttccttgttattttcttcttcgtcgtcttctccattcggttgtagtactagttgtaatagcagtagtaatattagtgaacatcaaagctctggtcaactctttcttgttccagatcccaattgtatgagacccagaaacttcgttgttgaagagcttcatgagctttacaagcctttcttccctaaatctcaaactcagcttcatactcctctttcatcgctttcttcaatatgtagcagtactacgagtactagcactccttttaggtcaaatgaccaaatacgacaactaaagcaacctcaccaccaacaccaacccaatactaagcaatctcataataatggctccaccaccaccccacgatccaaaaagaggtacattaaaatttgatcgtagatcttgtttacaattaatgtcgttttatatggtttacttactttcttagtttacttttccatttcaggaagaatcagttgaagaaagtttgccaagtaccagctgagagtctctcttcagacatctgggcatggcgtaaatatggtcaaaaacccatcaaaggctccccatatccaaggtacttttctccttttgtcataaaactataaaaccagttgtgtttggtttaggttatatagttgttaattatttattaaagatgagttttcattaatttatatttttgggtatttattaatttcaggggatattatagatgtagtagctcaaaaggttgtttggcccgaaaacaagtggagcgaaaccggactgacccgggaatgttcatagtaacttacaccgccgagcacaaccacccagctccaactcaccgtaactcacttgccggttccactcgccagaaaccctctactcccccatctatctccggcaccggtgacttgaacaatcagaccaccaagacttcctctccagcgacctcaggtgaagaagaggtctctattcctcaaacgcacagtacaaccactgaaagcaaagatggacccgagagtattttaatggatgatgacgatgaagacgagtttgggctttcagatgtggccatgagcgatgatttcttcgtgggtttggagggtcttggaggtccgaccaccggagagttcttttccgataatttcccgacgagtttttcccttccatgggtcgctaacagcgccgccaccgcagccggtggccgctaagtatccggtacattcgatgacgttagatatggggttcaatacaatgggaaatgattaaatggagtggaatattgggctaacaatgatgattagtgagattagtgaagaaaaaaaacagagttgtaattagtcatttaattatatcttttgttaattaatttatttttgtttttgagtatagttataaaaactaaatattaatttttaagaattattatttttggttttatgtatttagtgcagctagaatatcacttctcttgttcatcaaactttctattcattcccttttgtgtaaaatttggaatcaaacatgttacaatgttatcattattttgaatggaaactattggtagtttttatgcacaatatagggtcagtttcctttctaatcattcattgtatgtataaaattgaattaacatcttgtagaactattaagtgtatgtagctaaaatacatgaacgtttcatctcatgtacagtaatttaggacctgtgtgccattgacaatggctattctatgtaatgtaatttattatagtggaatttctcttcagagattctcaaagaatgagtttggtttcctttaaagttaagttaataaataatggaatggcattttttgacatttagggacaaaagaatttggcatatccccattggcatgaaaattcattcactttgtgcacctgttttctaaccctttatggtattactgtagcttctgataaactaaacagcagagagaaaaagttgatgtgtaaataacaattctcaaacacgtttcaatatcttattttgtggtttttgaggccacgaaacttccatttcagtaacttttagttgctctgcctctcactgtctcacaccacaaatattacttgcaattttcttgaatataaatgtaaaatacagaaacggtaaaaattggtttctacgactgttttagatagaattctgaccagccattaattgaaatcagacgtttctgtttttgtagtggaaatttgaactgtatttaaaattgatttatcatctcaacaaaaccagtatacatcttcctctaattcgttttagccaaaataaaccttaaattcagctacttaaacctttagcttttatttattcatgtttaaaaaaaaaaagaagaaaaaaaaccccacaaagtttgattttataaacaaaacgtattattacgtgctgtctaatttaatctaagggaacaaaaatgtgacagagaagtataagaaagaaaaaacaaaacagcacagtacagaagaagttgaagagaaccaataccttgagcttaaaataataaaaggaatcaagaaataaatgtcgtaagctattttctagctaatattccaacacaacaaggctattatgcttgagtattgagaattcccacctaaaacttgcagcggtgagtgaaaactcctcattcccactagcttattaagaacaaagtcaacccaggtgacaaagaaggttatactaagaatataagctccctccgaatgtcaaaggagtgaggaaatatatgtatacacacattatttacactaaaatgctacacatatatgtgacaaatctttccaaccaatcaaattaattggtgtaatatgagctcttccgaatgtaaaaggtcttgtcacataagttgtgtaatattttagtgtagaaaactctgaatctgagtgtacatatgattatagaagtgatgtgttattgtttttcagtgaatgaaaattatgttcctttcaagaaaaataagtttagtttagctatgagaacaagaccccggtaaagcatagattagagtctctcacttgggattcagaagaagaagaagaaaaaggccttgattagatctgaatctagaccatgcagaaacatcaaatgctgccacatttaaaacctctttaaagccaaagaaagaagctccaaaatacaaaatcattccttattttaatttcgtacaatcttctcttttactgtcaaaaaagaaagaaaaaaaaatccacgtaacatagggtcttctccaatccttgccatgcataagacctcaaatgatcaaacaccagaggcagagagtagttgtaaagccaaaaggtttctctggcatctacaatggtctattaagagatcagatcaaaaccatatcacaaaaattccaaccttgtatcgctatctaaaattattgaccagatgttaactactcagagtatttttctttttcttgaacagaaacctcatagccctgtaagaactttcttagtttatctacttgcccaactgcagaaagccactctgtaagaacttccatggttatgtaatcaggattacaagcctgttcaaccatttgatccatgaattcaaatgccttgttcaataaattattctccctgaggcatttgaacaaggcattgtaagtggtggtattcggcttcacccctttaatttgcatatcattcatcagagacagaagtttttctacctcatttcgcttgtagagagaatctataagaatattgtatataacagtattgggaggaacctctaaagcagaagtcatacttcggaaaatattcatggcttcctcaatgttgtcattcaagcaataaccatgtatgagggttccataagtaacaacagttggcagaagaccctccttcaacattttcttcagcaatttatgtgcaattcccaagctcccagttttgctgaaatgagatatcaaggtattgtatgtgacagtatcgggcttgatattaacctcctccatttctttaagcatctcatgagctttctccagcttgttcttcttgcaaaatccgctaattaggacattgtatgaaacgacatccatgccaaacccagcctctttgagctttgatacaaccatgctggcatcatccatccttccagctagactcaaaccattaatcaagctgtagtaaacaatcgcatcggtggaacatccactgctcaacatctgatcaaacaattccattgccttgttgatattgttgacaccacaataagcagtaatcaaagttgtgtaggtaactgcattgcctttaacaccgtctttttgcatttcattgaacaactgaaacgcactgttaattcttccatgcctgcacattccatcaaccaaagtgttaagggtgatcacacttggtggcactgcatccttcttcatttgatcaaatagctgaagtgacctctcaatctccccaactttgttgaacccatcaatcaaacaattgtaggtaacagtattaggtgcacaaaagttttgtgatctcatttgttccatcaatttcaatccttcttcctgcctcccaactttacaaagcccatcaatcaaactgttataaataaccacatcaggttcaactgtgtattttcctacctctccactcattttttcaaacacttccattgcctcatcaactctccatgatttgcacaaacgattaattagaattgcataagtgatcacatcaggcttaatatctttatcattcataatcgccatgagctgattcatcttcttaaaatcattacttcttcctaaaccagtcaaaagggcattgcaagaagccaccgcaacataacccccagacttgatcacattttctaacacatcccaagctcgattaatcttcccatctctgcaaaaatttgtgatcaattgggtaagtttgaacgtgtcaggaaacacaccctgctcactaaacttagacaccaatccaacaatttcctcatccttgagccgcctcccaggtctatctcttctcaaaatcttggaaaaaacaacatcaactgttgtatcattgggagaggatatcgaattcggttcaagcatttcgtcgagcacatggagtgcttcatcaacatctcccaaatgaaacaacactgtaaccagccgattacaaacatgggtattcttacaatccggatcgagtgctttgaaaacaataagcaactcttctttcattccggccctccccaagcaacctaagagaagggtcgcggcattaatggtgagcggaacattctgctcctgagacgaaatatacagttgaaaaacctttttttcccagctgggttcgcggctagcaagctcgagaacggcctggaaaacggacgacagcaatggcaggtcttctgggcacttggaattttctcggacatagtcgaagaacttgagagctttggcagaggagtctagccgacgagcaatgtggaagaaacgtttcggtgaagagttttcggagtcggagtagaggatacttcggagctggtcaaggtcccagttattctctggcgtttggaggagttctacagcttgggttatggagggttcgtggtattgatgaaggttggattggagtgaaaggtggcgggagggcgaaaagtgtttgagtgattgaagccgaagaaggttgagcaatcgattcgattgcgttgatacagagagtgatacgattctcattttcgttttaagtgcgagactatggagattgcttcatcaattattattactcagctatggagaacgagtggaaaaacaaaataatatgagattatatttttgaataatctaattttattaataacaattaattaaaataatagtttgagtgattgaataatagtttgcaatttaatcggatatttttgtagacatcactaaaattaaaattaaaaaaacaaattaaataattagcggcctaattttagaaaacttgttattgctattaacaataatttgatggcgagctatcgaaaaacaaataagactaacaacgaaacaaaataaaataaatcatataacagacaagattaaaacactcaaaattatattacaaggatatagattaaaacactcaaaatcatattgtcatagagacaagactaatcgcaatagcaaaaattaaatcgcaatagcaaaatattgtaaaaattcacacgtatcgtttacaagtaataatactcacaagagtaagatcgatcccataaagactttaattaagtgccaaataatcaaatctttatttcaatttacaaataaataatttgaatgatgattgtaattgaataaaaaaattaaataaataaacaaaaaagtaattaacaatgattagaaatatatggtatttaattttaattgcatcaatttcttatgggaaaattcaatctaattactcttcaatttcatgtgattgcaaattattgatttaatttatattcttattaagacatataaaatctaaatcatatggcaaagtattgcccatttgtggtaaattacacataattcacattaaacaaagaaatcttaattattacacagactatacaagtactttcatccaatatcaaaatcgatatttatttcattaaaacataatcaaaattcactttttagattttgtattgaaatcataaaacaaataattagtgatcaagcaattataagcattgaacatgaaagaaatagtacacttaaaaattgagaaaaaaaaaaactagaattgcattaaaccataaaaagtatcaaataatatccattgaaaatcttaaatataagtttagctcataatcatcattctaaaaaattgcaaataaaattagaaacatcaaataaaagatagaagagaagaagtgatgaagaatgacagttgtacttgaaaaatttcttttttctctttaattttcgtgcctcccaagttgcccaacgaaagtctccttgaattttcgaaatcaggatttaaaagccctaatgtgcctctaaaagtaggcgggcgacatagccctttcagtaatgccgcaggcgactactgataatattttaatcataactcttttgatattgttcggaattagacgattcaagatattttaaaaatctgaaagagatctagattcacaatatttttttttgaaagtgaatgcattatagttaaaaattggcttgaaacttcaaactttatttttgatcacaaacagaacgtattgagcattcaaaacttaaaattattcacccattatatcctaaaacgccaaatttcattataaattcatcaaatatatttattttatttaacatgtttcttttcattttcaatttatattatgaattttaccatttaaatctaaaataagtagaaaacaagtgtaattctgcacaaatacttacaaataccgtatataaatatggaaacagcatacacacatctatctatggttttatagagattatagaagccacggttcatcatactgacaatgacatcagacattgtttgataatatttcactactttgtcccaacagaatacagaatatgaacaaaagaatagtctttaattaaactatgtcactaaaatttcacatcgttttctctctatctctctctctctctctatat

SEQ ID NO: 15842 - DNA, 8962 bp, Cannabis sativa
  modified_base (419)..(420): a, c, t, g, unknown or other
tagtatccgaaataatgttttagtaatttttttttatggtcatgtaaattattgatatcttgtaaaattttaagaaattcgaaaaagtttaacacatcgaaaattgtgttcaaacaatgtgttgcacgcagggccagccttgagaatatatgagcctaagacgaattaaatttgatttgaactcatgacctaaaataatatttcatccacctcaaccaactaaactatgaatatttattacttacaatacacttaaattttacttaaataaaattttaataaaaaattttatttttttattttggtcccccagaaagtgtgggccctaagcagggcctagcccgtctatgtctagggccggccctggttgcaagcgtgactattttattttatacgcgtgtaaaatagacggtttgaanntgttttctatattgtaaattatgtcaaatttcttaaaattttataaaatatcttaaataggtataacgtatatgaatatgaaaaaaattgaactaaattttttttcttcatgctaaaataagtaaaaggtacaccaatacatttctaaaggaagtgcattggaaaatcatccaataatatatgattttgtaaataataataataattcatattgattattgagcagtactctgaaactgaatatccaaacacaaaggcgcttcaatagctcctctctctctctctatctattggagactagggtttttctgaccaccaggtacacaagcttcttcccaattttaggttttctttctttcaattacattccacctttatctaatcttataatgacattttcaatttcatttctctcacaagttttgccctttattaatttctttctttgatttttttatgattttttttttctttacagtttcctccattaaaatctcaatagggaaatcttgttgtttattggtttgaataatttaagcattgtattgtgttcaggaatcaaaagcttcaaactttgcagttatgggtgaaagtggtaagcgaggtcgttcacagagagaccactatgagagtgaaaacaagaaccaaagaagacgtgggaatgagaaagacgaaaggggcaatgatgaattgatcgtttacaggattctatgccctgatggtgtcattggaagtgtcattggtaagagtggtaaagtcattaattcgataaggcaagaaagtagagcaaagatcaaggtggttgaccctttcccgggttcccattatcgggttttgaccatttattcctatgttaaggagaaggaagatgtcgagcttgaagacgagtttaatgaaaggcggcctctctgtgctgctcaggatgcccttcttagagttcaagccgccattgcgaatgcagtgtcttcagttggagattctgagaagaaaaggagagatagagataaggataaggataaggataaggataaagaagaatgccaagttcttgtccctgctagccaatctgctaatataattggtaaggctggggcaacaattaagaagcttagaagcaagactaggacgagcattaaggttaaccccaaggatggtactgacccagcacattcatgtgctatggaatttgacaattttgttcaggtttgtttttgtttgtccttttgctttactgggtatttgtatttgaaatgtagctttattgtgtatgttaaatttgaagaaaatgaaaatgatttggaagagtactaagccaagtttgaggacatggagttctagttgaccaattgtttaggctcaaaaattaaagtcaagaatgcttgaaacattaagtacaatatattattatccagatttgtcagtgaatttctttctagtatccgttctgtatgtaaactttgtttctttatgaacagataactggtgaatcagatgcagtgagaaaagcattgtttgcaatttctgcaattatgtataaatttcctcctaaggaagatataccacttgagacaaatgtaccggaagctccaccgagcataattattccatcagatgtcccaatttatccaccaagtgggctatacccaagtgcagactctattttgccttctagacagattccttcaatcttaggtgctacacatttacaggatattcagggttatgctgacactggaaatacatggtctctttattcatctgctcttcctgtagtgcctagttatagtgccgccactcgttctgaggagttaactattagggtgttgtgtccttctgacaagattgggcgtgtgattggcaagggtggtggtactattaaaagtataaggcaggctagtggtgctcgtgttgaggttgatgacaccaaggatgatcgtcatgagtgtatcatcactatcacatcaactgaggtattgcctcctgtcatgttatgttaatctgtttggcatttaagtgcacttttttagtaatatgtagatatctcttgtacatggtatgtgcaataggttggcagggccagggattctgcggcttttttgcaatcccctccctctctccttatctagttatgctgtcttatagaaacctcttgtacataggtataccatatgtgcaaaaggtgggcagagacggggattcttttactgtcttaaaaatcccgttgcagtttcctcactcaattgttttacacacacacacatattatacacgtacatataagaagctgaaccgggtagttaccattttatgcagttacttatttcttctctgtagtctatatgtttgaaatatgtcacagaacatgttgcttagtaacattttgaacctttttattgtgtgaataatgcaaatataaatagggaatatggagacatatgcctatttgaaaacttctcttctttcctttaaaatatcagttgttaagatattaataaggtgtacaactctttaacataaaaattagctaataacaatgcttggaagtcatggatgttaatgcggtgccactagcctatttgatcgatctattgttttgcaaatcaatgattgcatgttttctccaattctggttacactctgttctattatattttgtggatcattccaattctggttatacatttatataaatgtatatatatagttttctttaagtgcaaatggttatattgtatacatctctactatgtgttgataatatttgttgtttgtcacatggtagtcagaagatgacatgaagtctatggcagttgaagctgttttattgcttcaaggaaaggtaaatgatgaagatgatgacacagcgaacatgcgactgcttgttccatctaaagttattggttgtatcattggaaaaagtggttccatcattaatgaaattcgtaagaggacaaaagctgaagttcgtatctcaaaaagtgagaagccaaggtgtgctgatatcaacgatgagcttgttgaggtttatttcgaaaactttttaaagaacatggataatgataaaatcctttgattatttgacgtttacttttttttttaaatcagcattattatagtaatcattttaattttaattttgttcttcatacagatgtcgggagaagttggtaatgtaaaagatgcacttgttcagattgttttacggctccgagatgatgtattaaaagacagaaatacttctcgtaatccttcttctggtaatgaagcattatactcaagtggcactagcctgtcaatgtcatcaatgttgccttctgttcccccagttgctcctttgagtagttatgatcagaggactgagagtggaagtggcttgggcttgatctcatcaagcggcctctatggatatggatctttaccggtatgtatctatttgtacagttatttctgttcaaaatgtctccactactatcactagtactataataacagtttttagctgtagttttgacgcataatcattaatgccgttgattgtaggttatcttgacattaatctaagattttgattattttgcatcagcagattgatcgtgttagtagtttggttaacttagctagtgattctattggttatgtccttctagttttttagaatctcttttagaccttagagtgagtcaggcttgaatttttcctctttccgggtacttacacaattacatttaactttaattagtaacctcttgttctgtcaattaagaaatgagtgtttttttgggaaattcttttaattaattaataatgatgattgccttcaaattttgttgatttaaggtgaggtgataaatcttaattctctggtacttaaggttcatattttggccaatattgtttgattggcggcatgccttatttactgttggattattctaaggaaacatctgtttgctcccatctaattttgtctggcctttttcatttatcaatttttcaataatagatgggagaaaatggctacggtggatcaatgtcgtcctattcatccaagatgtatggagggtgagtattttaatttatgagatttggttgaagtttatatcctttgactttctcacaccatgcacgtatgcaggttgacacccccttcaacacttgagatgttgatacctgctagtgcagtgggtaaggtcatgggaagaggaggagcaaatttagccaacattaagaaggtgtgttcatcccttaatattctctcttctttctccttgtatttttacaattgacattcattgtcttgggtttgattaatatagttatattcctacttcaatgagtagtcacaaatgttcaaaagagtgtagttttaggtcataaatcacacttgtgtttttgtctaaacttgatgcatgaatgagaaatctggactccatttctaacttggtaattagacagattttagtaccaatatttcatacacatgaacaaaattaagttacaggtcaagaagtcttacacttaagagttgagaagaatttattaaaattgcttgaacgagtacatataactaatctatacttatttcattcatcttcagatttctggagcagcagttgaaatttctgagtccaaatcctctcggggagatcgaattgctcttatttctggaacagctgatcaaaagcacacagcggagagcttgattcaggcatttatgatgtccacttaacttctaaggatacctcttggtgtttgaaggtgaatggttatatattggttggttctcattttcgtttcctgtatctatctcctataggtttcggtttcaggtgagctaatctttaggtgtatttaccagtaaccatcaagattgtgaaggaggatcgatgcttttaaggggtgtatagggtttctttctttcttttatcgctgtctgcaacatcgccaaactttttaggaacctgataggttctttctttccgtcagtatatggttttaagaccttttgttgtctagtgtaggccccatctgatttccaatgctagcatactctgaatttgatgttctcgccggaaaacttattcactagtgatcataatttatcaatcttattatatgtgtgctattttctcttgccatttccaacctttagctttcagcttcttgctagaagcatcttctctgttaatggtgcaagtgttatgtgattgattacaatctcttcttttgagattcttcttgatattacaatttcagtgcagctccgaatgacggaaacttattctatacaacgagatttcctatcatggaacatctggtttctatctgtgcttgcttctttattctgtgtcctctatcttcattcttgtgtgaaaaatttcatcactgaattaaatcatggaatcatcctaaaaattatttatctgatctttttggatcccttttgcgacatgtattgctgtaaacttcagatcacttctctacctgaattttgcatatctgtttatgaaaatgtaaattgggggtggccccaaaaatttatcttctcgctactccgatcttcatcttagtttagttgactagtaaagaacactatagtggctttactcgttagtgataaatgagtgttcattcagcggcaaaatcatattgcgacatctattcgttttatgagcttaactgctttgcatattctgtttgtgaaaatgtaaacagggatggcccccaaaatttatcttctcgctactcgattatcatctcattcttactttagttgaataagaaagaacattattctgagttcagaatcgctttactcgttagtgataactgagtagtgttcattcagcagcaaaatcatatctcgatatctgttcggtgcttacgcaaccaaactatgagctaacatgttttgcattattagtgcattccttggagttatataatttcattggtatcaattgagtggtagaaagaatttatcacaataaagtcaccaaactcaccatgctccttccagagccgcctactcattttctttcgatacaaaatttactttatataatccagtacttggttgcctatatgttgaaacttataattttgaccttggctaggttctttacactctagattaattaggcagttggttataatttagttacagctaattaaatcatttagattgtagtctattcttctttctcgtcgtcttaatcgggcaaaggcgggactgggatctgatccttaggaagttacagtggctagagactcttaccatctaaaattaacttgtaccttcctttttagctttgttttatctgaatagcaaatcttgcttatttatacttttgctctacctctctcgatcaatttagaacttgcctccttagttttcttccgtttctagataatgttcataccatttctcccgttgatactatgtactttcatccattttaagccattctagtagaaatactaattaacaggattacgtttagactcgagagctcggggtcgagctattagcctttatgtaccgatcacttagcataggtatcgattgtttggttaacgaattcatttggcaagttgtaatcgaaaaggtaaaatttagtcttttcggtggggattttgttatagtgaaatctcctccaagtaaagtagcagcacatatttttttggtcatgtacttgtatttaaattttgtaattagtgttaaaactatttctaacaacaaatgtctaaattgatggtttgtattgtaatagcaaagtatgcaaacttggtgaatgtttcattatttacaaagccaaaataatagagttggtgtatctaagtgatgaggttatttttctgtgtttttaataaatggggattaggaatgggatcatactaaaggttaaaaatgttaataggtgcaaggattttatgatttttttaaatttttacgtgtaaaaggttttttttaatatatatattataatgatattttatagaatatatataaaagtaactgaaatttacataaaaaataatatacacataacaaaataataaaaatatattaattttatgtaaataaatttttaaaaattatatgtatagcaattgtggtggctatgaattgaattgtctcatcaggatttaaaattagagtttttacaccatatattaaatttttttatttttttacttttttattgtggggtaaatttttttttaaaaatactgtattgtgttaagtttttacggttgttccacgattattttttcagttgtttcacggttatttattattatattttactatattctattccatctaattattatacatgttataatgtcaaaactttaataagatttttttattttgtattggtcaagttttattaatttgatttgtaaatttttattataatttttaataatgatcatagtgtaaactgttcaaatcatattacactatatttcattttcgccgtgtggttttttgcgattttaagatctcgcggtgcggttgctgtttgagaaattataaaaaaatgcatatgtagtttggtttgaaaaaattattacaacctgcactacccgtatcgcaaataccctaacaaatatacactttgctcaacaaaaaataagaaaacaactaaaaataatgagaaatcaatctcgtgacaactataaataactagaaaaatagtttcatgacaactataatacaactataaaacatgatttattatgtttattggagatatatttttgtaaataaaaagtttaaagagtaaaaataaatttaaccaaaatggggataatggttcaaattgcatcaattcataaatatgtatacatttatttattaatccataattacttatcaaattagattaatataaaattaccttgacaaaattttatgttgttaagcaaataatttgcaaggaaaagtaattcttttatgtcacttatatttctattttattggtctccttcatttcaaattagaaagaaaatgggagcaaagaaagaattataaacgcaaatgaaaatgaaattactatttttttttttctctactcaaattgtgtaatgatacatttaagagtaatgtagtaatttcacaatgaactaatttttaattttttctaatagaaaataaaaaataagaatgaaataaattagaataaaataaaattaaactttatataagtaaataaaagttagttcctatcattttttttaaaaaaaaagtaaattattacgcattgaaatgattctcttagtttaaaaataaaataaaataaagtaattattctactaaaatgcttataaaaaaatccattttattaaaatttaataatttttttttttctaatctatattatttttgaaaaatttacatgaaaaatacaaaaaagtaacttttattacaattttacttttacaaaggtgggtcaacttttatacttctttagttattttatttactaaaatatcacttacacatacattttgcatactgatgatgtcactc

SEQ ID NO: 15843 - DNA, 6893 bp, Cannabis sativa
atagtgtaattgtaattattaattatatggtatatggtcaggtcagacaaacatgtcaaattgtgtaattacctccaattacacacaaatctaattatactgtggcttttcaaacgcgccctaaataatcaaatcaatctatctatatatttatgtaattgtgaaatctagagaggtgatttgttattatgatgcatctttcaatgtttatctttttttttctatacatttatataattgtgaaacttagagagataatgtgatattataatgatgcatcttcaaatattattttttttatattttttttcttttaaaatttagaataacatgactacataagattcattattttttaaaataaaattcccacatcaattaggaactactgtaagtgatatattgtagactatgggccagtttggctcagctgtactgtggggaaaagcagctgtagcagaactgtagaaaaaagctgagctgagtgtttggtaaattataaattttatagtgctgggagttatgaagattttattataataataataatattttaatctagttcattataatcacaaatatatataaaaaatatgttatataaaatttttattttctatatatttttaatttttttccatcgtataaatttatatgcatttgataaaaataatttttaaatattatttattttaaatattttttccttcaaaaaaatatttttattttttataatacataataaataattaaataaattttgagtaaaaaataatctattatagagtgttttaatcaaaacagtttttttaaaagtttgtttgtaccaactttagcttttagttgtagtttttccataaattcttcaataagttattttttaactgtttaccaaacaccttttttgtcacagtttttttgaaaaataacttttagcttttccaaaagttgtgcaaattggccctataaataatacattcaatttcttactttaatttttgtcaaaaatattatattttttataatatgggtgattagctaatttgatcttacactagttcttttatagaaaaataccatatataatttttaatgttttaatagttttttaatttttattattttaaattttgaatatataacatgttgaccaaggtttttgggcaacgtcttaatcttgtttcaagaaaactaattatgagtagagaagagtgttacgtgattcaagtattaatcaactatagtccatgagtcacttaattgataaataatattatataatttcaaagttctctttttggtctctacatttttcttttcaatccccctaacccttacatttcccctttatttataggacaggaaatgggatattcttgggtgagtggtgtagaaaatgatttaagctctgaattaagagtttggtgagacaagatttgtcttctatgcagttgatgtgatagcatgagtattagccatcaattagcattcataggaaaatacaatgccagagtagtatggctaaaccaaaaaggtatctcttttttgaaggtagattcatcttgccatctacgttaaagaagtcatatatagtgctttgtcttgggaggcatatcagacctcttggtaaatcttggacgccatacggtccgagaggtcctcattctcttcagggtagacttcaaattgggtttcaatattccatccagaattgttatatgctcccgtaggtcccccatgtttaataaatttctttaagatctaataggctgacatgttcagttatatcttccatatgggccccacagacacgtagtcccttcttcatttaccacatattttggtagaaaaatataactaatatttactcccaagtcctagcttgcaatttcgtaagttgggaatttcgattatcttgactctttagttccttcctggaggatttgtaacataatttcacgcctgtgtagagcatgcatgttcgtacaagcatgccagtaccctattgtggttgaattattagtcagtgtactttttgttctttggttttgatgatgtcaatttagtttcctaaaattaaaaccccaaataagtaataaatgcagggtgtcagtcagatactcgagtactccaaatatcctcccataaatgtatttctttacagtcctccctagtcgttagatcattgtttgtttcttggaattttaagggaactgtatgatcaacgagaagtcaggatcgcgagttagagttaaatgatataaatattgtttgcctccttctttctcacattatactctaattatttttgtcagagcttcaaactagaaatattgtcgagtcctctagattttcttatattatttctctgttgttacaaagcatagtactactttcggtttttgttagcaccaccaaaattatctcgatctcaactttctaattaatatttcttttttgtggtcaagttttggcctatgtattagtcttttttgagaaatccccaatttcgcagacgtatgcagaggaaagagggatttttcctttttcatatttttgggtcttgatcgaccattttataatatgtactgagaaatcatgaaacatgtatttgtccctttctctctttattgaatgtatatgacttggttggattttttgttccttgtgcgattattttctttttttttttttgtttgcattctcttattttattttcaaaggtggtgtgcttggcacccgatacctgatccataacattcttggtgactggtatccagaggagacctcttctctacagttaggggacccctattcctgtaatgtcctacaagtttaagcatgtcattgtgatttcttaattattctgctaatatttactaatcaaatggtttaaaaataaattgtacttaattaaaactttataataattaaatactttcataaataacgttgtaaataaaaattattttacaaaactcgggatccgaaaatctgttctttaaattcaaacataatacaagtgtcactcactgactaataaaattgagcccatattgttccacagatctaaatgctctaggtctaatcatccaaatatatacaatcttcactgagctctgatactcacagttattcaaccctagtccttacctacacatgcaacatatatctgtgagtgatagactcaataagaaaagcattaaacataaacatataaccgacctgtaactaggctcctatacacctactcacaagtctaaaactaggtcaggaaagttcttggcaaaagtatgattgaccataatatcagcctatactcagtagggttgtacataaatttttataaactgcccaaatcgaataacccgcccaaaccaaactgacataacttggatggataatccaactgaataacgcgatgaaaatataacctgcccaactttatattgagtaggttaaaaatgatactaacacctccaatcaactcgaactaacctgaccaacccaattaagagagttatatacatatgtatacatgttttattatatctgtgtacatatcatataatttatatacatatttaaaacattttaagttcaaactactatatttgttagttgatttgaactttaaattaaatcatatatatttatcttattatcacaattaactaaaatatgataattgaatgtaaaaaaaaaaaactttagttatcagtttgggcgggttaactcgaccaaaccgactaatttcattagacgatgttactaattttttttttcttaattcggcgggtcgcacttatatttttgtaacctgaattaaatatttttgtgattgtcttccagaaccatatatttagcttagtcacaagaaagtgattatcagaccctgaatgtttcatccagctttgcttatgggcagattgatcgatctacttggacccagtgaatgggtcatcatttttaatgggcttatttgattatacatgtgtcacttatccataaacctgcctttggggctcaggagtcatagaggcttgcaaccgccatccgaatttgttatcgcgcacatctaatatttattactacatgtgttattttattcaaataggcccattaagaatgataagcccattcacttggtccaaatagatcaaccaaattaccaataagcaaagccaaatgaaacattcaggtatgatagtcacttcctctcgactaagccaaacatgtggttcaggaaggcaatcacacatttagttgaaaaagcttagctaatcaaataattttaaatttttccaatgcacaaaataaaaagataaaaaaaatgtatattataacctcataaaaaaatattcaaatacaaataaaataaaataaataaacaaaacaaaatgataaagtgaatatataaatgattgaactaatgtcacttaactaaaattagaagaacttaccaaatgtactacaataacttagttatatcaaaagattcttataaatttatatttattttttttttttgaagaatgtaaatttatattttattgcccattacatataaatactaattatgaataatctaaaaagaaaaaaaaaagtaaaaaagaatttaaatgaaaaatgaattatgtattgtcaaaatgtgatagtttagacaagtttagataattatgaataaaattattaagttttgttgataaagtgatccaaaaatatatttgttgattggtgagaaaaagatataattatactaaaaatgtgtactattttactagttcacgcatgatttatattaataatataattaaagtaaataattaattctatctctaaaaattttaaatttattgaatgttatgatttcaaaaaataaaattatagaaagtaaaattttaaattaaaaatgcaaaaaagaaattaaaagaaaatatgctattgctaaggattgaacccatgcacttttatcattaaaataatagtatttaacaattatactatcattattttattgattgtattggttattataaaattatatagataaacataagttgataaatgttgtagtttttttaggtgtaattattattttagaaaagaaattaaataaaaagttattatcttttatattcaaaattaaatagaaaaataaaattttcgttagtcataaaactaaataagtaaataaaattaaaattaagtttggagttatgttttgaattttgattacttgaacataataattgaatagggtttaaaattaattataaataaaaaaaatattaattaagttgtagttttcaaaatttaatttgaaccatttgattagatcaatgtttacaaattgttatacctatccataggttaaatactcaatttctaccatactagtctccattcttaatatctttgactataagagaaactgatctagaacagttctcaaaaacacaacgatttctgttgagccagatacaatagctagctgctgctaaagttgctatgctaactcgctagataagcttcagatctgttgtagacaatcaagttttccaaccttcaaagtccataggccaagctataaagcctaaccaagcaaataacaactccaccactcttcgcgagagataacaagagaataagaaatgttcatgagtttccaaactgtctccacacataggaaaattaaaagatatatatatatatatgaaatttagccatcttatctttggttagcagttggttgttaaccatttggcaaaggataaagggatgtttagaaagattcaaagaactccaaacaactctatgatagaaaacctgagaataggccaaagagctattgtaaagtcttccatcttcgaacttacctttgccacttgctgccaaaatttcaacccgagagaattctgtttgaaatagaaaagtttgtgccaataccaactcaaatctggtttgaggcaataggaccaaaaagaaccatttttaagtaaatagtgttgatccatttgacccaaagcatatcctttttttgtgtgaatagaccagatttacttagccagaaaagcatggttccatttagaaccatttttaaaaccatgacctccaaaatctttcgaaagacacaccttatcccaagaagctatatgaattttcctcctattacccttcaaactccaaagaaagtctctatacaacttttcaacgtccactctgggggagaaaaaatactcatctagtaattgcgcagcccaagaaaaaatgaatgaatcaagtgggttcttccagcaaaagacaaatgtctacttgcccaagaataaagtatctgggtgatcttcttaagaatctcacaatcttctaccttccatttagttggacgcaaaggaattgtaaagatcgcttaattttaatatgataaattagcagataattaggccttaattatgaaattagatttctaagtatgatttatgaatatatggagatttatttgaattctaggtgtattatttatgctatatatgaaaatttacgtttttttatattttatgcccagcaacattggaacgcgacgtttgatcaatagaatcacattttcttatgaattagtattttagtaataacgcgacaacctagatagacattggtaattttgggatcatttgtggtgttaaaaatgaacaaattactcttaggtggaaattatattttttggtgtgtgcaaggggcaaatgagtaatttgccatctctttattttgtcttgtagtggaatgatttattaagaataatatgaagttaatttatttgataagtttaagatttattctttattagttagaaattaagaaaaatcaagaaaagcaccatctctctcttcaaatct

SEQ ID NO: 15844 - DNA, 9344 bp, Cannabis sativa
cttcaagggtagttatattactaaaggaataacattagaaggttaaaccttcaaaacaaacaaggtgatgtttcacattaccattcccttgctagcattaactcattttaaatagcccttaaatgactttttatgagtgtacaacaaaaacaataaaattacaaaaaaatgtgaaaaaagcataaaattttataacttgtacattttgaaaatatatttacactaaatcatatattttgagcttgttgagttataatattgtattgtattaaataataaataacattatatttggataaaatattgtattatattaattattatgaccataaattttaatacaatgtgaatcatattatttaatattatgctatagttcttccaaataaaaatatctccgcaggttttctgtcttcttggaaagtcagttgtctcccaaaagagctttcctaaaggcctaggtgtccatccggaaggagtcttcaagaaagctagtcttactctgaaaaagacttacagatggctagttgtttcgtcctgaaaagaggtcccagatagttgactccaactgtctctattcctattgaggaagacccttcagaatgtgtttcaattcatagtcccaaaagtggtcgcttcatctaggagcactataacttaagttgggaggagtttgttaagtttggtcataactaacttatacaacttagcacttgtagccatcgacttaattaggatctatatcttgaatctataaataccaccaacacttagcttttttaaagaagaacaaaatttgatgagtttcgagaggtgatcttgagagagaaagattgcgaggtagagagagagaggtacaaagaaaagagagagattgggcttgtgttttgtatgaagaatcttctatggatgaaaaaaaatttgagtaagagtgtgagagataaatactttgagagaacctaacagagaatcggtctcgactgtattatagcctgttcttgcttaatcagtaaagagaatttcggtggtgttccagaactggagtagagccataaattacatcgatctataggacttgaacaagtataaattttggtgttgattttattatgctattgctctaatcgtttttgattttagatactctgtttatccatgcttctaatctccagtaattgtgtatgaattattaatcttgtcattattaattgtttgttaattaagttttagttgatttaattctgcactttagttgtaattttcccacaaatcaaagcttggtaatcgatcaagaatgtagaatcaagattttttttgctgtgcaattcttgaaaaggcaattaacggtgtcaatggtgagattcaaattggagaagttcgatggaacaaatgacctcgcactatggagagaacgtttgaaagagatcttagtgcactagaaagtctctaaagttcttgaagatgagaagttactggctaagaaaaaaacaaaagagaaagcaaaatggagaagatagcttattacacgatcatcatgtatctgtctaacaatgtgagacgaaagcttatcgcagaaaatacggctaaagggatttggaaaaagcttgaagaattctatatgaagccatcaattgttagcaagattaattttctagaaaggttatatggttttagaataatttcttttctttctttagatgataatattgacaggtttaataagattattgtaggattggctaatataagtaataaggttgatgaagaaagccaggccatcattttgttgagatctctcccaatcgcatatcaagaagtcaaaggtgacatcaaatatggtagacatgtgattgcattggaggatgttcttgccgcactcaaatagaaggattttgaattataattggaaaaagaatccaagaaagaagaagtgtatttggcaagagggagatcacccaagaaagtaagttcaaagagtaagcaccatcactctcgatcaagatcgaagttcagatagatagaaactcgaaagtgttacctctatggaaggtccgaacacttgcaaagattttgcaagaagtacagggagtaataaggcttcaacaaatctcacaatagagataggaaggacaaccaacatcatcaccacatgaagaattcagctgcagtcaaaaaaagataatgatgactgctcaacggatggagaattattctccatctcgaaatctttaatgaacagggtatagattcttgacttcggatgcatgtatcacatgtgtccaagttgagaatcattttttgattataaatcaattgacagaggtaaatttctaatggaaaatgatcatttatacagggtcattggaaccaaaaaggttgccatcaaacattatgatagtggaatcaaggtgttgacgaatgtaaggcacatttcggagttaagatgaaatctcttatccctgggtgcgcttgaagatgatggttacagatacaagtccatacacggaaacttgaggatcaccaaaagttcgttgatagtgatgaaaggtgaaaagatcattgtctgaagctgattggagttagctgagcctagaaggggctagggaatagcagtgtttaaaataacgatttatcacacaactttaacttgaaaccaaggtggagatttattggttatggttacaagttttgtcatctgggaagctagttgttattcgagaaaaaagttacaggaagcttggtatccatccggaaagctttgtttagaaagttgtggccagttcggatggttctttcagacaacttgtcctccataagaaaagtcttgccagatagcttgtcaccagtctggagacgtacttctagatagcttgttgtcagtcttaaatgctcatccagaatgcttgtattcatccagatagtctcgtccgaattgactcttctgaatgttcgtactgaaagtgcgttactaaagctgatataatatgttgctggagttgccttggagactttaaagtggcattaattagtcacgatagaatcagaacaagttttagcaactatacaaatctatatatagctattacctttgtaatccatagaatatcagaccaataaaaacttgagtgaaaatcgtgattgtgtaaggttagaatgagagagttcatactagagagagaaagttcatcttgtaatctctttaatagtgtgtgaagatttttgtaaccttataaataatatcaacaaagatatgattgctattattccaaccaagaagtagatcgagcattgcacatgactcaattatttgggtatttggttccagccaacaatatccttaatttactgcttattaattcattatctggttcttgtgattctttaatagtattattcttgattgtgtgtttattgattcagtatatttgtattgtaagttattgattgattcacaacaattattttatagttagttagatattatttaagacaaaatttaataacagatttgagtctcttagagaaaaaaaaattaactaataactaacataaagagtgattatttgaatgagtcaatctaattagtatttttttttagagattttaacacgttctaaatatttttaacatgtaacttcttcctactaactacatattgcgttaccttttgttttattaataaaatcattcatttatattatattataataaaaacatgatcaaaattaaaaatgaagaaatcaagtctttgtagtaaataattaactcatctaaatatttttttatgaagaactaatctaaatgtagtcatccgagtattggtgtattgatacttaagtttctgaaattatgaagaggtttgatatatacttctctctaaagatgtactaagaaaatgtgctctttcattgtgcaatcaccaataataatttttctagtgtgcattgtgtctaaataattaataatatattttgtactagtatacattattattgattgtaacatgtaatacatttggaaaaacaaaatcctttatatttgactttcaacttactatgtcacaaattttggaaataggtgtgactcaatgaacatttttctttttacatatatacacgtaacaccccaaacaaattatgaagacaaagaatctagaatattatattgtattaggagatcagcaaataatatatcatggtcctaaatcattataggagtcaaacctaatattaagccagagtcaaatgtcaaagtcaactggtcaggttgatggtgagtaggagaggattccagtttcagataattagtttgacttgatatagccctcacatgcaatacatgcatataagttaatatattatatccatgtgttcccatgactagagggtgccaatccatgcctcgacttgcgtaaaatacaggctgcttaacaaataattaacttcatcttcaaggccatgttcatgttatattcttcaccaaaaacaaattagcatataaatactacacataatgacatatggtgcctttgtaaatcccaatattatcatccacctctataatcacagaattggttatgttgctttgtacatacgtttctgtaatgtttttattgtacatgtctactaattactatatataatactaacttgaaacctaggatgtgtttttacacaacccccaataatttatttctttatataacttgattatgattgattggatgtgtaacatagaataggtaaactatatttaccatataacttccatatggaactaaaaactagaaccagatcaagtacaatgacacactaatccccagttgttgggacagtgttattttaaaacagtttatttgggatggaccctctattggctcctgttagatagcaactacacaaacacaaaggaaccacttatttagggagctttggtccattataagcttcctatcatattctcatccagacattataatatacaatttctttgccttttcaccttttcttgttagtgtttgttggatcttgggtcgcattctattagatggaccctcattaaagctcttgacttttcttcttcttcttcttttttttcccttcgaatttggggtgtactgcattaaaaataaaaataaagaaaaagaagaagagacactctatttgtagagctgatttaaatacttttaagctcaaacgtgtcataaatagttgaactgtcttggtcttttcctttccaataaaaacagaagaagaaaacaaaggcaccgaacttttctgcgtaatttattggcaaagatatcagacgtctctctcttttactatgtttatcatttatatcattaccaatcatacttttttactttgtgttttgataacctttcttttttccaatggtttcaatcattataattgagtaattaatacgtaatgattcttttttattgtttaaagtaatgtgaaatgcttactcattcatgacagcacgatatgaataaaactatatactttataatgaatattctcataccatcacacagccaattatagtgcgcatggtcaagacattttttaacctaaaaaagaaaaaggcaatacaaataaagctttttccatccagagagttggctcggagtagaaagaaacatgaaagaagaaccatacatatatgcatttacatttatgcatacatatatattttatatgtatataacaactcctatacttacttgggggcattatcaatatcaatagcagaagaagcagtcatattagatccaaagaaatttatttgcaattgttattgttgggtcgaagtaatattgacagaatttcagaaaactgaggtcgttttgatgggcaattgttccagcactttgacattaaagacctcagcatttggggacagtcctttggaatgtcaggtctaagaccacaagcagctattcccacggctgcctgaaccggggaaaatgctgagtaggctgcctcgccggtcaccatttcccagataatcatcccaaaactatatacattactcatccaagtctctgtcacacactctggatcaccagcaattatctgtaatcaccaacagggaaagttaaaaaatgttaaagggctatgttatcttccataattgcattttgtttttaccacgaaacgtgttctgagtgagtcaattgtgaatagaaatattacactgaaaaatgacaggacgtgtgtatagactggtaatatatacctatattttataagctattacatgtgtaaaccgaatcatccaaaaggcattcatcataatattgcaatcatagaaaaacttatttataggttggacataaattacaaacatatatagtgtatttttgcataattatatacatgcaaaaacaaaaacagtgaatatcatggtctggtaaaggtaaatcccatgaacaaagatgatgctaaaaacttaaaaagctccattatgcgggctccacaagtagataatgtgctgaaagtagcattatcacaataaaaccgaattttttagtggaagacatgagagtgcttaaataaaggtaaacactataatattgaaatgtaaaagtagtaacaattatgaagacatgttatgcatgctcaaacaattatgtcgggttagtgacataaagtccctttttttcagcgagaatatagttatggtgggaactttagttgtattcaatggatccagataacatccttgagcacataatacaaccaagatgaacttttcctaacaaaacaaactgtctcaaaataagctggtgtggttcatggatgtattcctaagaaaagtagctcctagtttattcaatggctcaagagcacaagtgaaggtcacaaatgaagtcaattccacctttaagttctattatagtgttatattaaatatgtttagttgctattgctgcccaagtgcccatattctaatgcccaaatggtctcatcaatcaattcacttacacaattgagatggaataaaataatagtttccacgcacttgggtgtagaagataggcaatgaaatttgggtctaatggcaatcagacgacaaacaaaagaacacatcctaagtgcttttgagtaaacctataatgattatgcaaaacgtgttctatatggagataagcttactactagctagtggctgtgataagaacatgaattacgaaatggcattatcgttgctgacaaatagaaaagctatggattgtaaagaaaaaaagatatatgaatgaagataaacagtaaacaaacctcaggagcaagccaacgataaccatcagtctcgtactccaatgcttcaccaacactcttacaaacagctactatacccatgtcacctaaacaagcatttccttgcttatccaataagattctctgtgtgttgagatctctataggcaactccatgatcattcatgaacttgatcccttcagctacatcagtagcaattcttactatttccttggtctgaatcttcttgcttttaagcatcaagtcataaactgatgcaccttccatcaacttggtcaccacgcacaatccatgattctcatcaacacaaacgccatggaactgcaaaatgttcttgtgcccacaagtcatgagctccaaaagatcctttcttagttcgaagttgtatgaattacccttttcacaacctttgagcttctcgattccaaccttctttcccttgtaaacacccttgaatgagtttggtccaatctgatcaataaactcgagattatcagagttcaataaccatttccctacttcatccccacctgattgaaccgtctgccactcatcaactgacaccacaaaagatgaggtgggtaaaggcatctcaagctgcactttttgactcgaattctctaccccatttctaccattttggtcaccaacgtcctcttccatctctcccaattctctaccttttgtgttctcttcttggcatccacaaagcccgaaagcgaacttctttgaggtttgtttaggcttctttacagctgatttcaaggcgctttcaatccgggtcttgaaagttttctcctgcccagcttgaaccagaaagagaacgacaccaagagtagatcctttcctctcaaagatctgtatcttcttgcagcaaatagaggcactgtcaagtgcaccagacattactggccacgaaatagatgagttacaagcaaatgtaagcctgaaaacacacccctgaatatcgtcttcagacacttcttggatcaatatagaagggtggtcatccaaggctgcctgctctagcatttttatatgaagaaacacctctttcatatcaaaccctgcctgagcataactgttcaaaatcattgaaaaacaaagtaaattagctaaattaagacacacccaaatactctgtttggatgctaaggaaacgatagcaccagggagaaatttcaagaactaaaaatggaatatgtgagcatcctatcaaaaaatccaaattatattgatacaactgttttccttaaattcaagaactatcaactaagccttttcagtcttatcaaacgggtgctatttcattttcttttctaggctgccattttctctgcaaccaaacatcattaaaactcaatacagaaacaaaagaataaaaagaaaaggccaagttcaaaacgaacctgagtggcaacgaatcgtaatgcttgcgaatattagagatgagcttctccggtaactgactaccaggataaagttgagtgaggttccgtacaacaccgcaccaaacgacctttcgacaactctcgatcttggccgacgatgtcatctgatcccgagccgagtccagattcaacgagtttttaagcgaggctatgacctcagacacgttccggcccaacctctgaatcctcttctgcatagccgatggatccttcattcctgtaccagaagaactctccggcaccaaaccctctgatctatcctgggtcctcattagaacttgttctaccaagtcctcgtccgtactagctcgactggaccagcactccaaggctgcagccatggcttaccaaaactaaaaaaaaaactgaaacccaaatgcaagtcactccctaatccaatacccctttttggagaaaataccactatctatgattcattcatcaaaaaactgaacgccatagacatagaaaaaacagagtaagagagagaagagagagagtgagggggtggtttgtttcagaattctcagtcttcccataatttttttatctgacaaactataaaataaggaaaaagaaaaaacattaattaaataataaaataaat

SEQ ID NO: 15845 - DNA, 2342 bp, Cannabis sativa
  modified_base (2292)..(2293): a, c, t, g, unknown or other
attccgttacatttctccattaatttattccgattctgattacagtatagtaaacgtgccattaatgtagtccaataaacacccgtgactatttaccccaaaatgaatgaaactttccaatgtgtgggctgactattcagcggtcaaaatattacgcgtgcaaaacacgtgacttctagatttttttttttgtttattctctctctctatccagtattcagctatttcttgaattttcctcatttttttattctacgttccattttctcttcttatttttatttctcccaagacctaattattcaatttattccgatcttaaattttcccgatcatggacattaccataatcaccgataccgcctcaatcgccacgtctcagtatctagggtttccgattcccctcaatttctccacctccaatcatcaattttccctttcggattcctcctccgatcaatcctcaccatccaccggaactctccaaatctccgccgtaatttgccccgttgacgcccttgctcctccgccagtgaaatccaattcgttcagaaccacctcgcgtacgcttctccgtaagaagaggcgtattaggaggaaatccttcagcggtggagactccgacgaaggcagcgaaggggacgatgggttgttcggtggcgatggaccttttttcggcggaggcggcggaggttttggaggtagcggtggtgggggttggaatttcgatagatatggagggcataattgggatgaatcgtggtcttcttcgccatctgatccagctttcgatttcgtttatgaggtaatttcttggatagtgctttcgaattgcgttcattttgcgttccagaaagtttttcgaatcgctgctgatggaatcggcgatgccgatcgggaaaaggtgccattgagactgacttcagtttgttgattctgaattccaaaaatagttttaattctcaaattcaacgcttaacaaatctttaaaaattgggaattgattcatttgcccatgtgggtactatgacatgatgattatgatctcgctatcgaaaatttgtatatattatatgtaaatatagatattactattcctgttgttctattttcaatttacattgtatatttgttatatattatgtgtttttagttcttctaatttgtttattagtcaattcaattacgttaatgagctttcttacatattgttcggtttaagtatatcgtggtgaaaaggaatttagttccttgcacgaaagagatttaagatctataataatgataaggaaagtaccaatgtatgagataaattggctataacataatgttaatatgctgtgtttgttcaattgttcttgtgagattttgggttggattgattctcatattctaatatgctggaaaaggtaagtgcttcaattgttcttgtgggatttttttgacttgaaattttaagatttagtatacaaattattagataccgatatttcaaaaataaattgtctgtgctgtgaaagagattgtttagtttagagttaacaatcttggtccaattgagttggattaaggtaattgagctggattaagctgtagaagatatggcctagaaacactatgatatggcttttttgtgtggaggggaactaagataggccttatgtctgtatttgggccttttgacaaacactattgtatttggattcttcttacatcagtttcaaggtctgtttggttcatttcgtttcattttttaaaggaaattttgataccagttatcgtaattaattataattttgactaacaaatttattaaaacacacacacaaaaaattaggaattttcaatatttttacgatttttagatttttttttttttttgaatgaaagcaatctttattagacacatccgctaatacaacggactgaagagcaaggggaacatcgctcttagtaaaagacgatgtgaccaataacaagcaccacgtgtcatacagtgtgcggctttgttagcagaccgtttaacatgaccaatagaaacattacttaaagaagataaaataaattgacaatcatgaataaataaaccaaaaatagaaggcatagagaccgaactaagaatagcttgaaatgcaatccgtctttaaaatgacatttgacttgttattcctctttatccaactaagtgcctccttgacgcttagaatttctgcaatttcgggtcggcaactaacaaaagaaatagttaaaaatgcctcaattattcgaccatcacagccgcgtgctacaaanncagtaccgatctcatttgtgtcttaaaaaactgccccatccacattaat

SEQ ID NO: 15846 - DNA, 7189 bp, Cannabis sativa
  modified_base (1497)..(1497): a, c, t, g, unknown or other
tcccaacgacaggtaagtgtcgttattgatagtaccatttttaatgaggactttttggcgttggtaatagtggcgttggtataaaccattattgttgtagtgattgtagcaaaatttgttatatatttagtaggacattaaaataaaataaaatatattaaaaaagaattatcaaatatatatttttatttttttaaaatttacagtttaagttgttctggtaatttttacatgaattgttacgtaaattttagttgcgatttaagttagtccgttcgttactacatgaatttgcataaaaatatatatatatataaaaacaaaactaagtttaaaaataaaatatctctattttaaataataaatatatattttaaaggagcttactttattatttttgtttgagtaatttgcggcataaatacttagttaagtttaactcttagttacaaataaatacctaaatttaatttttggcggtaataatatctaagttataagttaattatttttgtatgacaatatacttgtttgttaattttcaaaatttttaaataatttataatatattaaaatacgattaattaattataaattacgtgcgtatctatttaatttaatttataatttatacgtgtacaattaactatgttaaaatttatttttttaccataaattatttcagtttctcaaaaataaatcatatgcctactataagttaatatataacatcacataaaaaaaaattgaaatttataatttcttataaatatgcaaacttattatcccattttctaatatctagtacatatattaacatttttaagtgatttatatctatataaatattgcaacaatattattgtaaaattacttatattatatattacattcgaacaatatataaatacactcaccattatatttatataacttattataatcttaaaacaatgaattagctacgaattattggagtgatcactctggtacacttaattaattacgacaagaaattaagtagaatataaaagaaaggcaattaattaatgaaaatgtttaattaattatgtgatgatggaagtttcatcaacgatcgataatgattggacaatgtggagtggatcccattcaaattctctttctaggtaagacgttgactattgtaaaaaaggtgtcaattctatatgctactaaatttttttatatgttattaattttaaaccttaattttaattttttattattacttagttatatatatatattctctattttatttaaagtaatttgcggcataaatacttaagtttaattcccagttataaataatatacttaagtttaatttttagcagtaataatatttaagttataattctaaaacttttgtacgtacctaattgttaagtgttaagtaaattgccacgtgaccatttcctaattggtccaaatcagtaaagttttattttttttaaaaaaataatttaaatatacnaataaaaaaatgacacgtgaataaagacttaatatttaacggtttagtacttacagagttcaaaaaatataacttagctattattaccgcaaaaaattaaacttaagtatttatttgcaactgggagttaaacttaaatatttatactgcaaattactcttttatttattttttattaaaatttaaaaattaattgcaaatcataagcaaatcaagaatgtttaatcataatctaattatattttattatatttataattaattataataattatccacaattgttttttcaatattcaatacatattttattttccagtgattattattaaaacaaaaggaaagatcaaattttaattaatgaaaatttcacgcccatgcataaaagtagttctctatgtaattttctattacttgtaaaaaaattgatttaatgatgtattaaaaaattggtgtaaatttgtcacatactaaaagttaatttaaatttaaattacaatatcatatgatacaaaattttcattagtaaatactatttttatatttattattatatcatatataatattttattattaaatttagctatcacattaaattataaatatttttatatttatttttattattttacatataatgaaataataataaaattaatgatataattataattaaattttacaattgtatattaatattaatgcaaatatattataaaattactttttatgttaaatataacacaatttttataccttctattaaaaatggtctaaataatttgctctataaataaaaattaacaaaggatataatttaaagttaattaatattcaattcaattatatattagattgatttttattttttacttccaacgtaaataaaacaaatgaaatgattgcatgtgtacaatcacatgataaagaaaaattacacaatttacatgatataattaacaaaaaaatgtttttaattcaatgatcaatattacctatgtgtcaaccttgattctacaagagaaatttccaggaaagcatcaaaatctatatctaacttttgaagaaatttaccatgaacatgtaaatacatatttatatatatatattaattaaataacatgtgaatcctagaattttccaggaaagatggagcttataattactaatcaaacactaatattttattacacacaaatcatcattagcattgtggagattttaacttcatttcttgtcaaataataaaagttattaaagttgagtttattccagtttcatttgagtagacaccaaaagcttatactgaaataataaaattaattaattatattctgttatgacttaattagatatcccttctctcttgtaatccaaccctaaatgtagttttaggcttgattgccctaataacgaatctcattatttatgttacccaatttcaaatgtgtttgaggtgagagagtgctgtaaaaattaacgtgcaattgtacatagtcgtcaaataagtaataaagtgataagtaaatatcgtctctacatgaattgattaggaattaattatgtaaaaatcaatactaactcaatttaaataaaacaaccaaaacatgaattgaactagactaaaaattcaacaagagaataaacaaaataagaaataaaaatgagcaaaatgaagagcttttcctaaacacttagttgttttctctagcgcctgattcaatttgttttgaggagtatcgtttccaatgaataaaaagtttatatatgttttctgagttttttttacaaatctctcaatgaaagtaccaaactgttaacacaaatttttattaactaataaataagtctttttttataattaatatactcagaaattaaatgaacaatgataataatagtagtaataaatgacaagagagtttttgacatatttttcaagctaactattcataatttacgagttcatcttattctgagattaattaatttttttgagatgacaatgaataaattgtgtacaaaatgaaagattagtatcgttctctttctttctccaattatagtcgtcctttgttctctaggttttgtcttcatttataagagtttaaagtgacaattattcccttagaatcttatacttataatcgttcatgaaacgtgcacaatccctatttcacatttacatcacatgggatagtgacaaacaatttctcataatcactcctttaacttttctataagtagttatgccgactatgcgtcattcttcttgcaatgcaactattttcctttagatgctttatcataaaaatcagcatctaagtataagtcaggaagtacttctcacgttcttccattagtgctgagtgaggcatacacgagacgcttatcacagtatgaaaattgtgaggtgaaccatgttggggatgttggctttagtctttcaacatactcatgagtacatgggtcaatgagctgtgagttttttgaataatttattttatctaccctttccaaacattcgtgtattctatgtatctcgagatggactttctctgttcttcgttcatttcgctagtctcatcaattattcacatctcattattgtctttaaaatgatgagtttgaataattctaccaactgtacttcttaaggcaagttgtctgaacgtatttattatttttttttttaattcaggctggttcatagtctaattttattacatgtatcaatattatattattgctcaaaatataagtataataatatatatctcaaaggaaaagattagtggaggtataatttgttgcccaagctggtgttggagaagattggtgagcacaaaaaataagatcaagcaagtagtagatatgcaacaattttgctcttgcatgtacaaaatcaaccaaggctatttggctcttaatattggtagaaggtttggaatcatttatcagttccaaagcatcgttttatacttttacttgcaattctaaataaagtgaaaactaaacagggactattgaagtttaaaatatgccaagaatcaagttgcacggtatgtgaaatacatacaaaaactgattgttcgctttgggcttagtatggaatgttaggccccgttcttccatcttatcaggccgctactttaccttaacttccacattagtatgatattgtccgctttgagcctaagtcttcacgattttatttttaggtaccttctccaggccttatactaatggagtaaatgaaacacttatatctacgataactcttgcttattcttattctaatatgagacttgggttaataccacaacaatcctctcctcaaaccaatgatctgattcataaaaataaaaaaataaaaaataaattgatagatgaattcgtcccatcccattggttgttttgcataacgttttcaaatcataatatgtatttatatatatatatattcttttgttattttacaatatatatttagtcagaaattaattaatgttaaaccttttactagagccaaatgattatatacttgaattcataattattattatccgaatatgaaacaaatatttgatatgactgaatctgtcgaatggccatgtgtaatatctattatcattgttttatttgcaatattaaaattttcaatagctgagttgtaaagaataattctgtcgttgaattaacaaaattgcattaattattatttttatgacaacgaatcaaaaggccacattgcccatcactagaaatgttacatgggttttctagaatgggcccacaataaaaggaaatgatcatttcgccccttctagtaggcccaaataagtattcatttcagacctacaaaggggcccaaatgggtatttcaattagagaaaattacctacaaatacgtattttctaaaaaatttataaaaatagacttcaatgttttaatgttgtataaagtaccgaatttttttaataaattgcttatgcgcgtataccgaaaacaaattttcctgacattaacttcactctccacttcactaattattttacttatttttgtctttttgtcaatgtattacttcactcttttaggtttttttttttataatgacattcagttttttttttttttttgaaattcgatataaattttttaaacttcacgagcaagagctaaaaattatatccttgtaatttattttttttaattaaatattgtgatatgcaaataaaaaaaaatagtttttcttttctttttattcaattaaccaaattttaaaaccaacaaatcatttgatattaagtgattactaaaaagtattttattatgtatatttaaaaaattcattagtaattctaaataaatcaattttatcgaaccatttaaataggttttataaaaaaaaaatgtaactttttaattattttttatgaactcaaataaaatttaatatacaaatcaattttatgagttaataaaaaagatattgtaaaataagttactactgttgtcaaagtcatttaggtttttttataaaaacaaatattttgttaacaaaacgtaacctaaattcataattaaaagaaaaaaaaaatacaaactagtatcatagactaattaatttttttgttattttataataaagttaccaaatgatttacataaaaaaaaaaagttactaaatgatatacttaaaataaatttatttaatatgaatataaaaaattatgaataatcaaatagtatcttaaacattatattacatctattaattttattaataagttatacagtaagtacttatattttgttgtaccttatcattaaattcgcaactaaattttggaggtaataaaaatgttattactataagtaaatgtaacttaaaatattttaaacaataagacaacataatattaactaaaataatatttttgtaagtaactaattatgtggtacttaagacacgatttagtttccttatatatatttttaaaaaataattatcgaaatcacataataaaataaacttatttagatactatcatgctacatttaaatatgaaagaataagacacttatagtaacctgtcataacattaataagaattaattatgtataccaatttcaattgcaaattatatataagattataaattattataaaatcttttattatattatatttaaaagttacgatatgatatattaataacaaatttatataataaagcattttgatatgttaatataaaaatttaaaaagttaccaaagggtatcttaagtataataaaattagttgctataaaaattattatacatactaattttactaataaactatataataagttatatattttatatatatatatacatatttaacacttaaacttaaatgactaaataccaactatttttataagttactaaaagtaaatattttgttatgtaatgattgaaattaattaaattattgttaacattaatttattttaatgaacaattttgataatttcaaaaataacttataaagaaactagatagtattttaaatattatagaacaaatgataaatttgactaagaaactatataataatttattacattttaatgtattattaattttaaatatatttgaaagtaacgtaaaagttatatatatttatatatata

SEQ ID NO: 15847 - DNA, 9599 bp, Cannabis sativa
  modified_base (7833)..(7835): a, c, t, g, unknown or other
ctggaaattctcaactgggtaagcgtagttttttctttttcgtttttcattttggttgatctggtaatgggttctaggttgtgctggagatctatctctactcgtttcatagtagccatcatgaccaacttattttttctctttctcctctgcaaattttttaaatgtttgaaatttatggaattttagctttgaaacttcttttggtgttatggttttgtgatttatatagctggagttcaatttgcaattttattttgtttctctgtttttatgtgtcccgttaaggttatataaacgggacatgaaaaaaatcatacatgtataataattaacatactaagtgaatgtaatgtggaatttggatttatgttgttattgatctagtgttgttactaagtgaatgggttgatcccaagttcttcggacattttaaatagttggtttattccttcatatataacatgattgagtttttggtgtaatttggttaggttgattaaaactttcaaattttgtatcatgaagaaaacataacactaattcgctgtttttatgagctatgtaaagctgtaaaagtttgattgtgttgcactgattgtctaaatggggctggtataatattgcggtttgatgtctgacctgttggagggtccacatcatcataagttgcttcatctaaattttgatactattgttggttgtaaatacagactgtggtcagccggtaaacatttgtatgaacggaatggtagaatgcagtgtttgccgtacaaaactggtgtctccaagttcaaaaactatagccagggcatatgaccggcatagaactgatgtatcttcgaagactcgaatccttaacatccttttggttgttggagactgcatgttggttggtctacaggtgatgaaacaatctcacataatacagtaatacctttgtagacaatgtttgatttttacattgcatatgatgactcaattttaatcatttacatttaaattggatattctgaaactttttatgttttgttgctgctgttttaactgatttagacccaaaacaatgaatctatttctattattaaattgtgttagttcttttctacatccaaatgtttttgtcggtttcttactcacatgtctctctgtgcagcctatattggtgtatatgtctaaagtggatgggaaattcaatttcagtccaatcagtgttaactttttaacagagttaactaaagttgtttttgctattgtgatgcttattcttcaggtaattttataattttcttttatcagcaaattcaattgctttttatcttttttttttacactaaaaagaacgattgctttcatggttgacttgcactaatgttctccttcattgtgtacttttgtttttcagtctcgacataagaaagtcggggagaaatctcttctctcgttgtcaacacttgtacaggtaagcgggtagctattataaagaacttgactgcacacgagtattgtagcaaagttagccttgtttggtgaggccataacatgtgttctgggaatttcattctagtctcctcatgcgggattatgtcactgtctattatttaaagtgttccatacctattacattatgctatattttcaagagttggctgcatctaagttttctctatgtttgtttttgtttatgctgaggggttgctggttagaaatgtattaatctaagctgtaatgttctccagtctccatttatttatttataactataaggaacatgcatcgtgatctctttttacctctgctttttctccctttgtgcaggcagctcgaaacaatgtgcttcttgcggttcctgcttttctttatgctattaataattatttaaagttcactatgcaggtgtaattctatctagaatctataattgttattttcaggcgtcatattaaatactgcggttttgtaactctagttgtatttatttttgtgcagctttactttaacccagcaactgtgaagatgcttagcaacctcaaggtaccttaagttatgatatctttaaaaacatatgttttcatgctaattaaattgtcacttgtgttgtattgtttttatctagaagtgtctttgggccttgacttttgatatactaggcattttgtatataagtttcttctctttaatggttaaagaaactttgacagttaattttatgtcaaaacaattttttattggtaattaaatgtgagtttatacttgtagggtgtcaatcacacttgctacattcaggattttaattaagccagctttttctttgtgtcgatatttttattcttttctttgtcatccttaataacttttactggcttgctaacaattgcaggttttggtcatcgctgttttattgaaaatgataatgaagcggcggttttctattattcaggtaaatttgccgaataaatgttgtttgcgaatccaacatattttgactttctggaggtgttaaagtcaacactaaatatttattcatattcgcttttctattctggaacagtgggaggcacttgcccttttgctcattggaattagtgtgaaccagctgaaatctttacctgagggccctaccgcttttggtcttccaatatcaacgggcgcttacttatatacattgatttttgtacgtatctaaatgatctgcatttgcatcattgttcagtatggttagcatgtatctgtggtattatgtagattacaatttgaatgattcctaatgctgcaacattgattaaactgtagaagggtctctttctctttttcgattttgataatcaactgaaactaattataaataactgcaccaaattgtaagctaggaggacctgttttatagaatacacatgcaagcaaaactttgtaaactgccagagcactctttttattttttctttctaattaaataaaaaaaatacacgactaacttcaaataagaagattatcagatttttcatttcatgaaaagataataaacattcaagtgttttaaattataatttgcgaaatgcagttgttcaagtgtcatgctggttaatattgttataagctcatctgcatatatatttcaaaagactgccatgcttgaatggtttgtatataagtcaaagaggatttactgaacttatgatatacgaaaatttgtagttttagtgcttattgtatctttaatagcaatcacagcttctctgctagaactgcctttctatcctaacactagattcttttaacctgaatttgaaatttatctcagatctaccaaatttatggtaagtataaaatgcattacgtcttgcttcagatgattttatttttatgtagcattctatcaagatgtgacatatatatttgatatgaaacaacgaacagcatatttgatctgcttgcaaagcagtgtataaaattttggtgacattttatgattatctgttatgatttactacttactagaaggtcttattgaaaatgaatatactgatgcaggtcactgttccatcactggcatctgtttataacgagtatgctttgaagagccaatttgacacaagtatttaccttcaggtaagtttctacttgctagtagtgctgctctagtgttcctgtatttactatgatcacattgaggagcttatttgtacttcatatcattgtagaaaaagaaattagactgaaggtagaaattggataagtttggttaagactaggcctttcgctcttacgttcagcactacttgttcttatctccacctaggtcaaatattctaatggtttgttggcctgttcatgtttaaatacgctgaatattttcaaaggtggagattttgtttttgtttttttgcagaacttgttcttgtatggttatggtgccatattcaacttgctagcaattcttggaatggctttatataatggtaaaatcttcacaaaaattatatcactttagttgacaacttgctaaatttgcttctaatttagtttatttagaacgagccttacagttatcaagtttaattatttatatgttgagctcacattttatcttgttttgatgttttaaggtcctggtagcttggacctgctgcaagggcattcaagggcaactgttcttttaatttgcaataatgcagcccaaggaatattgtcatcattctttttcaaatatgcaggtgatcactgagttgctttaatctttgttttattttttcaccattgttaattgcacccccttttctatattcccttagttgtatttgatctcaactgaatagtaagtcatttatgattcagactttctgactcttattcctctcttacttactttaatattaacaacaatatgatgctgaatattgtatacacctctttttcttcctaagagtatgcacatttgacttaacctttccatgtctgtacaagttagtggtatcgtttagtacaatcggtagggcatgaataccagatgcttttaaggttaaggacaacatgaacataaataaaccaaacactcctaaacatttaaattcccaaagtttgccagatatttctctaagtcttgacattgtgaatataggtgacttttttaaatatgactggccagatatatcgcctttcagtttttgttgaggttttatactttataccttatgttttggtccattacctaattggaccctacatctctagatatttcattttggacctctagttaaagattataataaaaaccctaagggcgtgtttggttgggggtagggaaatggaaagaatcaagtttttattttgctttatgtttggttgtgttttaaaagtattggaatgtcattctaatagaataagtttttcactattttggtgggaatgactatcctattgaaaaataggagggaaaggtcattccaattatagattgaaaattatttttttaaataatttctttatcaatttttttgtgcatactaaattttattctatttcattcctgtttccattctatttttttacatttctgttttaattcttcccaaccaaacatatcttaagatcaaaatattttcacatattaccaaaataactttagttgtaataagggttaatatcgttgttggacacttgtattttattactcgtctggaccttacattttaagaattctatttcaaacactgtattcattaacataattttatttaagagagaagaaagagaaagcactatccttgaacgatttgttgacaaactgattttcaatctgtaaagtcgttgttgtcctttgtctaaaagttttctgttatgcttacagatactattttgaagaaatattcatcaactgttgccacaatcttcacgggtatagggtctgctttgatgtttggtcataagcttactatgaacttcatcctaggaatatctattgttttcatatccatgcatcaggtaagtttgggagaagctaagcataatatatttatatatgtatatttatttttgctttccgaagttggtttatgcctgaacattttttctgtacagttcttttcacctctttccaaggctaaagaagagccacaaaatggcagcttggaaatgatagacagtcagaacaaccagaggtatgtttatgttcacacctttgtctatattatatgattgtgaattgttttaattggcaaaagcctgtcctttgtctatattatatcattttaattttcaaatagatgttattttactgagatttttttcttaaataccagaaggtttgcaaactttcttagtgtcctaaccacctacaatattttgggaactgaaaattatagcaattacaatgtataaataatattttgctgttattagtataataccctccatggagacagtcaaataagtcccaatcgtttgctcgtcacttgagcatgaacatatttacttttttttttctttttgatagaatgagcataataacttagtatataatgttaaaataatgtactctccatgcaaagtagataatgaaccaacttccatcagagaaagtctaataatcccatccccccaccctccagctcgtttcccccctttctgttggggtgtttgagaaacatttgattggttttagaaaccactttcttttgggtgaattcacataaatttaccaacattatgttgattttgtatttttcaaatttgagttaaaaaatgaacttctgatttagtaactgaatgactgattatatctgacatggcgtctgcttatgttaataaatttgcaggacaaaggaagcacggtttctaaatatggcagctggggcaaatgaagatgtaagaatctttggccaaagttcatttaaatttctccgaaatgatcttacactggaatttatttattttatatgcatttttcaggctagtcatcgggttgagtatgaggagaaagcaccgcttcttccactatagggctggtatgttttcagtacgtacttgtgttacggtggttccttggaacttctcatgaataacgaactcaaaaaaacactagttttatttgtgtgtcttgtcgatttgtttgatgatgacccttactcctttcgatttcaggaatggagtatgcattggttttgttagtcacattggagattttgagaagataaccccagtttttttttgttttagaaaaatcagtagaatgaagtgctagacaaaagttcattactttggggaagccctttcttcagctcgtagggacggtatccatgcccgccttggttggttcaggctcccgtggtcacggacaaaaagtatcaggcccttaagcaattcaggtttctgccagacacaatcctataatcataaactgaataatatcaattttttaattcatatccccacttcttatacgaagaaattcctttttctatgtttatgagaatactttgctattagttttcatatacatggatacaactaccttgtaatctctctcgtgtcaagaaaagcaaaaaaattcttttactgtttttgaatcttaaaaagttgaattctcaaattttctctatttcaaattataaatctcagtatatcaattatttttatttatcttataatttgtagtttcaagaattctaatgtaatttgttaacctctctcaagtaatgataaaattaatttaattaactaataatatatctctattcaatattaatcaatcaagcaataataaagatttgagaaaaaaaaaaaaaaaaacaagcaatatgactttctttaaatgaaactcagaattagtggaatatttaatctcacatttttcttatgtcaatcaattttaaatttgattttagatcatctctaaagtgtagaatctaaactctacactaagtaatggtgataggcattaacaatttgtaattaatacaaaattgcttaaacaaatagcaataacaattataagaataatctaaaaaatttaattgataatgtgcactctttagtgtcttgaaaagtttgtaaagacatttctatttataaataagagttgaatatttttatatatgcttgaatgttaaattattaatatttgatattgaataatttattaggggtgagcaaaaaattcaagaaactgaacaaactgagtacaccgaccgttcgaacactaaaaaagctaacaccgaaaaaatcaaaaactaaaaaaactgcctttgtacggtcagttttactgtcaatggcaaaccgaacgattaaatcgagaaccgaccgaacatatatattatacactatacatatataatnnnattatttttgtacatatttaatactagaagacaactacgtgcaaagcacgttgtatctttttttttttgttaattttttttatttaaaaactttgatttaataatatgatgtttaaacaacttttactacatatttgataacataagaggtttaatcaattaaaaatattacaccataagataagtttgttactttatttttttaaaaaaaattaattatatgtaatttataatttaagatgaagatttagcaacttcctattgttttgcttctttaatatagtatacattgaaattcttgtactttttgagtttttattttcttttaatcagcgtaaatttatagtgtctagtacttaacttacaataatttattgaaaacattttcaatacatttagttttttcttaaaaaataaattttaaaagttgatatagcgaaaaaggtcgagttatacatactcgtatgatttagtcaatctaattttgtttgtgcaaatgccagaaggtgtgagattcgattgaaaccttttatagatagaccaaactctagtgatattgttttataaatccatggtttacttattcggacagattttatgttacataatgtaaatactgtagtgtattgtacaccgaacaattgttttgttaaacgctaaatttatagaagtgtgaagctattctcaagtaaaaatttaatgtggtgtctcactacatttaataattaagaaaattaatatagcaagaggaggatgtaattctatttagggctaaacatcgggcgggtttatcgagtttcgtgttcgcaggtttcaggttcatgggtttcgggtttaacaaaatgtaaccgaacccgcacctggatagggcacgggttggcgggtttcgattggccgggttgaccggattggcgggttgacccggtcaactcgatcaactctttaaaaaaattaattttttattttatttttttatttattaaattaaacatatataatataacaattttacggttttttatttttaattatttttaatttttaattaatatatataaaatgtaatcaaaaaataaaaaatatatataatatattaaaattgcgggttggcgagcgggttcggattcaaacccgagaaactacttaaaaactcaacccgcgaacccttccgaagggtactaggttgaacccgacccgctcgaagattttttttttaaaaaaaaattacgggttcatcggatcgggtccgggttgaatccgcttgaaatgttcagtcctaattatgttaattgattatactttaataaaattctgaaagaaatgttttcttacttgggtgttatgatgccatcaactctatttttgtagcagaagtgcttgtgctgtgtatccttgtttgcatgtcaaaggtggaaaaataaaaataagaatgggcagatctttaattctgatcagatcctatcctaatatgaagcaaataatccctttacgctacacaatttggaatgtacgtgaacagttcttttggactgcgtccatctcaattcttttgaatggccatgtgtgtcttaattctctgtagagtatcattattatagcattattgttttcttatcttcgtcttcttcttcaccgtttttggtcaaactaattgctcacccataccatgcgtaattctagtttctgcaatgcccaaaccttaaaaccacaggtttcggctgttaaccttgatttggacagtccccttttggacacaagttgttt

SEQ ID NO: 15848 - DNA, 3444 bp, Cannabis sativa
tgggattcttcccttggattcaatatgccagctcaaatcgctggagaagctctctctggggttcaattccttgtacggagaagtaagggatgacttgagaaactgcacgagattgaagtatttggatttgggtaacaaccattttactggaccagtccctgatttaagctccttgagcgatttacagtacttgtatatgaacaagagtgggttttcaggcacctttccgtggaaatctcttggaaaattgattggtctggtgaaccttagtcttggggataattcattcgaatccactgatgagttccccaacgagctgttgagcctcactaatttgaatcttctttacctctcgaattgcagtcttcaagggaaaataccaactgggattggaaatttggtagagcttaagaacttggagctttcgcataataatatcaccggaaatattcctgtggaaattggaaaactcaccaagctatggcagcttgagctttacaacaatagtttaactggaaaactcccagttgggatgagaaacctcacgaaccttgagaggttcgacgcttcaagaaactatcttgaaggcgatttgtcggagttgaaattgttgacgaatctagtttctttgcagttatataagaacagactctccggtgaaattcccgccgagtttggagagtttaaacgccttgtgaacttgtctctgtatactaataatctgacagggactctccctcggaaactgggatcatgggcagacttcgaattaatagacgtttcggagaatttcttcaccggtccgataccgccggacatgtgtaaacgaggaacgacgaagaagattctcatgcttcagaacaacttcacaggtgaaatcccagaaagctacgctaattgtctgagcttacttcgtttcagagtcggtaaaaactcgctcaccggcaaagttcctgccggaatatggggattgccggcgctcaacataatcgatatcgagtttaatcaactggaaggtcggattacatctgatataaaaactgcaaagaatcttactcagctattagctaggaataaccggcttcacggtgaattaccagaagagatttccgaagcgacctcgttggtttcagttggactaaacaacaatcgtttctcaggtcatattccggtgagtttaggcgaattgaagaatctggccaatctttatttacagaataatatgttttctggatcaataccggagtcattaggatcatgcttgtctctaaacgatatgaacatggcaaacaactctctctccggcgaaatcccttcctttttcgggacatttcagagtctgaattctctagatttgtctcgcaaccagctttccggtcaaattccaatgactttagcttcagcgagattgagctttcttgatttatcgtacaaccggctaaccggtacagtacccccacaactcacgactgccgcctacgccggaagcttctctggcaaccctggtctttgcagttcagaaatcaactcatcatttcggcaatgtcctccaaattcaggcatgtccaaagatgtccgtacactcataattctctttgcagttgggttagctatcatcctcgtggctttgggttgttacatctatttaaggaagagtgagaaagatgattaccaaaaaagaactctaaaagaagagtcttgggatttgaagtctttccatgttttaacattcacagaggaagacattcttgagtccattaaggaagagaacgtaattggaaatggagggtcaggaaaggtttacagagttgttctctctaatggaaaaaagcttgccgtgaaacacatttggaataaccttgattcccaattcggccatgaaaagagctgcaagtggaaggaatttgaagccgaggttcagaccttgagctcaattaggcatgtgaacgtggtaaaattgtattgcagcataacaagtgaacactcaagcttgcttgtttacgagtatatgcctaatggcagcttatgggacagactccatggctgcagaaagacaaaactttactggaattcgcggtatgagattgctctcggggcagctagaggcctcgagtatctccaccatggctgcggccggccattaattcatcgggatatcaagtctagcaatatattgttggatgagtttttaaagcctagaattgctgactttgggcttgccaagagtgttcttcaggctagtaatggaggccaaagttctactcatgtcattgctggaactcatggctacattgctcctggtaattactgctttctaactctctttattttctgttcattaatgattacttcactttctttttgtttacaattgcagagtatggatatagttacaaagtggatgaaaagagtgatgtttatagttttggggtggtgttaatggagctagtcactagaaagagaccaatagaatcagagtttggagagaacagagacatagtgagttgggtatacgacaatcttaagagcagagaaagtgtatttagtttagttgactcagatattcgagaggaccttagagaagaggctataaaggtgttgaaaattgcaattttaagcacagctagagtacctgaattgaggcccacgatgaggagtgtggttcaaatgcttgaggaagctgagccttgtaagttggtgggaattatggtcaccaaagatgacaagtgtggcataaaatagtaatttatagggtataaattattgtataataatactcatagcaacaaggaattgaacatgttccaccctttaatacgatattgtaaatatatttttatcatgttaggattattattaagattgtaaggtggtgtttggtttttggaaataaaatataataatttttattttatttttttgtttgatgtttgattttattttattttaaaattttaaaatattaaaatgtaattcttatttgtttatttgtttttatttcttccaattaaactccatctaatgggatgcattatgtgcaaggctatggcccgcgtctaacgctcacttttgttagaggctcaaataaaaaaaaaaaaataataaatatacatatttttttaataatttttaaaaatgtcatgtattgttatgaaaatggtttaaaaaaattatttttttgaaggtccacattaacttaggattggccgtgattatgtgagtttgagttgagaagaatagaattagagggactagacttgaaaagaatatgaaactcatgtgttcgagtgggattaatattatcactattttaatttaaaaagtgaacctacttagaaacataaattccttattattgaaatttaatttaaattttacattcttattcccatcaagtctaaacttcatacaaaacgccattataagcatgccaagaatgttgag

SEQ ID NO: 15849 - DNA, 2792 bp, Cannabis sativa
ctcaaaccaagtatttctccaatagaatgttgtggctatgatataaagaaagaggatattaatcgattgggagtgggagggagattttggtttgtaaaatttcaaaataatagtgtgaggaagtgtggagaatgatggttaaggtcacacattaacctatgtttaagaatgaagaatcgttttccctaaaaaagtgaagaatcgttaacgtgggctttaggaataacatagaagaaagaaaaataaatggggatgaagaaaaaattacagtaatttatgagttttgacaaagaataaagtatcattaacagaaaggttagtctctattaaagttaacagaaaaaataataaaatattgttaaaccaacaaataccgtttcatagtcacttttaatgtataaagatatctacaaacttttaactgtaactatattaatatataatttttagggaactattatttattttaaggaagtacgaaaaaaaaatgtactaaatatatatatatttgatattcaaacattgagtggacttttcgggtttgggttcaagttttttggatttgagttttggaatcttggaatcgaactcactttttggagactggattttttgagtttcgggtacgggtggatctggttcgagttggaacgggttttgatggtttgggttgggctaagcttttttttacatcactttttcaacaaaaaaaattacaaaataataccattatacaatacattattatcatacacatatacaaatgcaacacaatgtcatacacaataatacaatatattattataaccataaccaatgtctattttacacaaatacattaattacacacaatttgattttttttttttactttttccaaaaaatacttataatatatatacataaaaaataaataaatagttgtaattggatttcgagttttgaatttttaaaaatattaaatccaaatccgacccaatacagaattgagttacacccaaattcgatctactaaaattgaaacctattttgtttgggttttgggccgggtggatttgttgtgtcagtgtgggtttttgggtgtaaatgtgcaccttattatatatgtaaactgtgtacatatgttgagctataatactgtacaaatatcaaataatatgttaatgccttttattttttatttgttgtagaataatgttacaatgaaccaatattacgcacatctttgagtcttatatgactattatctcgagagatattatacattaactagtgaagtactatgtgcttggcaccacgtgttagtatatgaattatgctttttaaccgtttattttggatttctaactacctttcaaaaggttcttcctttccctcccatgatcttgtcagttcctctcttctgtgctattctttcttcaaactacttgctttccgaatcactatccgacgcttactactgctcctttgtcatcttcaaccatggaccctttattacgctccatcgaattgaacctaaatctcacagaagaggagagttcagttttccttcttcatgaagatgtgataccctcctctcccatgccaaatcatactctacttgctagagtcatcacccaaaaccatgttcacaaaccaacttttattgaccaaatgtccaaccattggaatggccgttttcctgtcacaattactgaatatagggaggagtatttcaaagtcacctttggatgtgaaggagatcgcttcagggtcatgaacaaagaaccgtggcactttcaaaatcatctagtggttttctgcacaccagatgctctgcaaaatgcaatagccaacactttcaataccacttctttttgggttcaagtgtatcgtttacctttccttagtaattccaaactccttgctaatgctttgggtgatatcattggtgaatttgttaatgttcatgaggaatcacttgatgagggatgtggtcctttttttagaattcaggttaaactgttggtggacaaaccgctgcttagagagtgaatgattagtttacctcaaatcaatgatgaattttggattgattttagatatgagcgtctaccagaattttgttttgaatgtggaaaaattgggcatccttttgaaaagtgtttggcgttcatggaaagaatggataatggcaatgatgatgatatgttatatgggtcgtggatgaatggtgcaaggttaccaacgactgattacaataaataccgaactgatttctctaagagcaatgcctggccttttgttactcgttttgcgtgcaaagccatagtatcttctatctccaaattgggttctaactctcatccgcaaccaccaactctttttagaggagaatcttgtactgctcctgctcctactccgagaaacaatgctggtaatgttagcacttccactcaatctagacccgcaactttactacctatcaacaccctaaacacctttccttcacaacccaatcactctcaccaaaccacttctactggtttaaatgttgttgctactggtttttcaagcattaatcaacacaactcgaatgccatcttaccaccaaattctgatgccttcacaaacctttactatctccactacaaacactgccactaccactcattttgccgaccctaccaaggtgaatatagcaaccatgtcccactatttatcttctgaaccagataaaagccataaccacaacaccactactatttatctctcccatatattcacaccatacattggccccaccaactgtt

SEQ ID NO: 15850 - DNA, 3457 bp, Cannabis sativa
tatatatttatacagtaataaattatttgaatcataattttaacattttatattattgtaaatttccttaaaaatttgtaaaaagtcccgtataattacgttgtgtataattaaaaaaaaatagttacaacttattcatttgtactgaaaaattaaaacaataaaatgattaaaaaccgtcattactatactttttttttgaaaatgccgtcattactatacttagaaaagaatatttatggatgccatgagccactccaaatatttttaaaatttttgttttgttatgttatgttatgtaattttttttaaaattttatttaatactcctcaaattttgtttatatttttggagccctcataattattatctctctctgtcttagaaatactttatacattaggaaataaaatgctaaataaatacttttcaaaacttaatgtgtatgctacaatatatatgtttgttttatcacgattaaaaaacgcttaatgtctcccgaaatggctttttcttactgccattcaggtgaaatgtctcccaaaatagcaaaagctatgggtgtaatggaaatcttgagcaggattaaaaagaaatcttggaaggaggtcgtggttgaaaccgacagtcttagtcgtacaatcattacgaagctctccttctatgatattttattttgggagtattatttcaaattataagatattaatagcagaattgtgttgtgatgtttctgtcatttttattagacagtctacaattagtgttgcttatttattgtctcgagcattatattttgtcgctaatcgtgttattaggagtaataatatttctctgaatttttttttttcatataatctcgaatgattgcctttaataaaagtcgatgatttattttcaaaaaagaaaaaaaacacttacaattaattcccgcgttttagtaaatgaaaaaattctcacacttgttgctagatgattgccaaagtaatgcctaaatctttaagtgagttccttgtgtgattgtgtgatgtggtcctttttttattgttggcattgttatttatattgggttaagttgccaacttcaatttattttcttagtttccaatggctgaaagctaaaaaaaaaagaaaatctcaaacaaccactaatgttcattgtagaagccctaacgaattaaagaacacaaaaagaacagagaagataaaatcttttaatatttttagatttagatgttaatatgtgaccacagtaatttagttccattctactccaatagtccaagtgcatatccaatattcaagagagtaaaagtcaacgaagtacaagtcaagctcctccaccgtcattaaaaagtagaaactttttttttcttaaataataataatgtcaataactatttgcatcctatgccaatccgtggattaatctacgctgtcaaatttaacgactaaccgttggccgttggtgaaaagctccaagcagagccgtccgatcacgccaaaatacgatcccaatcaaaaattagcaatattaattttttatttatttttaggggaaaaggaaaacaaaatcctcctgtatctgaatctttatcatcttctctgtaactccgactctaaattgggtttgatagaagacgagagaacagaaccaaagaagcgctgaaaccctagccaagagagaaaggggtaacaatcaattgcaatctgtggctctaatctaagggccttgccggcgacgaaggagttcgaaacagagcgttttttttttttttttgaagtgaatattcaaagaagaagatgaagggtttattcaagtcgaagcctcgtacgcccgtcgacatcgttcgccagacccgcgatcttcttatgtactgcgaacgcagcccggatacccgcgagagcaagcgggaagaaaaggtcaccgatgattctactctctaaactttctcgtacagtttcttgtttaatcgcaatacagaacttttctaaaaatgatttggaacggtagtctagcaattagtgtggatttttctcaaaattttaatctactagtaatgggcacaggctttagttatgttgattttagtagactagctatgaggtggatttattttggggttcttcaatattgtagagctagagggttcgtggtccaattttgatgtatatgtataatcgtattgttcagtgatattgttgatttgctttaattgttcccctccattcgattttgtgaatcttagaatttgatttgttacatcaaagttcataatgaatcaatctcagtttctttatttgctgattttaaatctcttcaattgatttttgatgttgcatttggagcagatggcagacttgtttaaaaatataagggagatgaagtcaatactttacggcaatagtgaatctgaaccagtctccgaatcttgtgcacaattgactcaggagtttttcagagataatactctgagacttcttattaggtgtcttccaaaattgaacttggaggtaagcttgtatagctgtttttggataaatttggattgtctttactacgtcatttctaaatgttactattcctgttgatgactgtatggaaactatagcaattcaaatgtatcggattcaaaagagaaatttaacttgatggtttagaaagcttattgcaagttttggtcatcatagctatgttgacaccattgccctgttacaggcccgaaaggatgccacacaagtagttgcaaatttgcaaagacagcaagttcaatcgaaattgattgcctctgactatttggaagcgaacatagatttaatggatattctgatatctgggtaagtttctgattaattgtgtgtattggattcttttggaacaattcaacatatacatacaaaaggctacacaatgtttttttcttaacattctttctgaaattaacacttttccttcacatttttcccttgctcttatttattttcctgacctagaataagatgagattttgttttaatgatgtaagtaaccatttaaatctaaattaatgaccccctggacattactttttgttaatatatgctaagaaattttgtttgaaagtaagattggagcattaagtgatagtgccaaatcctaaaagtgtaaaggtttgtcagtgtattgagcttgcttgtatttttagctttaaactaatattacttttctttatatactacagttgtcttgtcttttgggtaacaactatttattggcgatcattttaaactgagttgctatgacttatattcaaaatggcttctgtatacattgatgagtacgtctttcatagtgttgtcactttctatgtaggtatgaaaacacagatatggctttacactatggtgcaatgttgagggagtgcatacgtcaccaaagtgttgcaaggtaaacaaaagaagctgctaattttaata

SEQ ID NO: 15851 - DNA, 6469 bp, Cannabis sativa
gcttttgatgctccgttagtagcttaagaattcgttttgagagttgattattgcgataaccatgattataatatgctatacgaatgcttttggagctattactgtcttggttatttgtgtggtgcttttagttaattctttaaagtttagctattattggttttgactcattttgaattatatgggggagaatattgctgcttcttctgtttctggtacaatggttttgtttgtttactctaagtagtaatataaatatataaatatgggattagttaactaattattgctgatgcctttaaagaattgaattttggttttgtatatatcatgtgctaatgcaacttctttgtttcttactttatgtttcatggacccagctacaaaattgaaaatataaatagaaatacaggggccaacgtatttgcatgtattggattctgtttagctgttaaaatctggttgaaaacggcaataaagaaccatttccttcttcttcttcttttggggcaaaactagctttccaaattgaactgttgtagacttgtagttccttctaatgattcttattgtacttgtagcttctttctgtggctaggatgaccttagttacacatatgtttagtagttttgtacattgtgcagtggaaaccaagtcatgcatcatgtaactagtacttgttctgttgtttatccagggggttgtcctatcgagctagaatgtcccagtatattgtggttcttttatgtaccattttttgtcttgcaacatgcgatctgtgttctaataatggcaaacaaaaatcagcacaatatgaggcttgtaggtcttatgaagatcatttgaatgctgcctttcaagatgttagttcggagtatggaaatccaagaccgtacttaaatattgatagcatttgtactggttcacaagcattttgcttcccttcaactttgcaaggtttgtcttctaacgatcaccagcttgaagatgctgcaattgatgcttctggtagtcagtttgatgatcctataactgtaggatcagctgaagatactagggaatcgaagaataatagctggtcgatggattatggcatgtttaagttatttaatggaagaactgtttcttgctctttgaattcaagagaaggtactaacaagttatcatccattcagttagatagttcaattgaaaatgatgtttcttcttgtaatgcgcctttgcttaatcagaagagcacaagttctaaggctgaagtcaacattgagatagtgaaatctgattcttttaaaggttcttcctctcgtcatgtagaaattaaccctgcaatattggattggggtcacaagtatatgtatttcccttctttagcatttttaacagtggaaaacacatgtaatgacaaggttttacatgtctatgaaccttttagtactgactcacagttttatccctgtaattttagtgaagctttgctaggacctggtgaagcagtttcaatttgttttgttttcttacctagatattttggttcaacctcagctcacctcattttgcaaacaagctctggtggtttcttgattcaggctaagggttttgccattgagtctccttacggaattaagtccttagtagatcttaatgcttcttctggtagaaggtggagtaggaatttttcattgtctaattcctttgatgaaaccctctctgtggagaaagtaactgcatgggtatctatttctttagggcagacttctgtttacacagaagcaatttgtagtgtcagaaactttcaagatccagagttgctcgattttccaagcatcgatgattggctgcttgtaaggagtggtcaatttggtttgccactgatggggttgaggccccttaggaactgggagattggtccacacggcactgaaacttttatagaaatagaattctcagttgaatcaaaaggaaaagtttttggtgcattgtgtatgcaattgcaaaggccttcacaggacaagtttgacactgttgtggttcctcttgaagctgaactgagtggaaaagaagttcatgaggtatcgggatctatttcagcatctctggaggtattatatccatataattccagtgaagctgtagttgctatctctctacgaaatggtgctcctgtccttgtgaatgttgttaagatcgctgaagttgctgaaagtaaagtattgcatattagatacatggaaggcttgctactctttcctggcagtgatacacaagttgctgttgttatttgtagtcatatgcgtgattttccgccagatttacctaacatgtatgagaactgtaaattacatgtactgacaaatgactcaactagtcctcacattgaggtttcttgccaggaaatattcaatgcttgctcaagaaatttggaagaatcttctgttggatatgaagattcttctgttgaaattggtgaatctggaagtagcaggacagtacccttaggcaatgacttgagtacgccatcagagaccaaggtttgtacattctattctgtgtataggttttaatcttatagtaatatttctaaatgtcacattcgaaaaaaaaaaaagaagaaagaaaagatatggacttatcttctcttccaaatgttctatctttatctagagtaatcttgatttaagtttactattcataacccacatattggggtagcaggatatataaagcacatataggaaatgttagctagttctctaactggggtggccgaacggttgtctgacaagtcaaaaaagaaatgaaagaaaaggtataaagaataagagagaccaagggaagaaccacatggctagttttttgggggaaaggataaatagcttctagttgttggacaatgaaaaagatcagacttttttacttagttccccccaagaaaatattattattgatttttataatatcatttgagaatactgtagtttgtgtgtgtttttttttaaaaaatggtgtctactggttctaagatatggaatcttggaagttgcatctttttgattgcgtgggttgcagtaacatgcatggatggcatgctcatgttaatttgcttgttagtttttgcctcttagtactgtcatttgttatcatgaccattatacattgctgaatttgtgtgttgatgcaggcattagaagcatcagatgctgacgaattagtgctaggaaactggaaatctcaagggactagtggtggcatgtccgtgcttgttgataatgaactattgtacccaatggttcaggttggaagctttcaagctaagtggatctttgtgaacaatcctagtgaagagccagttattatgcagcttattcttaactcgggagagattattaatgaatgcaagggcacagatggtcttatacagcctccttcgtcaggtagtttggttcacgatgaatctaatattccaagcaggtatgggttttcaatagcagagaaggcagtgacagaagcttatatacatcctcatggtattgcatctttcgggccaatactttttcatccctcatctcgatgtgagtggaaaagttctgccctgataagaaacaatctttctggtgttgagtggctttctctcaggggatttggaggttcactttctctacttctgcatgaagcatctgagcctgttcagaatatagagttcaacctcagcttaccgatttctgtcaacccctctcctttgggtatctttgctaacatggaagacacttcttattcctgttcacagcctctattgaaggtgctatatgcaaaaaacactggtgatttgccattggaggtaagaaaaatcaaagtgtctggcaaagattgtgaattagatggttttgtggtacacacatgcaaaggttttgctattgaacctggagaattgacgaaggttctcatatcatatcagacagatttttctgcaagtgtagtacaccgagatctcgagcttgtcttggctactggtattcttgtaataccaatgaagggtaccctcccaatgtttatgctcaatgtctgcaagaaatcaattttctggacacgctttaagaagtacactacggcgatctttgttgcagcatcgttgttgcttctgatgttctggttcatattgccacaggtgttgaccttgggctcctatgactgtttctgcaagagttacaaaggttccttggccactactttaagtacaggaaaatgtcctcgcggtcttagccttggaaacagtaaattttctttgttctccgagatggataatttaattcccaagtcttctcctccgggttgcatgggttatcctggttatcaagtggggcagcctgatcaacggactcaatatgtgagaccgattctggaaaatgataaacaatctaatgatttgtcagatagaagaaaagagagagaattaccttcttctttgttgtcacaatctctacatattaagaattctgacatacaagaaacaccccaacctagtaatctcactatcaatatcgagaaagaaaaaggaagaaggcgacgaaagaagaaaggtgttggcaacaagttgacagcactttccgaagtttcgagtagtcatagtgggaactctactccttcatctcctttatctccagctgtaacaccgaaatatctgtggttactacaatcacaagatgctgcggaacaaagtattgaaggtagagatcatccacactctcaagtttcaaatcaacaacactctgacaaggaaattgttacaaaatctatttccaaggccaacacattggagtccaaggctattgctaagagcccgtctgtctccactcagcagcagcccttggcgcctagaaaaacagctactcctagacctgtgctattgtcctcagccacatttccttctgctggtaggcctgcaccgacgaatatgttgcactcttctccatttttggcttcaagcactcccattgctccgcatgcacgagctcctggatccagactcgatgagcagaaaaacatgaaagcagaatcgaaggcttccattggggacaaatacacgtatgatatatggggtgatcatttttctaggcttcatttgatgggtaagtcaacgaatatgtcttctctattatctaaggctagggaagatgattatgatagcttctttgtaaagggtccacagtccttcatgaccaagcctcaaccaaaattttcaagtcaccgtcaagagggctaataataaagtatgtaatttattatatttttttttttgcttttcaactcatttttagactaagagtagagtaggttttggccttgcagcataatatttagacaaacacatttaaaaaacttggaatagaaaaagaaaaaaaaaactaaaaaaaaaaaaagaggcttttaaaaaatacactcacacacacatttgggaatgaaagaaatggaatcaaagtactacaacggaataatttatgttttgtttggactaagcatgcaattgacattatattaaaaggatgcaataagtatgtaaaacaccatttgataatttagaaggaaagtaaatattcaaaggaaaataaatttgataatttaaaattatgaataatgtattgaaaataaaatagtgtaaaggacacgaattggtgtgatctgatgtgtgtgactctaaactttacatttgcatattaagggtgcatcacaacttagggaaacttacttacattacaatccaaaaattgcataaatcaatgtaaatgtcaataagcaaatatagaaaggcgaacaatgaaccttcaaagttgaaaccatactactttttgttattgtgtaatattttgatgcaaacactactaagaaatataactaaataagtgacttgtatctaataggcaattttggacatcaaatttataagtaacagcaacttatctgtaattgacaggagtagttgtacaactcttgccactctattctctcttcacctacaactttgctttgtggataggtgcaattattattagaaatgccaaagagtatttattatgcctaaaactctaaggtgtaacggatttttttttttaaaaaaaaactctaaggtgtaatattgcaattaaatattatttggttctataataataattatagaaaatcataattatttagaacatcttcaataataacaccttttatgtgccaaaagtttcatcatcataatatatatggaaaaatcatcatcataatatatttatatatagggatatgattttgtcctgttactgtactttacggattgtaattcgtgatgtcggcagccgtcagatgaagttatttaatcagacggctgagattgatttaggggtaattagggctaaaaagtagaaacgcctgacactcatttaatttaatgtaccctgagacccatctaatgtgccacgatatacattc

SEQ ID NO: 15852 - DNA, 5311 bp, Cannabis sativa
tgttaagtttctgtttgctagagtaatagataacagagtttgtaaattgaatgcttcatactgaggaatggaaattaaaggaaaaattacccttaaaaagaaaaaaacctttacatagattgagtacaaatcatataactactaaggaaactcactaattactcttagaaattaggcatatacaaaattaaaggaaatattcagtttcctttatgggaatgatatcaaataatttgaacaattcatcttgaatcagttctcacataatcatgccttagatgtatatgtctagacttaccaatataatatatacacacacactctcacacacactataggttctatctaaggtgacttcaccatcaaaatgttggtgattgtcgatactttatttgtggaaattgagatatccaacatgagatccctaaaatcgtttcctagtattgctagtgctataaaatggttgagtgtgatatgtttgcttctgagaacccaaagagacagccccaccattaagagtagaaacctaactagtggaaaatagagcatctcccactcccaaattctcaatatctatcttgcgtctgattagccttcaagtatcttaggacactgaaatttcttactatcttttttccctgtcaatgcaatccaaatctcttcaaccaatttggtgttggtgtagggatcatagagcctatccgaaagtgcattgaaattgtgacacccacataggttcatcctcctccctcttttcccttgcaaacaaaacttgaggagtgtaatctttagatggtgaagtgaagacaatgatttcgaatctggatccaagatgtaggagaccttgagcgtagcaatgagaaacttgaacttgtcgtgctttgcaatctcagaaaattcatccctttgaagcaatccaaacaaacaagatattagcttaggaacttgagggttgtaaaagatgaagattcttcctccattgaagattagacatacataaaacaaatagagaatttgattgttgggggagagtgggttaaaacaacaatggaggaaaaagagaacacaatgtaacaagttgaggagttttgtccaaattgtctatttcaaccccactaaggaaaatagcttgagggttctacaaagaagaaataagaagtaagatataataagcctacgaattttccaaacaagccatttcttagagaaaatagtggatctttgaaaggtagagagaagttggagagagtggaaaagtgtaatcaatccatttgaaccctaaaaaaccctttatatagtgttagcaccgacttaggcaaatccccacttgtttttgattcaaaaagtaactttggagccaaaacgcatgaaacaaggtggtggcatgttgtcatcctgtatagcgctaggtggcgtgtcgcttgctaggtggtgacacactcgccaactgcatcgatttgttgcctggtattgccacatgacttgaattatgacaatgttcatgtccaaatcatttctaaaatttccaaattgcttctaacatgtttgaatttgtataaatacctcgttgtgttaatctaactcaatttggtaatatttcgatgctaatagcaaaacctctaaattcgaatctacttgtgtgtaatcttctcaaaactatacacctacttgtgtattgttttaattttatatttaaccaatcacgcacaaattcagttgacattttctttagataagtatcatcgttttagttttttttttttgataattttcatcgttttagttgcattcagagaaaagatatcttatcataattacttaagttcattaagatcatacgttgttattgtatttctgcagatattttgtctgatagaaatatttacagttttttaacctgtctggtttatgctatctgagacttaaattttgctttatgctatgtgaaggttgcatcgtacctgtattaccaagagaatatgaatgttcttgtagaacctgatgtgcacgatatatttgcaagaatcccaggatttggatttgtccagaccttttatagccaagataccaggtattaacttgtgtccaaagtgcaataatactgaatttttgtttgttcgtataccttaattgtaacccagtgacctttttggatgcttataattttagtgatctgcatgagagggtcgactttgtggcatgcttgggaggagatggggttatactccatgcatcaaatctatttagaggagctgttcctccggttgtatcttttaatcttggttcccttggatttctgacttctcatactgtaagattcttacaaatgaaaagaggaaaaggaaaaaaaaatctcaacattttctttaaagtgactaatttgtgtccttagaagtggcagtcttctgacttcttctatggcttcttttgcagtttgatgactttaggcaggatttaaagcaggtaatccatggaaataacacacgagatggtgtatatataactctcagaatgcgtctccgttgtgaaattttccgaaatggtaaagcaatgcctggaaaaatatttgatgtcttaaatgaggttgtaattgatcggggttctaatccgtacctttctaagattgagtgttatgaacatgaccggctcataacaaaggtgaggttagtgaatagtttgctttaacatgacagaattctattgcaaaagattcaaaatcgtttttagtatatgctagcacctattagtttagctaaatcccaataatgtagaaacttaggtgacgtttggttggagataatgaaatggaaaataaatcatttttattcaattcttttgtttggttgtattttaaagtattagaatgtcattctaatggaatgacttttctatcattttggtagaatgactattctattttgaaatggaaggaatggcaattccattgcaatatgagaaaaaatttaacaatttttttatacattttaaatttaattgcattattattcctatttcggttcccaatcctgttcctatgttatcattccttcaaatcaaacactaccttaatgtgtcagaaaggaagctctcttgtatgaaatttctacgcattctaattgatgtatgccatgtttcaggtgcaaggtgacggtgtgatagtagccacaccaactggtagtactgcatactctactgctgcaggaggttcaatggtaaggaagcataaggagatgagaaattctttgtgctttatgatggggattgggttttaatattatttataaaagcgaaaaatagaacagctgtcaaaatttgctatgtgaaatactcgatttgatgttatgagttcttggtagttgcttatttgtgcctacataattaactactttatgcatatctgatgatggagatatctatttgtaggtgcatccaaatgttccttgcatgttgtttacgccgatctgcccccattctctctcatttagaccagttatacttccagattctgcaaggcttctattgaaggtgaatacattgcatgaattgtatctagcaagcagtaaatatagttaaattttggatattgttctgtttgagttgttgaccacaaaaagaaagttgagttttaagggagaagcttagaaaaagaaattgttgtttggacagattccagatgatgctagaagcaatgcatgggtttcttttgatgggaaaagaaggcaacaactttcaagaggagactccgtacgaatatatatgagccagcacccacttcctactgttaacaaatttgaccaaactggtgattggtttcatagcttgattcgttgcctaaattggaatgaaaggcttgatcaaaaggctctttgaggtctcttaatattaaggtgaattgaaaatgaaactcattccactcttctccctttggcctaataatattcatgtatattactactgtacatattgtatattatgtttggactacagtcctccaaacaaacaataacttaaaatagaaaatatatatgggctatttacaaaaagatgccatggcccatttcttaattacaaatgtaattgttattgtatacctttcttatggctatgtagcaataaaaactgttctacttctaaagaaagatcttttaagtcactaatgattctgtctagttttttctttctttctttctacagatgggtctattggcactttttaattagttctagtttgataaattaataccaatattcttattagttttccatctagtaatatactatttttaagacttaatttttgagaattttacacaaaatactagatttatcaaaaaatcattatattatcgaattgctttcttcatttgtacaacttcttcttcgtatgctcatagtcgatggaactcagaagcagcaatttatatgcctgaccctagccactcaaacctagaaggcaggaaaatcaacatggcttatcagctattcaaatggaaccgtcgcgaaaaacattgatccaggtttctgaagattaagctgaatttctgcctgaaagcaaataaaaataaaatgaaaaagagacttaacattactagagaatgcatgtctcgattctgagttcttggatagaactatcacttagaaaaacagagtatcgaaatgaaagtgtattgaatcttttattgaatatgttttgtatttacactgcatatattagtcctaatgaacttattgacataactagaaaaaactaagtcctttatatactaggagctttagtcggtacaaagtgtaagatgtcaacttgatcctaatactaagatagttaagaataactgtcaactctcaacagaattaacaaccatctcacactatcttactcctttctgtgtattttttgaacacatatttacttgttaaggaatctctctaaatggaaaataaaagatacaatgaatggcttttcaagccttagtagtacaaattaatatagggaaaaatattcaaagatgggtctgggctacatttataaaaggggtacaattaccagaaatgtgtgatttttactatttcgattaaaataatttttagtgctagaaaattactttttgtctcaacgtgtcaaatagaaaagtgatgtagaacagtcttagttttgtccttgtaaaatttcaaaatttttcgagatgtgtagggtaagtttttaagagaacaagggttagattttaacaaaacactaacaagtataagaaatgtgagatctccactatttcgattaaaatgattgttagtgcatgaaaactactttttctct

SEQ ID NO: 15853 - DNA, 2806 bp, Cannabis sativa
atatatatatacatataaaaatatataatatataaatatttcactcctaaaataatatcaaaaatgtgcaacacagatggcaataagagcttttattggccttgaggttcaaggttcgatcctttcctcagttactttttatgcttatagttttttttttgaaagaactaaaaaaaaaaaaccaatccagcagcaaaatgactaaactgtctaaccttttttgccaatccatcagcaacaaaattaaacttaccgttaataatatttttagttatttgtaaaagattttacttagtattttaaaaataaataaataacaatattataacctaaatatttgtattagactatgtaaaaaaatatattaaagtgcttttaattttaaaatattaacgtatatttttaacgatactattaagaatatataaaatttatatttattatctatttttttttaaaatatatataatttaaacacattatttttttctttcaaatgtgctaaaatatatggtacttcaatagagatgttcttagtaattaaatattacatggtcgagttagcttacgttgcaaaaaattatttattacatagagctaaaagaattaaaattgatattgtgtcgaaatttaattaaaattcatttttaatttttattaaatgaaaatgcctcgtttcaaatttcgccctaggtctctcatcacctgaagatggccctgctccttgccttcaaaacttgcagaagacgttgtcatacactcctctcatgcacgtttcatccttgtgatcgtactcttgttacctccttttctaatatttaggaaaatttcacgaagtataactatgctgtcgtgaaagcacatggtaaggtcgagtgactttcttgaaacatggtcgagcgacttccttgaatgcatggccaagtgattttcttggaaacatggccgagtgacttcgtagaatgtacggacgagtgaatttcttggaagtatgactgagtgacttcctagaatgcatggctgagtgacattcttggaagcatggcgaagtgacttcttaaagtgcatggtcaagtgactttctaagaagcatggtcgagtgactttcttggaagcatagtcgagtgacttcataaagtgcatggtcgagtgacattttaggaagcatggtcggtgactttcttggaagcatgatagagtgacttgttggctagcatggccgagtgagtttttggctagcatggccgagtgacttcttggctagcatgtcgggtgattttgcatgcatgcttggccatgcgggtcaacatcatgctagcatgcaccatgcgagtggccttgcatgcatgcttggttgagtgaccttgcatgcatgcttagccatgtggatcaacactatgtgagtatgaaccacgcgagtgacctttctcattactctgatttagttatctcacggctaatacttaaagatggcttcttttatctctcaaattaatctttttactcaatttagcgattgtctttgctaatattttatctctcgagttaataaataggttagcatttgcttcacgacccatgaactttaattgccacctctacccatggatcaactccccaccaccccaatgcgaacctcaactgcgccaccacactacctacctcgaggatgttaggtgacaacaccaaagaacaagcagacaacaaaacccaagcagcttcataaatagcaatatcgttctcatctcccactctccaaatgacctctcgtcaaataattttttaccatacaaaatattctttcacacaaaggagtctttttttttcgaagacttgatagaaccaaaaaatttatttttatgatacaaacattttaataccaaagctgtaagcgaagtagtagcatgatagaacaagaatatttgtttttataatccaaatctttcaaatattatggactatgtgttttaccaaagttgtcgattggatcattttttttgttaaatgataatttgaacatgtattttttaaaatggtaaaaataggatcttaagcttaattttaaataatttttttaatgtaatcaacttaaagataattcctaacatgaacagatgcaaaaaaaatgtaatcaattttgtaataacacttttagatccacctattattagttttattttgacaaaaaatcagttcataatactatttagtactattttgaaaaatatagggtccaagcttttatttaataaaatagagagtctaatcaataaacacaagatctaaaataacatttactcttatttaaaaaaaaaattgtaaaaaaaaaatcaataaaaatattaaatttttattaaaaagtaaacaaaaaaatatattaaatatataaataaaagtacaaaaacttattaattataatgagtgacaaatgagtaaataaaaaaaaatgatatttattgtattgtaaaatttgatacatgctatattatgtcaaatttgacacaacttttagcatgtgtcaaatttgaaaatttggaccacaatatacactactatttgtattggtgttcaattttatgaacatagactaaaaaaattacatatacaccacatttataatactactctattggaaatgctctaaagagagctctaaaatatgaaacaatattaaaccctaaaatctaaaatacacactaaaaagactaaatatactttgaaagattgtgttatgaagacattctagacagatgaaggcgacacattctcctcattaatctcgtctttgatccccttgaaacaaatc

SEQ ID NO: 15854 - DNA, 4577 bp, Cannabis sativa
gcatatagatcaggatatgtattgtgcagcatgccgcaacaggaggtgctggttatgatgaacactcagataaattaacagggcgtattggcctttacatctcaacagttggtttgcttgttttcaaaggcggaaccaagagcatgtgctgtattgcttttccacaaatatctttgtacatcagaattaactgttcggaatcaatagaatttatttatatatatgttgcagttagtttggaggcatttcatttgtaataccgtgatgagaaattctctgcaataaagttgaaaacacaaaaatatatatttgggagatactagttctttcctttttttttttttttatcaaacataacatttatctaattattgaaactgtatcaatgggttatggtttggtagcataccaattacattggcctatttctttaaaggcacatgatttcagcttaaaagttttgtgcatgtgtcgcctcttgttatttatctcgctcttcgtgttataatctacctgccccatcttctaatacattatgattatgatagttgttattattgcaattgttctttctcattgcataattttcttagtagttcactgttctccacatgcatcatttaggacttgggggtacatttcatgcatacgtggacctacaattttatatgaattcaaatgctatgtattgtggacgcgcatcataaaaatgattgataaatatatgaattcaaatgctataattttattttattgcttttcatatctaattgaaaaaaaaaagaaaaccatggtccaccacggccatgataattgtgggtggcctcaagcatgttggcgtgattgaattggttcaccaacactgatgaatgggaagtcaatttttaatcgcttatatctgccccctataattatggctgtaatataacattaggtggtaactaagatgaaatcctagtgaattatgtacaaagatgactttcttttgtgactacaatgaagaacatgaactatcagataacaaaacaacatcaatctgaaacagtacgcaagaatcaaatgataacaatacaattgtacaacaccccaatctcccacattctagtccaaagcatttggtccaaaacatctccttctcacagggttccacacccactgaatcatgaacttcctccctttcactccattaacattgtatccaactcccctagagcccttataaactttgcccacatagcctccacccccaccactcccataaacacccatacacaagtcagctatctctgttggagcagttggatcctccccagcataccaagcattcacaagagggttacttgacacctctgcaagctcatgagctaacacactgatcatcccatcaacaccggcatccccatttggtgggtgcatcacgttgccaccaccgactcctccagctccgggaggtggcattttcgagtagtcaggccaagcaaatgggtaggcacacattccagggcactgtgaaccgctgtagcccacccatgcatagggcacagtcaccccaactatagtggggaaggtgaagtaatggaaaccacaaactgccctgcaaaaatcttggactcggacatctgaagaggttaggacaaggtaaagaccattgtgtgggttgagtggaagagctctatggtttgaattggtgactgcagtgttgattatggattggatatcaagacgacttaggtaacttccatgggagtagcttgagtcaaacgattctccagataggatgatgttaccggttatgttggagccggtttggtcggtgtagaaccggacagttcgccaccagtcggagacagaaggataaggagcctgagatgatgagagtgagtagatgaagtctcttatggtggattggtgtgttggattccaatgtccataccatattatatagaggttcatgggtgaagcaaggactggacccatatggtaccggaggtccactaagtcagaagaaccttcatagttcttggcttcattgaattgtctgttttgattcagggaaaaagcaagagatgaaaatgaagaaaagaaagaaagtgataggaggaagaagaagaggcattgcaatagttgtttttgcatctttgcttagatatttggtgttgttgtgagtagagacagttaaggagaagttcttaatttatagagagacacagaagaaattaaggagttggttgggtgtgggtttgatattcatattcttatcttattatttattaaatgggttattgtttgctttggttatggtgggcattggtctgcatgtttttacatgattcgaaacccatcattgtctactttttaatgatagctatgttgttcccttttccttttctttgtttttcttcttcctcttttctttctttttgctcaattatttatttattttcagtttgttttaacttttaattaaccaatttaacaaccggtcatatatgaagaggagctaactatcccacactaaatctaaatacattttaagatgatataatattacgtgcccacgattcttatattgaagtcgaaagtcatttttaagtacgactggttatgaattgtaataattaagggtaaacaatgagtttcttgcatcctaatttttatttctttgttttattattctttgtgtactctgtttttattttcgaaaacttgtgtactcaagtgttataaatatgtatgttccaagtaataaataatcaaatttatgctccttaatcaacactcccaaatattgaattttttgtttgttaaggtgtgttttgtgaccattggcagtaggaacatttctgtttttaatacgtagaaaaattataatgtttttatttaagggtgtacattgtaattatttacattacataaaaatgagtattagtgaggacaaaacttgtcactgaaaggtgcattttttgtcattgatgagcattagcagtgacaagtcgtcactgatgctttgtggctaaaaaccactatcagtgataacttgatttgtcgtcattgaaaataaacatcagtgacttgatttattgtcacttatacatacttttgtctgttttaatacggactgcatcaataacaatattattatcactaacatatatatacatatttaaataataattttttttgtaataaataattttatattaaatactattagaactaaacatgaaaatcacattccaaaagtaaaacattacaactaaaaatttgcgtgaaatagtaagagtcaaacattacaatatcattaaagtaacattacaatatcataatttactttgacttgtatggagttttgttggaagcttgagtatatctcagctttataattcttttgatgagtaataaaatgatttaattaccaaaaaaaaaagaataaatatatactaagaaattaataacattgataatgaaaataaaagtgagagttcataataagtaattaaaaatattaatattgaaaatgtgtaccaaacgtcgtcatcgtcatcatcatcatcactatctcctcgagttttctgttaaggaacatctaatatctatggatagtattgcggcatctgcaaattcgtcatcatctaagatgtttgttgcccatgtggtatcgacatcatttgagataaatgttgtccatgtagtgtcggcatcatctgaaaagtttgtggtatctatgacatttgttatgtctgcatcatttgtggcatctgtgactatgacatctgagacatctaaggcgactgcatcatcatctacatcattacttgtaaattttttggtgacatcatctatatgaatgattggaacatctaaaactgttgcaattgagacacctgctgaggagatgatgaaggtgcaggaaaagtgatatgaggctactctaacatttttccaaaagtaaggggagtctgcttcaattgttgatgatgaaccagatccatcgggttggatgcattggagttgcatcaatcatctcatcttccagtgatatacgttcctcacgtgacaatttttgagtcaatatctcgatttgtcttagtaatctagcaaccttctataatttttatgaaattcttaagaatatgaagtgccaaattagacttcaaaaataatgaattattttataggcgtataaaataagcttcaaatacatttattttcgtattttcaaccacaaagatatgtaaataatccaaattttttgatatgacaacaaacattattgttattaagaacctctaataaatttttagaaaattttgaataatttacagtgctgaaaaatacaagataggttcctttaaagtctattttatacattcatgaagtattgtttgatgcccattttggacactagaaattattcataatttttcaaaaaattaatatgataaataactacaatataatattgttatataaaaaaaattatgattgattaattaaaatcaattgattgagtttgcaagcagtattatctcaactagtgaggggaccatgagcctaaataaccgagctttcaataa

SEQ ID NO: 15855 - DNA, 4909 bp, Cannabis sativa
ttttcttcttgagttcttgagagagctattcgaacttatcaaggagtattccttgtggcgttcaacctgacttatcaaacaaattccaccaccgtttgtggcgtcttccttcataccaaggttcatgcttaactaagcattgggtcgcggttccacatccaaattttgagaattcttagagttttccatatttggtgtcgtgtttcatcacaactgttggtgtggttcgtatcacatgcacctcaattggcatgcattcacctcactcagaatgcatgcatataacttaacaagcatgtgtctccctctcagcatggttgttaggcatgccactcaacataagacacccacaacaacatggcttaacttagtgaaatttttccaagcaagagtagagtgacgtttttgattgaacaaaatttttttttagttggtaaattgattatgtacaatgctcttatttttttgagtgtaataatacgcaaaaaaatatggttatgtgggtattgtgctattaaacttgatatgtacaaagcgtatagctgggtggagttgcctttttgccaaagattatgcagaaattaggctttatgatatttagattagtaaggtggtggagtgtatttcttctgtggaataattggttattttgaatggtggcagttatggtactattcaacctgaaaagggcctccatcagagtgatcccacgtcctcttactaagtcttattatgtagtgaaggtttgacagttttgatttattgggattgtgataataatatgttggttggaattccatgtggtaggtctgggccgattatttctcatctaattttttctaatgatagactctttcttctaaaagctaccactttagcctatgaatgattcaaacttcttccctcttattatgcaaaatttacgctttcatgatatttggattattaaggtgatagagtgtatttcttctgtggaatatttggttcatttgaatgatggcagttatggtactattcaacttgaaaggggcctccgtcagaatgatcccatgtcctcttactaattcttattatgtactgaaggttcaaaggtttgagataataatatgttggttggaattccatgtgctaggtgtaggccgattatttctcatcaactttttttttatggtagtctcttttttctgaatgctaccactttagcgtgtgaaaatttcaaacttcttctctcttggtatagtgcaccattaggttaaagtgtgaattttacaaagtcactagtctattttaatcctaatatttttgaggcagacaagattgtgatgacaatgtctctaggaatatttggggttgagagctatgaaaagtacttgggccttccttgttttgtaggcgctactacgttaggcatgtttaattctattcgggatcgtatctggataaaacttaatagttggaaggctaaatctttcactaagcctggtagagagattcttattaaagctaaagtcaattaattccaacttacactatgccactcttggttacttgcatttcacaagtttaatttttgtatgtttggcctttgggttcgagcagaccctttgtacacattttaatggtaagttcataacttgctataaaataattgacacaattagaatgataattaatatctttattcatttattggtcggaataattttgttaccgtagtaacttacatttattgaattatggtagctattacatgatctaactaatctttagctaaattaaacataaaacaattgcacttttaaaactgtaccttaaagatggtcatctgaccagagtactagttattttatctaaacctttgttctgttgtatggttaccagaaaatccatcatgtacttcgaaaaggagcagtgaaacttcttgttttgttacacatctaagcaatggcatggataaacctcttttatacatcacaccttctactatgatgtaccgtgcaactttcctcatatctttcgagctttgttcctgtcatttggaagttctctagtgttgaagtaggctgctatgggtgtcatacagtttggtgctatgtctatctttttgaattcttccacacaagtgatgcaaggttcttttaagatttggattgggactaggtttgccttatctgttactgtgctacttacaagccaggctaaggcatcaatagttgtattttcttcacttggaatctgccttagggtgtaacccttgaattatgtgagcatgtcttgtatcttgcttagataggccatcattttttcaccctgggcctcatactctcttgaaacacgattcactaccaactgcaaatcattatagaccgcaatgtattcggcatgcacctcacgagcaagctttaatgtagctatgagagcttcatattctacttcgttgttggaggtcttcagcccaaatttgattaccccgtgcagatgttgccccccatgtgtgacaagggaaattcctgcaccagaaagctggtctgtggctgctccatctacatgcaatttccaggtaggtcactctttgttattttctggtagggattcttgtactggtcccgggttgtcccatatgttgctttcttcttttcctatgcactcaagcacaaagtttgccaaggcttgtcccttgactgttgtatggggttaaaagattattttgtactgtcccaactctattgcccatttaagtatccacctacaggcatcaggcttttgcaatacttggcgtaatagtttgtcggtgtatacccgaacagggtgagcttggaaatagggccttaacttccttgttgctaagatcagacagaaagtgcgcttttctattaaaggatgtcatccttcagcttccaggagtcttttgctgatatagtataatagatgttggacattgttttcttctctgattagcatgacacttataacataattagtgacaaccaagtataatcctaattcttctccgtcaatgggttttaagagtacgagaggctttgcaagttatcttgttaattcttggaaaccgttcttgcattcctctgtccattcaaacttcttattacctcagaggatgttgaagtaaggaacacacttttctgatgattttgaaatgaatttgttcagtgcgactatccaacaagttaatctttggacttcctttgtctttgttgacaatttcatacccaggaggactagtattttctctgggttagcctctattccctaagaattgacaataaaactcagaaacttacccaagctggccccgaaggaacactttaaaggattgagtttcatgttgtattttttgagaattttgaagcattcatccagatcctccatgtgcgtcccagcattcctagatttgacgagcatatcatccgcatattcctccatattttgttcgatctggtctttaaacattttattaccattctctggtaggtagctccatcattcttcagactgaatggcataaccttgtaacaatacaaacccatatatgtttggaaacttgtatgttcttggtctggtggatgcattcttattttattgtaccccgaataggcatccatgaagcttaggatttcatgcccgactgttgcatccacaagctggtcaattcttagaagtggaaaacagtccttggggcacgccttgttgaggtcggtgaaatcaatacatactcgccattttttgatcagcttgggtactagtacagggttagctacccatgtcgagtagaaggcttcaatgatgaacttaatttcacgcagtctttctacctcttattttagtgcctgcccctgttctttgtccagtactcttctcttttgctagacgagatgaaagttcgggtcaatgtttagggtgtgagacattacggtagggtcaataccgaccatatcctcatgttaccaggaaaaaacatccaggtttcctcttagaatttttatcaaagctaattttactttgagcaacaaacccttattaattttaagtttcctggtcgagatatttgggtcaatttccacttcttccactggccttacatttgtctttgattccccaagtcggggatgcatgtcttcgtccctaccttgggtgacttcctattggaaaatgctctttcccttgcccaaacactagccgaaggtattttccttcttgaccttagttagagcaacattgtagcattgccacgcaattctttggtttcccctgagacaccccacctcattctttgttgggaacttgacacataggtgaaaaactgatgtaacaacttttaagtcatatagggccggtcagcctaacatgacattaaagctgatggaacatcaattatcaggaattgttcaatcacagttatgctcctcagagcttgtccaacagtgaggagtaggcaggtttgtcccagaggtgtaatgtcctggccacgaaaaccatacatgagctaggtgcaggggatcaaatctttgagctggagtacaattttctcataagttgttttaaacaggatgtttgaggaagctccatcatctatcatagtctatgccactgtcttatttgcaatttgcacttctacgactaaggggtcattgtgcaggaaatggacgtgagtggcatcgactttagtgaaggttactattggttcccctactcgtggtatttttggttttctctcatccacggccaagactatttcattttgttcattctgtaaggcttgggcatacttttcttgagctttgcctgagtctctaacaagatgtaggtcccccaaaaatgacatgtaaattcccgtccaatagtggaggcatcaactggttttggttattgcctgcttggatgacccttt

SEQ ID NO: 15856 - DNA, 6196 bp, Cannabis sativa
ttttcaaaaaacagttttctgtttttaaaaacagaaaacagttttttagttatgatgccaaacatgcgcttagtctccttgtaatcatatctatgtcatgagtagacttaaagtccttcaaatttgctttttctcattccctaaccacctcccactttgagacacaatgatctcattactcctttgtattcagcataaaaatatcacataacatagtttaaacaaattcaaaaatagcaaggatgatcttggcagttgcagtacatacacaaatttttaaaatagtggatcacttatgacatgcatttctcttaagaagcataacatgttaaaaactagctctaaaccaaataaagtttttaaagggctgtttaaacatggactgataaatttatactcatcttatatcgcaaggttttaaatacccgaacttttcattatataaatactttggaatccatcaaaaaaaaatactttggaagaatttattcaatcatattaaaatgaatcgaccaccataaatctcttagtagaagtgttcaaattaaaagatcctacaaacttatttattaaattatcacaagagtaaacaactatctttaatataattaaaaaagaaaataagcactttaagagaaaacagaaattttacattataataaaaggatgcttacaggctccaaatgtctaggcatttcttgcggtccaacatttgttgtgtttggcaagcaccacacatgtactaaatctgtggttggaacctctgagggatctattgatcccttgagtggacttagattacgtaaaccaccatcatcccatccatatgctgtccctcctcctgctacaccttcaactggtggcacaaggatatcctgcagattacctagatgtatcatcattaaacggaaaattaggaagtgagaaaacaaggaaaaaagataaggtgatgaaattgcaagtaatttgacagatactaagctgtaaaaggtcaatcataaagaacgaaatgaaataaatctttagattcaattctggacatatgaacataaatctcttgatcaagtaatatgcaaattaatttaactagtactcaagaagagcttccccatgattcgtgacttctttttctctttctacttactttgtatcaaaataaaaaattcaaattaaaagacaaacatgtaagataatcgatacactaagtttcagttttcgaagtcgaagagttgcgtgaatctagaacaagatgaacaataacccaacataaaatctaatatcgttagcttagatttaagtcccgcgccacacactattcaattgtaaaaatgcataacagtccctaaaaatgtttcttcaaaagtaagtaaagcacttcattgatcatcaatcaaaaaacggaaagaaaagtataacacgcaatttatagttacatacaattcacagagaaattccagaaaagaaagctatgaatctcgtaacaaagacaaaaaaaatgttcgctgcaagactccaacaacagtttattttctgttaattcttccacagatttttcgggcaagaaaatttcacaagagctaataattcaccaataataagaaaaatcaaaggcaaatgaatagaaaaagtatagagtgacctgagttttccatttaggtttaggtcaaagtttgaaatgtgggcttgatcacagaaaatggcgatactcttctgggagagcgttgagggttccaggtaaggtaatggagcaaaaagagagagttgagaaagatgatcggcttttttacagtgttgagaatagacagagttttagtcggttatttacatatttataagaagagtaaaagtgacgacatttgtactactcctatccactcacctcactcttgtgtttttcttctttttctttttttcatttcaggataattcctacaacttcacttctattttagattttgttctaaatttttaaaaatgatttaaggttatttatgaatttaaaagtacctatactgtatttttttgcagaaacactctatttgatgctgtatagaatagaaatatatatattgtgtaattataattcaacttcacttttatttttttgaaagggatcaaaagttaagaccataaagatatatttttataaagttatcaatgacttattagaacaataataaaataatagtttctattagctaaacaccaagatgatgtctatctcttatattttaatttaataattaatataaaaatttactaactaattataaaatctcacatcaatatagtgttaggtaccttaaatgttatacttttcaagtttgttattccaaaattcacatgggtggtgtggtacctaacaagctgacatgtaacaggaaaatttaaccatggacggaatgttacaccagaatgcaccaaccaaggaggacaatgacgaattaaattgaagtataaatgctcaaaataattatcacaaacgggctcaagatttcacctcacgccgagcgatgtgagcaagtcgcataacgtgaatagccgacctgaagaattcgctgaagatattttaggatactttccttaaccgtttagtggaattcatattcaaatccacactcatctttctcatattattttaagaataaatttattcattctcacttataaataatgagacaaattcactatttaggggcgttttcttttttttacgcactttcaagagataaaattgttgaaaaaacttttaccttgattttaatttactactcgtatatgttggattatgactaatcttacatcctaatatgaaagttcttaaaaataataaattaaacacataagggattataaaaatccttttaatggtcactacctcgaaaagaacaaccagaccaacttctaacccagacctaaagaaaggagagaagatgtacctcctcggccagttggaggatctcggggatagatgggcatttacaatcaagatggaagggtctaggttcatggtcataactagtatgccgaccaacaacctcgaaaaggccaaaaaaggtcccaaaatggacaatcatactctaacaagaatgacaacaaagccaaaagtgggctcaatattgacaatcgtcaatgaaggcatgattactgctagggaaacccgcccaataatggcaatcaaggtaacacccaaaatgacaaagatcctcccagaccggcaaggtccaccaatcaaaattcaaatagaaggcccaaggctgactcaatctttcaaagggtgggactcaggcctggaaatgacctttgggatgacttaaactgaaggagaagtaatcaagacaacattttgtcccccgcataataatcatcctatcaatgtggacaactatgtcccacataatagagacagctttatacccttcaaggttcaaatgggccaacatgtgacacaggtcggtcaataggcatgccaagttgatttaagggtacaagctcaattggaacaacttaagagcctaatataaatcctaactgacccaaaactcactgacttataactcgatcaaatgaggggtttgccatttacaacatggatcaatttcttagattttttgacctagtttaaaatgccaacttggaagatgtatacccggaaagatgatccatatctcacaataagtgcttcaagatacaaacagacttgcaaggagtaaagggtgacgtaaggtgttgaatcttcctagcaacattagtagaagccacccaacaatgatattttaagttgatacctgggaagttcgattcatgaaacaccttcgcttcaaaattttacacacagttgaagacatggtagaagtgaagcaaatactaaaagagcctctaaaagattacatcagtcgattcataactgaagcaacaaaggtgaaaggacttactgaagagggaagaatattagtggcaatgcttggaggtatcgagcctaaaggtgagttgttgaaaaacatcaagaggctttttcctgttgaattatgttgtatatgacttgtataggtattttggaggttatagaagattttggatagatttgagtgagaaatcagatttttcaaaatcttgcagttaaaaacggtaggttgtttttccagaaacggtctactatttttagcaattaggactaggaaaaatggcctaccattttctggggtgtttttctcgaaatctcattttttagtcttttctcgatatttagagtattgacatgctatttattgatagaaaaacttttagttttaagtttaagtccctaaaaagtgattaagtgtatcgcttaccagttttacgtatgttgtgacttaagggtctgtaaattgtcgagcagcagtttctactcaagttgaccgacacacttaaatttagaatcaaggtatgattagtataataattgcatatatgaatacatgtttaacgtgcatttcagtttccattagaaaaacatatcagggtatcggtgaggtgtacatagagttgtactgagataccaatagatatatgttaggcattgtagaggctaaaatctacaatgatcggaatgagcgtttgtgggcaccgacaacctacagaaaaaagacaaagaatgaccgtgaaatcttgggacaccgggtggtgccggtcgaaggcactccgatagtcaagttagtaaacttacagtgtgaagtaaaaaagaaaataagaagtgtaaataaatacttcctatgccaatggttatgcgatgatcaacagtcaaaccttactcaccggaatgagaaagagaacgtcggaccgtagaaaaatggtaagtttagtcgtaaaactatagaaagagagtgaatattcgtatatcatttgatccccctctcagtcccagtgagggtctatttattatcttaggaaaacggctacctcttgagacgtggttcatccctagagaaacggtcttcctccacttttctagggatgagcgttctctttttggttagttccggatgagcgtattcacatcaacgtatcacttgggggttgatcttttcgctctgctatgttagggaagatcactatggtcgtgggttaattgtgaaacttaacatccttctacctccatgtgtcaaccctaatattacactttggggtcaaactttattgtcgactggatattcgaatatgggtatgacccaaaaggcatggattgggcgtggcccatgtgagccattgggcttacgagttccttatttctaacttataagtaggctttgtaagtactttgatcattgggccttttcgttgggcttagagcaatttttggccactacaatgactgtcacccttatcgacaaactcgtcaataatcaatcgatattcaagcgagaatcaattaaaaaacaaaattacaattttttttccatctattatcaatagagaacctgtcgacaacatatcgataacatgtcgacaatagctaaccttaatgactatcaccaaaagctaaatcttattgataacctatcaagaatcttttgataaataatcgagaacatacatcatttttattttcctcaatcaccaccacactagatcggaaaacactataatcaacatataaaaccgatcaaaaattaagaaaaaatcatcaaaacgaagtgtatttcaacacaaataatatatagtcactctaaattaaccacaaaaaaataactaacaacaaacttttttttgaacaataccttctcgtggatggagaaagatcggcgtggacgagtccttcgtacaaggaaaaggatcggcgaaggatggagaaagattttcgaaggagaacgacggagaatcttggacggacaagagtggtccttcgttcttctttctttgcacgggtaggcggagtggggtcggacatgggcgaagggggctcaaggtaggggcagctattatgttagggttggctgtagagagacaattttttttaggttcttttaggttttgaaaataaataaataataagagtattttgggtgaaataggaagttaatataatggcattgaataaaacatttaagaggatattttttaaaaggctaattaaaatttttaccccctgaactttgatatctaccaaatcatgccctctgaacttttaaggtcgttaaaaatgccactgaactattga

SEQ ID NO: 15857 - DNA, 3242 bp, Cannabis sativa
aaaagaaaagtaaaaaaaaaagaaacatccctttgattttggaataactttgacagccacatcttggcccttcatactccctttctttgcttgagctgagcaagtatacccaaaatgccctcgtcccacttcttccccaatctcataattggttacaaaatgcttcgagaagccaaaatttttatccaatccaacctcacactcactcccttctgggattgaggcctcgttgggcttgatcgagccatggcggcgggctaaaagggcgcgaatgtgcttcgccggagacggtggcggaaatggccgcttgaagatcctcaaaggagtggagctaacgcttgagttggccggagagttcttaaagagactgggaagaggacttgggctgtaaaaggggaaattggaggactttctggtctgagaattagacgcagcctcatttccatcgtgaactattgaggtttcagattgagtttggcgattttcaatgggttttccatgacagagtcccatgggatcaaaaaacccagataggaatttcaacaattacaaagataaaaaatgaagatcagaagaagggggggaaaagaaaaagtagatgaattcagactataaaaggagaaacagaaaaagtgaaagtgaaagaaaaaaaacttgaagattattatatggtgatagaaaattctaaattttgaaggatcaaacaaaaccaaacacagctgagatcagaacaagaataccagcaaaaacaaatttttccaactgaattctaataaaaatttaagcttggacgctaaaacaaaaagcaaccaaactttttctgattaaacaaacaatggcagagaggaagaagaagaagaagaggaagaagagaattaaaacccatcaaagtttaacaaaacaagaagcaaattataggtgaggtagcaaagccagagccagtaaaaaaaaaaaagaaattccaagaagaaggaaggaatgagtagtgaaatataataataataataataataattataatgaaaaagaacaagtttttagagaaggaaaaagtgaagaaaagaaaaagatgcttagcagaggctgcaagaaaagaaaacccaacctctcttctttttattttttatttttattttttcttgctttaatgtaagcttttcttttttcctttccttttaatttattttaaatttgcagtttgttggtttatgtaatatgtagcaaatttcacttttattttaggacaagggtctgttaactctgtttcttcttcttcttcttctactactactcttctttcttctctttcactttcataacaataatagttatattataataataagaataataatagaagtggggttgggtttcggttcccttacagcctgtactttttttttaatcacaatatttataagatttattgggtttgttttctttttcatcttttggtttatattttttttgtttttgtcagcaaattagtttagttaaacttaaacaaaaacaagctgagctaacattgtctatgtttttgtgtgtttatttgagctttgacctgcttttgtttgctttgaatggccctgtctttttctcttttgaatatttattttcctttccctaaaattaaaattattgacggcttgtgtcattgtttgtttgttatgttagagaaaatttcataaattcataatcaataaacatcgtattaaattctgagtatattatagaagtttcataaatattgactgccatagactcatagagtaacattaattatctctaagacttggtcaaactacatctacattgaattatagaaatagattttcccatagtacaaatcgtttaagaccaaaagagaaaacaaaaaaagccatttgataatactaaactgttacaattcggttaccccaaatttattatagctcaacaagttcttaatttgttgaataaatgtcatatgctttaaatagaaatatgtataaaaaaaaattaaaaaattaacattccaatttttctggatggtgaaacagagttgctttttcttgctagtgtttttgcttttgggaattggttaagcagtgggaatatattccacatcttaatatatttcaattcgtgatgataagatttgattgtaaatgttgatatggtgctacatatgcctttaaaactttaacagaataacaacttttctttcacaaaacaaaaaatttactatcaataattattggagtaagtattagaaagaagaagaaaaaatgcttgaagttaatttatcaaggtttaattaattaaacatagttaaaaatgctcacaaaatttgtcccatataccctttagtttgaaggtacaatattgcccattatcgctttgatctttttgctcaaaagcaggtacagctattttcatgtcccaaaataggtgtcatttacaagcattaagaatcatttttattcttcaaatgcacaacgatatctatatttatataatataattattatataaaagaaattggcaccaagtggagaaatatggcacaagaaaacggcagaaatttaattaaatatattaaataaaacgatttagaggttaattgatgtgaacaaagagtgtgttgaataaaaaacaaaatactactaataataataatagagtgttttatcaagatatgaaaacgatcccataacaataaaaataaaagtttatacctataaaccctgcaatctcagttattcaaaaatctatttttattttatttaagtttacaattaaacatataaagctgaaaatcaaacctaaccctatccattgcttgagtccaagtcaagcctccctaaccatatatttaagagactcataatggcgttcatactttcataaacccaaagcaactactaataataatagtatcgaggttgggggttagaagactatcggtttaacaaacccctcaaaatccatactttaggaaaatttataattttattatatatataattacttatttatatttaattatacatttcaatatatacctaaccataattttaattatctatactatttccttaattttttatatttaatttagtataaaacataattgaagtgtttattataattattgctaataaataataaatattaattattttatattttatattaatttatttaatataaacaaatttaattattactatttgaatacataatattattgattttgtgga

SEQ ID NO: 15858 - DNA, 8614 bp, Cannabis sativa
attgatgtaacattttataattgaataatagtttctcatattatttatttaattaaaatggtgggattcaatattaaaatacaccaataacaatatgccacttcttgtggtgcttgacatcttaaggtactccttaatatttctgttattttatttatttatttttcgtgacatgtttgaacttctatttgaaatgtcattaatcacatttcactttggctacattaaaatgaaatattaaggttgcgtttggctaaaataaaaaagaatgtgtataaaaataggaaaaacttagaatgaaataaattttaaaatgcatgaagaaaattgataaaaaaaaattattaaattttcccttatcttacacttaaataacctctcattctatttcaaaatagaatagtgtttccaccaaaataatagaaaaactatttcattaaaattacattccaatactttaagatgtcgtttagttggaaggaataaaaatataagaatgagaatatgaataaaatgcataaaaaaaaattgataaaaaaatcattaattttttttttcttgttacattggaatgatcttttctttctttttaaaatggaatagtcattccaccaaaatagtagaaagaacattctattaaaatgtcattccaatactttaaaatgcaaccaaacaaaggaatgaaatgaaaattatttcctttccattccattccacttcattacctccaaccaaacgccacctaaatttaaaatgtaactaaacaaaagaatgaaataaaaattcttttccatctattacctccaaccaaacattctactacttccaaccaaaaccaacctaaaagtaaggtgaagataaaactttgaagggaagaagatctgtggttgaaccatggactaggagccaaattgaaagaataagagaactaactaaccctccccaactcgtatgttctttgatttctttctttcaactgcaagtttagattttggctgtcccaaagatttaaataagtttcacttcttcacacttgattataatgagggcaactcaaatttagcatttttaaatctataacgttactccaaaagtaaatcatgagcaatgagaatatataagagcaaattcctaaaaataggtatagttatgttttattattgcatggtaacattgcttttcttgtccttgacaacatcaaacatgttttgccaccaatttcaagagcaaggcttcacaagtacagccgtaagatgcttcacgaaacatgtaaacagacctacatgtccactgtgatcttcgaatccatgtgagcaaactcttggaaataagctttgaaatgctgataagaatgcttcacgtcgtctgtggcacacatttctcgaatactatgcatcgaaagttgtggagcaccaacatcaactgtccttattcccacgccactcgcaagaatggggccgatggttgaaccgcaacccatgtcattacgaacaacaaaatcctgcatttcaagtaatatagaatcaagaaacatgcttacagatccattctcataaacactccagtatcccaacttgagaattctaatcactttcttgccaacttccttttgtctgggttttctctcgagcacatttggaaagtgaagtacgaactactacattaatagaacttgtaacatgcaatttttcacaattccaatatccaccagaaagaaataaagctgacctgggtaggaattttatgcttggatgctatctccctgaataaaaaggaagtgattgaattggttgcatatcgttgattggcattggtttttattacaagcccgccgtgcaacttgggttgatgattctcttcatgtttttcctataaagatagccttattatatgaacattggccaaatttacagcttggagtaaaaatgaaaacaagaacataccatataattagggtgcagggcatgtgccatgtcagcagatacgagaaaactcttttgaatggccttctctaccacctggaaggaaaacaccaaatgagcggaaaggaaatgtttagatgaaaaacttagttatgtgtgaagatattatggctattcaaggctctaacattaccagccattagtcatggtggcaagccttatctgtggacggcaaacgttttatcccacaacaccattaattcaaaatgaaataataacaatactggataactataactttaaaatgaaaatattaaaaaagaaataatgaaagatgaaatgacaccatgtggatgctacctttaaatctgaggtgaaggaatttgtaatccgtgataaggcagttagcatagctggagagcctgctccttgggctgaattggatcccacctcctcgtgatcaaacaaagctaccattctaacaccagcctcatcctcaaggctgttatcagaagaagtggcatctattaatgcctggagtagaaaggcattattagttaatactgtttacaatatgaaaagacaacgagaagtgagaatgtctatcgagcagttcaagtaggaggcagaaatacaatcccaagttacgttcaaggttacaattagtcaaccacgtggctttagaccatgaccattgaatgatattttctcagtaaaccatcagatcacatatcaaatatgacaattgacattaataccctgcttacagcaaagtcacctacagaccattcagatcgagaatgagattgagaacctatatgcattgcatgactccaaaatggtgtacttggcagagaggtgcatcttttctatttatttttctataagaagcatagctatgaacttgttatatgcattttgaagtaaatataaagtaacagttacaaacttgttaccttaagagaacaaaatgacatgcacagattatcaagccgccctgaaaatataaattcctttgtggcaccagctattatgcttggttgagtatcacaggcttgcaactcaaaatcacaaatatcattgggcttacatccaagctgacttgcaagaagctacaaggggaaaatattaacatcacaataaatctatcatacaaataataataataaagaatatctattattcaccacctctttcctttagtttgtaatctaaacaaacatgaaacttcaattttctctatacacctcccccctgattaacaaccccatcctcatatatatatatatatttaatacacacataaagagagaggagtcaaatagaagcaaagaaagagctgtgttttcagatgttaacctgaagtaaaagtgagtggtgcttcgcatcttccaaggttgttttctcattagatttctttccatcagtctgagaatcactttcaaccggaccattactagcaacaactttattgagctccgcctgcaaacagaagcaaataaatatgtgatgtaagctgctgcagtaagccacggagtgaaaaaagttttaaggaatactaatttacagttaaaggcaaactacaacaaaaacttcacaagggaactaaattatgtttttcgaacaatccaaatgaagaatcacattttcaaaaatatattgtgttatgatatctaaagttaaaatgtaacatcgttattgtggtaagttagtcccaatctccaaatcttccaagatggctttgtgttctgagaaatatttccatattgttttgctattggaaaatagtaatcaatcaatggtaaacgtggtagtgctactatttgacacttacagaatatgaactcaaatgtaagactaatattcagaccaattaaatggcacatataagcgtgtctaagtataactataccttaattgctgttgctaagacaggtagaagatgggtctgagtgttcaccttaaaaccatcagtccccctgccacaggacagcacatggacaaattcattatgggattatctgctcaaggtgatggaggacaatggcaggtttgcttaagaatacagttctgaagtttcaatcttgatcataaatcacttgacaactaaatatatcacatagcaaatgtgaaataacaagagaacctgtctaagtgaattgcaagggttggaatccgcattataggctcctcaattcttaaaagtttatgcgagtatgaaacaactccacagttttcttcccttacgatcactcttcccgcaagtgtcaggtctcgatcaaaccatgtgtgccacaagccacctccatatgtttggacaccaacttccaaatacccacctttagttacctgcaaaaatcacaatagtacaaaataaggaaggttcttttttttgtattattcttacataaatcacacacaaacatgatacacacttatgtgacaaattactttgataggtgagacacatcttaaataaagataattaattgaaattacttgccacataagtgtgtgaactgtatgtgcatatatcatgattttttttccccaaaaattccatatacttgacatagataactcttaaggtttaatatctcaaaaacaaaaaaaaaaaaaaactcttaaggtttaaaataaataaagaactaccttgctgacaggtttaagtttcagacaaggactgtcagtatgagccccaattatgtaaaatccattccccgcaacatacctgggcataaactcagaaatcttaacaaacagtttcaaagaaaatatcaaatgcctatacgaattgttttacaaaatccctttcaattgctcacattctgttttccctttgagaaaaccaaatgaaagatgccaatataaaatacttcaagcataatttgaacattcaagcaagtatttctcaacagctaaaatccataaaaatgaaaattttgattctattctcttcttaaattgtataacaaccacagcttacaaatggacaaaataaaactcgaaaagaagttcttactttttaccaatggcgaaggctactatagtggagtgatttctagtaaagaaatacttcttccctgcttcaagtttccaatcttctttctccgaaatttgctcgtaccctgcacttctcaaactctttttcgcctcgtctgagattattcgattcacacaactcagtcaattgcaataccaatacatattcgaccaataaacttcagctaaataagtacaagtataatcaataagaaaacttcactgattgacaaatctggttattgggagggaaataaagtatcctaattttcttggaaatcaaacgaaatgtgaagttggaaagaaaggaagtaagagaaataccaacagcatggaaagcagtgggggaagcgttcaagaagtcaacgagatcatagaccacagaacttccttcttcctttgccatggctgaatacaggtactgagatgaatatgaagaatatggctatggcgttaaagcctggttgaatttttggtccctacttctctctctctctccgcctccattttatagcaagaggattgagatcctctgcatcatttctatcttaagtttcccgttcatccaatcaaatcatttatattttcactttttttttcttttttttttttttaacttgagcttttttacttttatttttttttataaaactttttgtacctgaacttgagaagtcctttagtctagttcatctttggtgcaagagtgcttgattagtgagctgttatgtactttttttttttaagataaatataattcattaagataaatactcttataggagaatttaaaaattgtggacaagttcaaacacaatcccttaaattagtaatagatattaccagtgtgtaagcaatatcattcgcggatcgcagaatgatgttgcaaaaccaccaccaacaacagctaataaagaataaatatttaataaaatagactgaaaactaaaattaatgtgaagcttattaatccaaccaattgccacagtagaatcactattaattatggatatactaaaaccaaattgatgcgcaagagtcaagcccagacaaatggcaagcagctccgccacattagtagaaaaatcacctaacatatctgatgactacgccaaccaaaccacatccgctgcatctcgcatcactccccctatctaacaaagcccttctccagaaccaccaaagcatccgtcgctagagcaaataattcaggaggaggtgacatccatcgagtaggtcagtttgcaactgagtttgcaaggctcactcccaaatgaaggcctcgccgaccatactccttaaactccggcagatggttatgggctaaatctggaacaacatccaatcttaactgcttgttgccaaataatattgagtttctattataccacagccaccaaggattgtcatcattaattcaaaagcctcacgggatagcctattaaagagaaataggagaatttcctacattagtccatatacacatcgacggagcaccgaccacaccctcaactgatgccacactagaatcaaaccataacagaaaaatagggcatgctcaggagtttcagattcttctccgcatcgtgaacaacaaagagacacctgaactttttgggagatcagttgtgttgctactggtaaagccatatagaacatacgccaaacaaaaactttcacctttggtggcatattaagattccatactccattccaccaacgagttaacctatatgaatctatgactctctcctcaacctggagcgaccacgccaatgagtagccactcttgacattataaactttgtctcgatcatttttttccatttaaggaaaacatatagaacttcatctttgtgtcgcatagtgtatacctaaacatatatagagaaatcatcaataaaagtcacaaaccatcttttacctctaaagtgaagcattcttggaaggtcccctgacatctgtgtggatataatttagagttcccttagtgcaatgaacaacagtgtcaaacttgaccctcgtttgttttcccactacacaatgctctcaaaaatcaaactttccaatcttggcacctttcagtagaccttgcttcactaagcctatcaaatccttctctctggcatgccctaagcgcatgtgccaaaggcaggaagaatcaggtgtcttttcttcagaactgctagagacaactgctcttcctataactgtactaccatctaggaagtataaattcacctttcgagtacctttcaccgctacaaatgcaccttgtacaactttcaagtttctatcttctaatgttatcatgtaaccatcagaatcaagaacacctaaagaaataagatttttctttagaccaggaatgtacctcacattcgtaagtcttttgattgtaccatcatgcatctttagtcatattgttctaatctcttttgtctgacagacattgtcatttcccattaggacaactccaccatcaagttcttcaaaacttgagaaccaatgtttgtttggacacatatgataggtacattcgaaatcaagaattcatctgtctacatatatacctgatgaaactggaaaggttgaatcttcttcgatgtcagccttctgtgcaacctttgcatttgacatgtccttgtttggacagtctttcttccagtgccctttctgatgacaataggcacacttgtctttcgcaagatttcttcttgatgactctcctctagactttgatctagattgcccctattattcaatccacctgatttcttgttattcgatctgcctctggttgcagccaatgcttctggcgttgagtctatgtgatcatgttgatccttctttcggtacttattatttaccaaagcattagaaacatctataaacttaacctcatctttaccatataacagagttgtggttaaatgttcataactttcaggtaatgaatttagcaacaacaaagctttatcttcatcactaattttaacatctaaattttgcaaatctgccaaaattttgttaaaattatctaaatgttcaatcataggggtacctttcttgaactggaaacggaaaagtttcttcttcaggtaaagtcgattccctacactttttgtcatgtacttatcctctagctttttctaaagaactgtagccacactttctttcatgacaaagtacttctaatcttttcccaaacacagtcgaattgtgccacaagtttgacgattgaccaaattccaatcttcatcggaataatcttctggcctagacttcaaggcaatattaaatcctttccgaaacaatagatctaatacttcacattgccgcatgccaaagttattggtaccataaaatttcttcacctcaaactttacatttgataacatggttctcctcatagaacctcttgactcgccaaaactttttacgtcaattgtgcatctttttcaagatctctattgtcagtgcgtcgggccttcgattgaggcgattcttgcagcgttggatttgtctcgtcgagagcttcaatttgatatataatattgttatatttggttttaatactaatttgttgtgcgcggaagcaataaataattaaagataacgataaatatatatcaaagtagtaaacaata

SEQ ID NO: 15859 - DNA, 6027 bp, Cannabis sativa
tagattatgaattttcagtaaccatgtgttctcttaaattacaattgtgtactatcgatgaggaatcattaattaaagtacccaaaacaattcaaagaagaaagaaaagaacaaatttgagacaattcatagaaacgaatttacttcttacaacttttgaggaaggcattttttaaacaaactatggctacaaaataccaaatctcaaagacaaaaaaggacaagtacatgtaatttggagaagaggctgagagtaaatttgatttggaaaaagaaaaaaaaaattacagataagaggtaccatagatttctggctcaactaggtgcttcgactgcaatacaagacatctcaatgctccatagtatgtacaaaagagaaaaggaatttggagaggcaaaccaaagcaaaacagatacagactatgctcactaaaactcatttatatctcttaaattgggagtaacaatagtaaattgcttgtacgtgtttctacataagcctgtgtcaagaaccaatcacaaggccctcccgcgagatattcgtaacacgtaagactgcctgtgcactgagaggagagagtttcgattgacaaaagctctcccaagagttcgtctcggggtgctcagatacttcttccacggatgaaatatcgaaagatttctgataaacagtttgcagctccaaaagaagactccgagcagcctcccttgattcaggaagctgatcactaagctgggatgcagctgtctgaattaatttgtcgataccgtatgttttaatcccttcaacaccctattgacatgcgaacaacacataaattgaaagcaaaacaaataaccagcaccaagtgacacgatttaataaactgtaagtgataaatggtttaactgaaaatcaagaaacaattgtgtttggcattatgatttatagctactatatcatctcaagcaaatggtaaaacagcaatcctgcccagaaagaccccagcgaataaagctaaaaacacatagtagtataaattttgaaatagcacacttttatccaaatatgctaccgcttaaagaaaattttgaaagcacacagattgcagatatgcctatatatggtattagactaatctctggtactattggtatgtaaaaacattagttcacaaaagcaactgataatacaagaattgcacaagtacatagaaaccatatataaactgcgtaagagaatcccagtaaacattgagttggaaacaggtgaaaataataataaagatcaccagttaaagagctgagtaaatgaatgtatttagtgtcttttccttaccaatcgtggaacacttctacaaaagcacatagatgcctttgctcgaattctaggatttctgtgtttgagacacggttggagcttcggtaacaacaatattggggaaacccaagtagtcattgaaaccaaagctttctcagctgcctcacatacaaatcgtttgtcttgtgaagacttgagaagaagctgaactagctgcatccatcatagaaatatataattataaattagcaaagcataagaatacaaaccttaatttaggacatggtaagacaatgttatactcaaattgtaatcgaaatgataccagcaggtccaaagattcaatcataagatcattgtaagcactaaaaatgtctgcagatgtcatgcatgcagttttgcaaacagcacttcttggatttttcaaggactttgcaacaagtgagataacatcagccctgttcatcatatgagatatacagattcaaatttaattcaaaaaacgaaacagtgaaaaccaatattaaaaaccaacaaaatacagtagtagcttaatctatttttgtgagaaaaaatttgactcacaacacatcgaacatggcctccttgtgatatagtgataaccggcgtacattgtttagtgaattacacagtaagacccaatctttagagtctaatccagacaaaagtatctgataaatcaaataggtcatgtcaagaagagaaattatagatgtaatcatcattgagaaaaaaaaaaatccaaagctaagagcaaacaccataacaatagaaccatccaaaaatcttaaagctaaccttcaagcttgcatcaacatcttctacatcatttaaattctcggagtcaatgtattctacttctgcacttgcaacctcaactacaggattcacaacttcatcgccatttacagagtttttcttttgtgcttcttcaaggttcccatttacaggattcacaacttcaccgccatttacagagattttcttttgtccttcttcaaggttcccattggtattgccattggtattgctaactacaggcttagaaatacttactttactagagttttcattcttcctctcagatcctggtatggtattaagatcttttagagctttctctgacataactgctatagttaaagtctgaaacaaaacaaatcacaccataaacaaccaaaattagactaatataatagtcattatttttccaccaagatcaacaatccgatagaacaattcatttccaactaaagttccaatgacgatgatgttgcttaattatgccaaataaatgctcaaacactgttccaaagcattcaaggcagtgttaatcagttgtccttagcaaatatcaagtattcataaaacatcaacttatttgaattagcaggtgttacattactcccacttcacaacaaaagatgaaatatcatgtttcatgatcacttaagcacaagtacaatatgcaactgacatggcttctaaatgtgttcctagcaaaaagctgctaaataacttagagcaacaaactgtctctcaaactgttcatttcaagccaaaagcatattacatttttgggtctttgttctcttctagtagctaaatcaggctgtcctcctacctttatcattttcttcagtagcacaaactcttctaagattttgcaaaatgacattagactacgatatcatcacatccatattcaactaagttaacctttacaaggcaaacatcgcaagtagactacgatatcatcacatacattagactaagattttgttaaggccgagtaatgaccaaatctcatttcttaactcttacttaaacttatgaactccgattcgataaacacgggaaaaatcataaaaatccaaaacctaccgactatccgacggaccatgtggtaaacagatcaggataatgacaatgtgggcctataaacggtacaacgcacatgaataatttgtggatacgacataaagaacccaataccagaatctagtggcgagcatcaagacgaacacaaaatatcaaaacgatacgcagtcacactaattcgcacatactaatactacaacacaagaaaatccctaattatttcagaaatgaagaacagaattcaaactaaatacatacacatagcaaatttgtcttgcttaaaacgaactacaacaaatcagcaaataaatgtaccccgaaagatctagccctcgaaccactaaaattaatacaaaaataaaacaatgaaaaatgtaaggtagaaacaaagaggatctcgacaagagactccatcacagatcgcaaccctcttttgcctcaaaattacacattcgaatccaattccaccattctaaacacagattcaccatagtaacttacaaaagaaaaaaaaaaatcaacactacaaattcatactaaatacatagagagcgaaagagacttaaacagaggaagagagagaaaagtgtaccagaaagaataatggcgccgataaaagagcgagggaaaaaggaagaaacgatcaagaacgaagacgaaggcttagtccactctctctctctctgtaaatgaccggagtcctactatttatacggagaagagagaagaggccttgtttggtaaccggcgttactttgttctcaaacggcgtcgttttatggatttttatttcgggtttaaatatttaatatgggtaaaacccgacttgggccggcaaaggtccaggataactgcatgtgatcgctttttatataaaaatcgcatttaatttttatctgtatctcaatttccccatcgatttcgacttaattacataaaatgccactgacttgacttgtcagtcgctaaatttaccccaatctataataagaaacaaaaaaataacctgttcaaaaaataaaaaacctgaaaatggtaactctttattttcctttaaaaaatacaagagaagggataattataacaagaaaatagcattttattaaccattaaacttaattattaggagaggtaataattgagttgggacatttcccaaactgaattgacaattagctcaagcaaatgagtgagtcatcatattagctgattgttttagaaaatgaacaaacacatttctcaaagaacataacaaagtcttacaattatttaccacttgatcaaacatggaaatcatgacaatagaactacgaatggcttgaactacagaaagacagtcagtttccaagatcacaaatattttatggtagtattcattgaagttagaatattatatctgtaaaattaaaaaaaaattaagtaacttacaatactaaaaataaatttactgtagcatgcgtgtttaaaaaattttaaacttatttttagtaccataaactatttaaaaatttacagaaataatattattaagttcggctttgaacataagttggctacgccaataccttggatccaacctagggaccaaaaaaaaaattgcactttcataattccatattttttttacaaaataccatattttttatctaaataaagacttaaaatattattttttttctatatttcactaaattttaaagtagatccatgttataaatggtcggcccaagaatatggcaattgactcaatacagaaggtttcttttttttgtcatccattttttatataatataataaatattttttttatataatatacctaataaatgtttataaaaataaatatgcacttagcatttaaaaaaaagtcttgtggttctcaatacatataattttaaacaattttacttattttaaaatttatgatttttttttaaattaaatttacgaagtattaattaatagttttgtaagaggtcctaattgtaactataacgttgtaaaaaagatattttggtatatatttttaaacgtaaaaattgattaaaaaattgtaataataagttgatagtacttaaaatataattaaaaaaaaaactgagatttggaaggagatgagtagtgacgcgccaacataagaaaatgaaacttaactttccctcggaaaacaaaaataaaatgaaaaattttctattttttaaagggtggaatcaaaatgatgccacgtcaatttacaaaacaaaaaagccattcattaatgattattatgaatggtttagtttcggtcaaatacttgaacaaattaattaagggcttaccatgaaatcaatcccagctgtctgatttgatggaattttggattattttttccaattttggtcccaataggcaaatttttaattaatgcatttttatcttattgaccaaaaaaaataataattttattactttaatgtttttatactggattttgacaagttcaatacatggctatttataacctttggttacccacatgggttgccaaaaacaaaaaccacccaatgtcggtgttctttttttcttatataaaataataatgataatattaatatgattgtatatataatggtttctgggaccttgtattattgagtattgataaatacccaacacactaatcgtaacactatattagttgtcatcctttaaaacacactgccacgttcatttcaatttgtagtcctattcttcttcttcttcttctttttattaagatattaacatatgatattttatatgaaattatcataaggatcaatccaacaacaacttatgttatgtt

SEQ ID NO: 15860 - DNA, 4465 bp, Cannabis sativa
ttttttgtcttgccaatctagcgagtgagtgttggacaggtttctacatcaacagtaattgatgaaacttttttgaaatcagcatatggaggaatattaatagctacatcaactcaagatggagaaagggttgttgttgtgttgtaactttttcaagaggttcttgtaagagttgttgttagggttactgaaagagttgctcatttcaattctttgttacgtttacatggtgttgttgtaaggcttattataagggttgttcctttgattccttgttattttacatatatagggttgatgggttgtagtaatgattgttctatttagttctttgttatttttgtatagagtagtcgtaagggttttgtaaaccttgctaaatttgttggtaaagttgtggaatgagtttgcttatcattcttaaattgggttgctgtacatgatttcggaagtttgctaaaagggtgccctaattatgatttctcctttggttgcataaaatgtatagaagtataattatactccaccatagtagaaaattatattaaaacgaaaactactttaactttgaagttttgaataatggtgattgaagtcaatattgtatagccatttaagagttagtttagcatattgtattttaggagccatttatgataattggagacaagatattgatacattgttaaaaaaaaaaaacaattttaattacaatgccacttatttgttaacaaattttactattaaagtatgtattattattgtttattaatacaaaataagtattaacaaaaacatgagaaacaataaaagtaagagtacattaagttaagtattctatctttaacatgcatggggtctttgacaacaacttaatattgacattgatactttggcatatccacaaatttgttttgccattgcaaatgaatataattaataaacaagcctagatccatgacttttgccttgaaatctttttctcattgacgaaatactcaacaaataagaagtccatatatatcactctccttgcttcaacacaagaacaagtagaagcagaaggaggaggaggaaattatgaagaaaattttgtgaaaaccattttctttcttcagttaacaactgcctttttccttcctaattttactattggaatctaaaaatattcagtattaacatctttttcacttgtgattagctccttcccaacaccaatatttcatgacaaaggaatcccctgcgaagttaggacatgtttagagctaacctaggtgtaattaccatcagattttaacaaaacaaaattagaaattcttataccatgaattgtctctgccaaaaatgataaaaaactttaaaacatttcatttggaaacaaacaagtcatgaacattcacaccagcaccacaatataaaattaactatacttaaacaagccattttcatgctatgtattatttgaccattattccaaacacagacgataatactcaacttgctacttgagagaggtgaaggtaacccaataaagacgacagactaaagaaaattaagaaaaaactagcctctgatgctagcaacacatagattcgactaaatggatgctttgaatgattttttttttattttttcccaaaccctgaaattacaatgacagggcgaaggtggcacaacttgtaacttacggcttccaaagaagggtggtttcggcgatcatggaagtaactacataagggtccatgtttgaagcaggtctcctgtcttcaaaatagcctttacctgccttctcggtgtcacggccaactcgaatagatgcacctcggtttgcaacaccctgtcaacagtaagtttaatgattattattattaactcaaagcagcagcaataaaatttccaagaattaaggaataaatctaaacaatgtgaaaaagtaatagaatcttgttctaattgttacccataagaaagtgttgatgtcggcagtttcatgtcgaccagttagacgacgctcattgccttctccatatgcagaaatatgctctttgtgcttcaatccaagcttttcaatggccttcttgatgatctcataccctccatcgttcctcatagacttggtactgaaacataatagtataattaatctttaactaatagatcttactaaatgtatcaactataaaagaaattgcaatatccattacagtcgacaatgatgaaaagagaaatacaaacctgtaatttgtgtgagcaccagcaccattccaatcaccctggtaataaaatgatcaaaaccaaatgaaaaaataagtatcatcactaaacaaggataaaatattccatgaaaggagatacagaaaagtaaaaaagaaaaattgaactcaaaatagataatatcaataccggaattggctttggatcaaaggaaacgacaactccagcaatttctgttatcctctgttgatacgagaaaataactatataatttggaccaaaaagaaaaaaacgaatcaaaagaattccaaatagaggactttatactacctccagaatgtaacgagcagcccacaactcgtctccagcagatataccgacagaaggccctacttggaattcccactatattgtagaagcaacaacttaatcacattataattgaaaaaaaaaaaaaaaaagaatatagtaagaatgtaattaagaacagacaaaatagagtaatgatctcttacctgccctggcataacctctccgttaatgccactaatgttgatgcctgcatacaagcaggccttgtagtgagcatcaacaatgtctcgtccgaaagctttgtcagcaccgataccacagtagtatggtccctgttgataagtaatacagactctttaattttagaaccaaatcagtcaaccattagatatcaaaatagagctgcacaagcacataaacactttcatagcaatgtaagtagcaaaaacttgaaaacaagaacggcgaccagattttaaagcaaaagttattgacatcaaactgaaagagatcaaacatatacttagctaacataatcaaatgtgcctctcaggaatcacttaaaataaagaagtttgtattgactgagacgcttataaactcttttagtatcaaaactctgtttaaacacacagtagcagcaataaaattgtaacagcaaagaatgacttcataaaatatgacagggagttgaaaagataaagtcttagaaggtgggcagctccattacctgagggccagggaaacccccgacaggccacccaatgggccagtggacttctttcttcagtaaggtgtattcttgctcgataccatacctgttttcaacatcatatgtctcgaataacaataataacattgactcgtagaaatataaatgaagcataataactagacatgaatatgattaaatatgtaaaggaaaagcaggctaagaagtacaaaccaaggttcctcagcaactacatcaggatggctgaaaatctttgcagcagcacttctcttgtttgtaggaatggcttctcctgccggagtataggcatcacagatgacctatgatcattacatcaaaaacaaagagaattagaaaaactgaaacccaggtatgtatgattcatgaagatgcaaaactctccttacttaccaatatgttgttgcctctcctaaatgggtccttgaaaattgcttgagggctacatcaaaaaatgacaataacaaaaaaaaggttaataggataatagtgaggggggaaatgaataacagcggagaaaataaactaaaatgattcttactataaaatcacttcactgtcttctccgggagcttgacctgtgcttgaaccatcgtaattccacttgggtaactttgaaggatcatcaactggtccttcaagagtctttacagacagcgaaaaattgacatggtcatttgaaggaattaaataagtaagaatttttatatcaatctgaatgtttataaagaatttcttactcttgctttgcttcttaggtccataccggatccaccaatcctgttcaaagaaatgattaaacactaaagattaaccaaagaaaatgaaaataaataaacaaatgtaccaaattgtaggggaaaaaaatccaatttaattacatttcaaacgatctagttttgcaaacggtagaaatataaaatagagcagaacaattattattattatgatgatattattaaaattatcattatttctgataaaaaagcagaacgattattaatcctgaagaaatcggtccacaacatttttaaacggagaaaaatacacagatcacagaacaactcagagatcagtaacaaatatttatggagggatataagtaacagtaattcttttggttgataacgagagacctgaaacatatgagtaattatatatatatatatatataaatacacaatctaa

SEQ ID NO: 15861 - DNA, 5807 bp, Cannabis sativa
tttaatccttggatgttggaaagtgtatattcttgttcccactttccaagattatgaaattgtttctttttcttgttttgaaaaataacaaaacaatttctaactagatccttcacagctctgccaagtcttactcaaatgcaaaggccatacatacaatacaacagacaaaagctttgtgaaaattgatttcagctcatctagaaaaatattttcttttcatgcctgtttgacagatttcaaagattgagtttttatgctattaatcttcataaatcattagtctgagttgtgggtacttctctatgataatcaacctaattcatctcttttttttatcaggtaagctcgcaaaaggggaaaacatatacaaacaagcaattttgatatggctagtgtcttcttgggcgctacctttagctccctcactgttaacaaaagcatcataaattgcagaaaatcaagcactacaagtggtctacagcttggtgctataaaggccatgcgtatggagaaacctttggaagagttgtacaaagtgagagtggaacggaaagtgtcgacggagcgattagcggagctcggtgtttcaaaatggtcgatgtggaagacgggcaaggccaagttgccatgggactggcaagtggaccagctggtttacattgaagaaggggaagtgagagttgtgcctgaaggaagtaagcagtttatgcagtttgttgctggagatttagtgcgttatcccaagtggtttgaggctgatctctacttcaatggtccttaccaagaacgttatagtttcagagcatatggtgatgactgatggagctttatcacatagattctatgtgcgttttccatgttgcgccaccagagcaaaagctttttctttgtatgttttgaacttaagtataaagtttgtctgttggagtcgtttttaagagtgtatcaattttgttaagtgatctctgatcaataaatatgattattagagttcgtatttagaacaatttagtttagtcaatcgtagttttcaagatttgattactctttgtttgcggtcttacagttcaaaaagaaaactacagtcaattagctgttagagaaaatatcacttgcgttgattggaaccaaagttgcaaggtgcattttttcccagcattatacatgaaataagtatttctcaggacattatctctataaagcaaatcccttataatacaatacctccctagctgaagaggaacataacctataactccaaaccaatgaactgcaatatccacataaccacatcttcacatttgggtatctccctttcagctgggtttacgaaacctaaaagggaactgacaccaccacataataatctttaaatatcagcttctatgtccagccaagtttcaatgataactcagagtcaaattcaacactgccactcctcatacttctcaactaccagaggcagcccggggttttgggctggtagcaacggcaactgaggaaacgaatttggacacaagaacggcctcattgcttacggcattggaggcagccacatcttccatgcgcttccatgttgaatctcgcttctcctgtgtttctctgtcctttacttcatcttcttggaatctatccaagcattcatcaaacagagcttgatcagcatctgagaatatctttctcacattcaatgtcagactttgaacagcttgattccaatgacttcttgtatttctctccaaagctggtagaattataggcaaaagtacttggcggttctggatgatcaaattccttatatgatcattgttccacaaaaataatgtacgttcagctacctgcaatgcaaaaccaagataaaaactcaattcagtacaatttgaagtgaaggccacacatacacattcaacatataatacaaactacacatcgaactttgcaatgcaactggtaatcacatgcaaccatcataggactacatatttcaagaattcgtagcacaacatcctaactaagttattaaaatagtcgagtaccaaagtgcacaaacttaaccatcctttgcaactttcaaagggtggattttagttgggaattctcattttccaccttcagttgacaaaatgttttttttttttttttttgtaatattaacgtcataataactcactcaggtatcgcaggctaacaaaaatagcacttaaaagtgtacatataacaaaatacaaatctgtagtccatggtttggtaacagacacagaccaaatgaatattatgtagaatgtccttacatcgcccaaatttcatttcaacggaaaatacagaccttgacatgaaccacaaagtaacctataagaaagaaacgactgataaaggagactttttttattcttagaagttccatgaagtaaagattagtgacaaagagaaaagatgcaaagattagtgatagttttaaaaatgtaacaaaaaggcaatgattcatgaatataagagattagtgggtacctgaaaatgaaagctgttgaggcagcgaccaatttgacgaaataaagggaccatgcagcgttgaaattcagctggttgggtggcttccagaatctcttccaattcagtaaggaacataacctcttttgaactattagtaacaggccaatacttcaaaagacctcgaatcacagtatctgcgagctttacatctttctccacaaactgagttatgcaatacgaaagctgctgatggtacattgccacacacttgggtttgtggaggggtatcaaagcacggacaaggaacagcttgtgctcttcctttaaaggtaaagcaaaaccattaatgatgcttcccagtatctcaagcaattctgcaatcccattgtgcttttcagtctcaaaaatgaaacgatagaagatattgttgatagctttcctgatgtatggccgatgaaccatgaacttcccataaattcgatgaaggatagtctttaagtaatctctctctctttggtcctctgagtcaaacaagtcaagcaatcttagcacaaacgagtggtcaatatatcttttggctagcttggcatcagtctcagttgaagcaacaaatctcaataggaattcatacacaatttgaatatgaggccaagcaggttccatacttggctcctcctcttccaagtcatacatttcaagacccttattctcgtgattgaaagatggaaacgtacgaaacaaattggctgccaccatcttcgtaatctcttgcatcatcacctcattgaacttggaattataagaggaaatgtaatccacaagctcaagtaaagtttgcctcttaacatctttctctttaagactgctcgatgggtcactgaaatcaaatacaacacagcacatattcaatttcttaatgaacaaattctgcttctctgaacttggaacgtctctaaagctcggcaaagcctcatacacccctgaaacaaacaaaggacccgcttgggttgttgcacttccagaagttttcttggcttgattcgatttattgccgagtgttccattgctagaccttgcattggctgagctcgaattcgatgattttgatgtagcagaggtggatttcgagctgttactcgaattgggtccattggacgtgtttatggatgaataggcattgactcctccatcaccatacgaatcaccaagcgatgattttgagggttttcgaggaatcttaccaagtaaattttttatcatatccacaaaaccctaagtacttacgtttaagaccaatataaccaaaacttaatctaacctctaacgaccgctcaaatcactgtcatttattttattttattttattgcaataaacaagacaaaccataagagccagaaggtggaatcttattacccagtagctaaaaccctaatcagaagctcgagccaaacccgattatgtttctgtccatggaaagcctcacaatttcaaacgaagaatattttgaattttaagtcaaaataaattgaaaatttacacatatatacagataacagatacacatacacataacaaaacgtaacttacatttacgacgattgatgtaaagggtatatagaaagtgccagaaatcgagggaaaatgcgagaaacccctagaaatctgaactgaggacttggtctccgactatatctgatagataaaccctttaccccccactcaactaaattttccagagagaaggagaaggagagagtcgagattttacacaacaataaccaaaaaaaatatgttatattttaataaataaatgaataaatacacatcaatagtttatagaaataaaatctgaaaatggaaatgccttttctctctctctcactctatgtatagactgactgtattgatttgctttgaatttttctcctttatgaaataaaaaattggaagaaaaagcacaatgttggtgattttaatagcatattttacccaaaatttaaaagaattttttcagttaagggtagtatgttagatttaattacatttatgtccctgctgatgttcttaactaagaagcagtattgcacaaaagagacccaatagcatcacagattgcaggtgctgtgggacccattatgtgtgaagtttgtggattgagtcaaccttgataagtccaactacctcatatatatttgtaagaaataaaagttaaccaagagagtatagaacaaataaataaaagaaaatagaattatatgtggtaatgctaggtctaaacatatatttgtcaatgcaaatagaccagttcttattcttttgattcaaaatctttctgattcaaaatgcagcctttacccaattggttcttctttcgttattaagatttgtctgtcacataagaagattgacaataatggtatgtgataattaaaaggggtaagtaatggtctataaaattgtgcttttaaaaaggatatgaatgtttaagcaaaaaaaaaaaagagatatggatgagaataagacagttaacacttttattaggattataataaataattaaatatgtataatttgatggatatataggacatgaaatgaaatggaaatgaatggtttataagccatccaccatctaatttttatcatccattactctactctgccccttatataaggtacatattaaaaagggatgtagtttctagtttctacccttggtaaggactaagggtatagggcacaccgcaccaccaccaaccactaccacccaaatgtttttcttcttcaaacatagaatatgaatggattaaattctatggatttgtgggagacttttgggcttcatgaataaactattaataaagtaaaaacctaccaataccatacttaaacatgccacaaaatccaaactaggaagagcaaagtcaaaatcttgtgtggagcaattatagattgacaaaaaaatcaatcaggggtggaacttaactctcttatcacatgaaaaaaagtaggcagatttttgtttcctttaattgaaaaataaaaaacagagaaaaactaaagttgcacacgtacacgtgcacgtacccagagatgaaaggcttcgcacgtgagaatactaaaaaagctcgtacgataaagctataaagaaagagattgtgaatggtgaaaaattgatggtatgagcaccgagtcagtatattacaacttacaagtttacaaccactgatcaaaatcatcatcaatttcgtggcgcatggtttctaatatccacccaaccacttatttgtctttcttaataataataataata

SEQ ID NO: 15862 - DNA, 3183 bp, Cannabis sativa
actaaaactgatagcctttcaactttcatgtgcagcatgatgattcattatcatcatcatttcattactgcaaaaataaaaataaaattattattatcatcattctcttatatgcttgtcaatattataagacaattggccaattgggattgtccaataatcgttgcttgtgttattggtccagaaattaataagaaagaaaataaaaaaaaggtgaagcccccacatgacatgtgtttatgatgttacatctatttttatttttagttaatatattatttcctttcacatacccaagttaagatgtagctattagatgatataacacacatcatcaaggaccccatatgaatcatataaaatatcttagttgtttgttccttaacagcatgttaattagtgtgcatcaatgggaaaaacagctaccttaaacttgtttgatgtctacataatcacatgaactattatcttaaaatattttctaaggtttgaggttcgaggttcgagtttacagtaattgttatagttttctggtctcaaaatattacaggatgacacgacacgacgagcctaatttctttttttcgaaaagaaagaaagaaatgaaggatttagctgttaaacattatgctcaaattgcttgtcacgtgcttgtagggccaatttcgtagttatcctttaaggcattgattgctagacttgtatggaggccaggtttctttcattttgtttttcttggtgtacaagtttgaggattggggaattacttacttagaccctttcattctttatccattcattcacacacacagagagatatatacagcacctgaaaacatatggggtccataaaaggaatagctggttcgattttctatgtgtagctaattctttagaagtggcaaattgacattgccaacttgctgaaatgaagattccacccccaacagaacaaaattagtgacaatgcagatggccatccttgtctatcactttattcacacaatgcccttctgttctctttcatattcaaactttttatcattttttttttctgaagtgaataatgatttttaaataatacaacttccatcatatttctaactttgatataattatgtgatttagaattatgcccacatttatttgagtgcagttttggtgaactcatggtgtccagcattattattattagtattactctgcaacagaaacttaataatgtcttcaaataattctttatgattttacacaagaatcttatgagcaatgattgatgactgtatatgattcaacatttaaaactgacatttgttttactgatattgacttgattgttgtacttggtttttcatatgtggtttaattgagtaatcttttgatatttgattgtggccattttttttaacctgatgaatttattgcatatacgcagcctacacatagtacgatgtgaaaacatatcgattcatgatgttcaaatctatggagattttaatacaccaaataatgatggtattgacattgaggattcaaataacacaattattacaagatgtcatatcgataccggagatgatgctatctgtcccaagacatatactggccctctttataatttaactgcaacagactgttggattagaaccaaatcttcagctatcaaattgggtagtgctagttggtttgattttaaaggtctggtgtttgacaatattactattgttgattctcacagaggactgggattgcagatacgtgatgggggtaaaatatgcctaactttctattttgactgcattttcttttttgaacagaaagaacataatttctttaaggttaaagtttatgcatatccaaatacatcaccactgtgatgaccacttaactagtacttcctagtatgcattcacattaagagtactcatttgagtgatcccactagtgccccatgctttttttttagaaaacttcactctataagctgtgtagtgtttgcatattgctcctaagttttcttatagttttttgtttgtgggacagattagatgaacaagcacttccgtacttcccatagggcaggcaaacatttatcattgtgttgctattatctgacgaattcggttgtacagaaccaatgctaaatatctctagggacttaatagtttgagttcaaaaaaatctatgtttagttcaaatgatacatattggctattaggtagtattggttcataatgcttaatgatctgactatattgtataatatctttttatgtttgtttatctacagactaatttaacctgcagtcttctgaactttgtggttgaattgaaattttgttatgttgtttcctcattgtcgtttaattcatctttgacaggaaatgtaagtgatgtaaccttctcaaacattaacataaacacaaggtactatgatccatcatggtggggaagagcagagcctatctatgtgactacttgcccaagggactcaagttcaaaagagggctcaatctctaacataaactttgtcaacataactgtgatttccgaaaatggtatcttcttatcaggctcagaaggtggagaactaagtaacctgagattcataaacatgaatgtaacttataaaagatggacaaaatatgatggtggactggtagactacagaccaggatgccaaggactagttcatcacagctcagctgggttgtttatggagcacataaatggattagaggttgaaaatgttaacatgagatggtctggtgctcgatcaaggcggtggaatatacctctggatttcaggtctgcaactgtaaataacatatccatgcttaatttccatactagtttgttaaaacagtgaagatacaaaagaagattaccatgatgccatgccacttgtgtttaaggatgtatttgtaaaatcatataaacagttcattggatgataaagattgcaatgctcttcaaaatttacatgattagagccattattctatcatggcattatagaatctatctacatgagaagtgaagaaaattgtgtagctatttatgctgaatgaaacaatacaaaagaaataaaaaatgtaaaaacattgattactaagagcatctccattccagtagagacgctattgtgaaaattcaacacgcaagtgcacgtatcgtttacaa

SEQ ID NO: 15863 - DNA, 5213 bp, Cannabis sativa
ataaaaaatattaaaattcttttaaaatattaaaattcttttcatattaaaattcttttcatatttttaaaattcttttcatattttttaaattcttttcatattttttttttaaaaaaaataaaacaaatgaaattacagtgatcgccggagttgtcactgttgctgaaaatttcgttggagtttgttgtcggcgccaaaaaattcaccggagtagctaccgtccccggagttgttgtcggcgccagaaaagtcgtcagaattgtcattgttgtcgaattaattaccaagaaactggtttctacatcaagagattggtttctttagaaactaatttcttactgatttttctggcaacaatgccaattctgacgacttttctggagttttttgttggtgtcggaaaagttactggagtagctgccactgttgaaaaagtcgttagagttgctgccggtaccagataagtcgtcaaaattgccattgtcgccggaaaaatcaccaagaaactagtttcttcatcaagccaattccgacgacttttctggagtttgttgccggcgctggaaaattcactggagtagctgctggtttcgaaagtcatcggagttgctgctggtcccagaaaagtcattagaattggcattgtcgttggcaaaattaccgaaaaaattaccaagaaagtggtttattcatcaagaaaccagttttaagaacccaattttttgattcatgaagaaaccaatttcttggtgaatttttcggcgacaatgctaattctgacaactttttgagtgccgacagcaactccagcaactttttcggcagcgacagctactccgatgacttttccagcgtcgacaataaactctaacgacttttccggcactagtaacaaataaaattaccaaaacaaataaaaacattaaatataggctttgaaaacctaatttacatatatatggtatatcaaatactataaaaatacctaaaaaaagaaccatataaattagtcaaacttaaaaataccatatttaagcaaacaactggtaaaatttgtgtaatttcctattataataataataataataggatcttttattgattacttttttctttgtaaatatagtgataaaaaatttagaatatatgatactttaacaaaaataatcaggtctttttctagataaaaaataaaatatagtattttaaaaaaataaattagattatttttttatttaaaaaaactaatttattattgtgataatagtgataaaatttaaaatagtatttttgaaatataattggagcctttttatctaaagaaatttttgggccaatgtgggggccttgggcgatgacccatctcaccccactactctatgggctattggtcttttacaaatatattgtatacttttttctaaaaaaaattacttcctctattatcgttgtgtaagctttgaaaagaatatataggattatccccctcgaactatgatccttgtacagtttttcctttgaactttctcaactacaaaaagtttcccacacaatggtgcatgatcatatagcactaacgtgcactactaaaatatctcattttaccagcagttataaatcgtttaagcatatgtcttcggttattataactgatatatatgctgctgatgtaaaatggtagagtaaccaacattcgattcgttaagaaagttaagattctataattgtagatcatgttctcagccatccacattattatatttctaaagcaggagttgtaagaatcatattctttgagaaactttaatgagtaaatcaaagaaactaataatatgaacatgagttcataattactcaagattcagaccaatctactattgatcatctttatgatatgaattaggtctttatagtaaacagtaagtttgataaagacgactttattgatatcgattcctgtcatatataatctctattatatacaacacactcacttaaatgtcatactacactagtaatcaaaatcgagattacttgcactgaataacgggcatcaatgaactatactggaaaccactgattaaagattcctaaactttaatatgttgctaactgttttactaatgactaagtgatctttatttatcgagatttttgaaaactaaaatatttaatagctaaagaaatagtaaagtgaaaatcaagagaggaagattttttacgtggttcatctgttaataaaccctagtccacgagttagtctatagcctcgctgggaaataatgatgaatttacaatattatataggaaacccttattctttttccttaagttcttttctaagaagaagaagaaggtcaaggatgattttagcagagtttttggtgtgtgttttttgcttgacccctttgcatgaaaatggaaggggtatttataggctaagtgatgggtgtgggtcgccccacaacctacctaggatcactgctcaaatcccacaattagggtaatgagctagctggttggtctcgtgagtaacattacacctgtgcatgttgtagatggataatgggggctatttcgtaccactcaaacacctgtcacgcaaaggttcaacctttaaaagtgacaaacacgtgtcactctaagcttgctcctttccaagcagtattctataatgtccgtcaggtagaaggatggtgggggtgcacgaattgccatgtctagatgtaggtgacaagatcagactttgtcaagaaaagcataatcgttcctttggtgacctggctcatgagaaaagtcaatatccacaaatacccatgatggtcggtatctgcaataggtttctctagtgagcatttggggagccatctaaaataagcctttctactaggccctttcaagtttgggagaggcatttcctatcccactcttgggcagcaaatcttgctgcgagaaggtttccaggtacctctctactctggatgattcttcaactcggggaaacctactgtgcaccttttaaaggacttcaactaatggaggatcaattgagccttttccattaaaagccacgtgtcatgtcttgcataaatacaaataacatttatccccaagcttttgggacgcaacgcggtctgagagcttgtagcccttctcatcttttcgagataaacccatggcacgtgagactatctgagatcgtctcatattctaagagtttttgtcagttaatgagccactgcagtgggcattattagtgtggcacgtgggcaaaatcttaaatgcatgtgattgttggcatcacacgcatgtgggagtgtgtctcttgaggggagttatagtgatttttggaatttgtcactatgtagagggcaaaggatgtcaaaaatgatttgaggaggtgacacgaggaagaatggaggatttgcgcatgagagcaaacagactttctgcaatgaagagggctaaaacctctgaagatctttttgcaactgttcctcctgggccaatggtggacatcgaagccctagaaaagcgggtggcacttaaggtggagagggaagttgcaccctttctagttgagcttctcaactaggtagccagcaatgcatccgagttgcccctggagacatgggcaacctactgtagccctgacgcattcgccctttcccacgccgccaaacaataagcagtgggggtgagctttgacctttatattcttattcttactgctatgtactattttttctctcacattttgttcatgcactaggcagccttgatgatggagagggctgttaaggaagtaggtgcccttgtcacagaacttgagcatgtaaaatttgagaaccaacaactgcatgttgccaacaagggcctgctaggtgaaatagctctaaggagagatctcaaagacttgaagaaggagaaagagctactgaaggtcaactatggcgagcaggctcttctcctacaaggcattcatgtaattagtgagcatcattgggagacaatagagagattgcacggggggacctcccatcagccatctagcagcacctgaaggctcaaggattgagcgttatcttgaggcaatgaattacttttgacccttcttctcttcctttttttctctttttataacttggattttgcggaaacaaatttagtaatgccctaactgcggggccatttgtaatagcctcagagatgtttgtttgacatttatattcactttagttctaggtttaatgtttgctttttacttgataggtcaaattttaagacgtagtgaagtaatcttttactgacgtagtacaccggtagctggacttttacttcttctcgcactaggacaacacttatagcatgttcaaacactaccaagtacaaaacaaatctttcccttccaccggctttgacaaaataggggtcttagtcaaatgctcctttagcttctagaaggccttctcacattctttagtttattcgaatttcttatttcctcacaacacgttaaaaaaggggatgcacctgctgagggcagctgtccttttagtgacactctgcacctccttgtgcttttggggagaaggcatgtcgatgaaagcttggattttctctgggttctctttgatccattggaaactaacaatgaaacctagaaacttcctagagaagacaatagatatacatttcttgggattgagttcatttcatacctttgaagaactggcttctttaaggtccgtacagtgttctccggtagtctttgatttcactagcatgtcatcgacgtacacttccatgttcctctccaactgattcttgaacattttattgactattctttggtaagtcacttaggcattttttagaccgattgatatcaccttgtagcaatacacacctttatctatctggaagttagtttgctcttcattggtaacgtgcatcttaatctaattgtatccagaataggcatccatgaagctaagcaactggtaccttgacgtggtatcgaccatttggtcaatccacagaagagggaaatagtctttgggacatgccttgtcgaggtctgtgaattcaatgcacatcttccatgtgccattgggtttagggaccataactgggtttgccaactagatgggcaacaaataggactgaacatttcgagcgggtttgacccgaacctgagcaacccgccc

SEQ ID NO: 15864 - DNA, 6476 bp, Cannabis sativa
tacaagtaagaaaatgccacaactcttgactatgaaacagttagacaaatttcaagcagtagtttcttttttatatgtggcaatcagataaagtacacaagaatgccagtgcagcaagtaaagtttaaacatagtagaactgtaggacaataaaagtaaatcacgagagtgatattttggcacttacaggtaattttcctttgttgtaatgtagtacaatgcaattgcaataatgaaaacgcagagcgaagtcagaaagttaacaacaaagataaacttgaggaattcccgagaaccccatacaggctcaagcagcttcccaatgaaaagaagaccaatggtgctcagaaccacctatcaaacagaatgtcattaatactatacaggggctacatagcagtaggagatatgtgtatcaggcaataaacaaacttttagacaacatataaaactcaataagtgatgtaatgcaggagaagcttgtaccccgtgtatcgattgttcaatgtaaccagctgttataaggttccaggcaaaaggaatcgtcctacaaaatagaagttcaaatgacattcagattttattatattggtcaaaagtgttcttagttcattggcacgtagggctggcttgcctatatgaaaattgaaaatgggcaaaccccatacatgtattttttttcaaaaaaattattacaagaacatgagaaaatcgatcattcatttcataggacgtcattttacagtttcagtgaatcaaaccaatcaaatcaataggaagatgggaattacacacaccaactactaaatacttgagttctaccgtctatatcctattgattttgccgatttcttctcaactataatcaattactaaaattgaatcgcccaaatcatattaaacacaacatcgtcagcaaaaactctttgtggatttattctaaaagatcaataaagattattctcttgtagctaagatttaaagtctgacatcacaagaaacgtaagagcacaaattactggaatcaccgacatcaaatgagcggtaccttgcgggaatcagagcaagatattgaatagcttgaggcaaaacctggatcacaatgtggccactgataagtaccacagcaagacccttgcatagccgagtgaagccagagaaggcgcccatgctctgtacaaaacaagaaaggggcattcaattcttaattcgtaaacaagatccgactcattcagagggagaagtggaaaattgacttaccccagagagcgagggagtggccatggcgggcgggagagatataggagtgaggtttggtgtggtgtgagatctgagggtgatgatgatagagagagcgtattaagggacacactttgagaccaacgtatacatttctttaatcttttatataaaacaaaacacaaattacagattataaggtctttttatttaaatatttatatcctaagcaactgaataaaagttattaagacatctccattgcaaattgcaattcaagattaaatttaaatttggaaaaaataaataaaattatattttttgtcaagaaatatgtgattgttttgtgaaatagcttttgtgaaaaattttattagcaaactaattttttgtgtagaattggcgagagttaggccatagtattcagagggacccccagcttatatgtaattatagaattggtgtaggggtactaactactaggtttcttcttgtcttcaaatgaatgacgctttacgggatcttcaccacatggattttacgtgtttgaccgagagattcaagctttgaactggaaacaatgacatggtgcgcctaggagctaagaagaacccttctcagaaggtcagtggctccctccctccggttgtttcgttggacgtagtgatacaagggtcgatccctcatccacactaagtttcttgtgccaccagttgggaaggtgatgaattgaattcctccttgcgatgtgttcaccagcttaggaggatcgtggtgaagaatggaatcgcccctcgccctatgaaggagtttttcatcggattgctcgggacaaggaaaccctaaattataattatgggggctttagcacgtggagccaagcacattggatggttggggcgacccttccgcttcaaaattatttcatcaacttcttggtttttgttggactacctccttttcaattgatcccacaaggctacaggttgttagccggtttatttattttttataaagacaggccctaactaatcatacgttgttgtggtcatgtacagtaatttgctttggaatctgtgttaggctcatgattctcttggaagacctgtaattcgagggcttggcaccttccagacaactgaaagctttctttattattttccttggcaataggagaaccactttcgggtgtcctctcactcgtagagttcaaagtggagtaaatcgataaaggatgctaatttatctataaatatatctctctctgccacatgaagcttcatatgcatgccacatattttggtaacaacaaatataacaataatatatttattataaatgtaattaatctcatgtgttgatttaaaaataataaaataatttcaaaataaaataaatgtatttcttttttgaaaccaaaattaatgtgtttaataagcattatagtgcatacttcatcataatttgataatgttatatcatatttaatttcttatatgtaatttgtatataacattaaaattatattttttttcataagcaatatagtgttagaatttattttattagggttttaatttactaacatatatgttagatcatcacataataatctaatattctataaaatatgaaatttataaaacgatcaaataacatataagagaataaaaatctatatattggtaatgaacaagtttaaaaacccgtatagtacaattaggctaaaatttaactatatcaaaattgaaattaattgacctaagatcaattaagtgatattgacttaaaaaaaatataaatttatgatatatttttcactgtcaatatcgattcaatccaatgtatagttgatacatccgatacaagtttactttactaatgcctaagaaaaacattccacttactcaagtgtaagcaaaccacgtcgctaattatcacgtcagtagaaatccaatacactaataaatcatgataccaaatagtttaaaacatataattatgattatttttcactatgtaaataacactataattataaataactacatattcaaaatttaataaattttacatattaaatatacaatcataaaagtaataatataaaataatttttaatttgtaaataatattatattgaaataaattttatttaaaacttgactaaataaatttgtacacacttataaaattttgtaatatatattgttataaatttctcattaaaaaatcccctaaattttaagaggtttatgaactaaaagataaaagagtcctttagaaagaaaatataacattcggaactaataaaattatttgctacaagcttcaaaaattgtttgtgttattttaagaaggtccaaaaaaaaaaagaaaactcaaaacatataaatctatgacaccctcaaataccttaaaaacatgaaaacttgtgtatctgcatagaagcttaaactatacatgttgggagttcattatgtacatgaacaacaataacatgccaccctctcacacctttaaaatcaaacactccgccattgctgaaatattaggattgctctaggactcagtttaagacaatagcttatgcatcatcttattgaactgatattgttttaataatctgctcaaaaaggaaagattttctatcaaactaaccaaccttcttgttccttccgagagggggaccggcataccagctccgctacagattcacgtgctcattgcatactgtttggaggaaaatgataatgggcccaagtaggcttccgatagggatactacaatgcgatgacaagctaaagctgaagcagtaacaaacatgaccaaggaagcccagtagaacttcagcatcaagattggattttttctagcagactttagaacatgtgagaagatcactttgagtcgtctatctctcaaaatagattcataatcatatacacgttctgataatctggaagatgagcttagcacttttttgttagtaccgatcgctaatatcacccgagaaccagagtgagttgttgtgacgtcttgtcctaatgctttaaaaatccacaagtataatatgtccgcaatggccatgcaacactgctgtcggaagacttttgcctccttggaaatcacagcttgaatcaatgaagctccgttctgttttttattttttttttggaaaaaaagaacatttaaaaagtcagttcaggaaaatgaaatctaattgagaataaggaacaagccatattgtttcagtatatcaattctccatctgatcttctcattgaaatcacagaatctgctcattggaagtggtacatctttttcatttaagacacctcatgtaacaatgtgtactcaaggaagattaatgtaaatatgataagaaatcccatgcagaaacatagctgtataaagataaaggcacaatgcacaaggacaaggacaatgtggtgtacaagcatatttgtgctgatctcgattttggtggattttcttcttgtatcaaaactcatcagccagaaacttaatgtgctccataaaggaaaaataaattggcattattacgaaatgaagggaacatttttataaattaatgatactcacagcagtcatcaggagtcttctcagcacagcaccatctttagatggtaaaatcctcaagaccaaatttgccaaatcaaatacattgtttgacctatttgatacatgatcaagggaagtttcactatttgttttaataatccggctcaatcctttcctgaaacatgtaatataattataaacattgattcactaaggccatttaataacaataatttaaatggtttgttattttttaattaaaaagttgaaaatgataatttaataacaataatttaaatgataaaaatgtttccatttttatttctttacaataagaatcaacaaacacatttatatcttttcaaaaataaaaaatgtatttcagtttgaaaaatttacatatagaccagaaatttgaaaaaaattacaaaaataatgaaaaaaatttcatttttactttttgaactttttatttacaaaaatacttattcagtaaaaataaattatttttttaattgttttatagtttatttatagttgtattatagttttcacgagttattaagaatacacaccctaaaaaaggtagacttcagaataattaaaaggtcttgtaatatatatctatatacacaattaaaggtcttataatatatacatatatataaatatataaaagaagcctcaaaatacatctatcaagcttacctagttgcacctgcccttataaatagagcaagcttctgccactggaattccttctttttgtttaagaccacctgaacatatacaagccatgcatcatgcaaatgtagggaattggttaaaaaattggtgggaatgaaatttgaatatttgactgtaagtcgtctattaataaatggggtctgcaaacgaaaaataggagaataaactaacatgaccaatttcaggctaaaggtttttcacttctaatgttactaatgaaatagaaatttaattattatgacaacctgtctaatattcatggaagtctaagatatatgagccatttcttaccgaaaacaaaattttatttgttgcagttgaattttctgtaagcagcttctgaaagacgtaagggtatgcagcttcaaatgttttgaagtttttgtcggctgctagtgcaagacctgtgagaacaacacataaagtaaccgtgaattgttttaagaggggaggtgttagcagtacaaggtttctgaaagaattcgctaattataagaaaaagtaagcagattaaattatttaccttcaaaagatgcaagggaacggaggagaagtgtaaagtatggtggcatgcgaaagtggtacttaacagctatagagaagattttagccagaaccttcaaatcaaagtcatgtaaagatttagccgttattaatataagatgttagagaaatcatcttaacagaggtacaaaaaactgtcgcaaagaaacaaagcaactcaattaatcagacccacaaagggctatggtgatcacaagttcacaactatgaatgctatgaacataagaataaagcataatatatatctcaattcactaatctactcattatatcaatgcaccatctgaagtacggaattattccaagtgttcctcagtaagtcttaccacgtaccagaaatt

SEQ ID NO: 15865 - DNA, 10506 bp, Cannabis sativa
agtgcggcactgtagactcctataaaagtaggataagttttgtagttcggttggagcattttgtaaaaaaatcacattatagataacattttatggttgggttagagatgaccttagaaatgaaaaatgttaaatagcaccttaaggtgctaagcaccacaagaggtgaatactattattgatacagttcagcatcgagtctcacacattttaatttaataaataatatagaaaatcgctaactattcctaatgcaccacatgagtgtggtgttgggaccttaaaatgtccaataacaatgctatttagaaattactagcatcctctaacatatcatatcactattagtacaattaaatatcaagtctaaatattttttataaaatatcgctaatcaatatacttatgttttaagtaaataaaatttgttaattaatcaataaaattttcaaaaggaaaaaagcaaaatggtaagacaggttcttaatccaattgaaatccactttaatttttttatttagaagaaaatgactatttacattagagtagaaaacttaaaataagggttagtttaaatagggcaaaaataatgattgggatttaggaaaaatgcaaaagaaagtaagcagtgacataataaataaaatgcagacaagagtggaaatggaactggaactgtatgaaaaagtcagatgtgtgtccccacctatacaaaacgcactcaaacctcttctcattggtctcacataaactcaatcaacgcgtgggacggtgtgtatatgtgtacctgcaaaacccatctctcttctcatctttgcccttttgctctttccgtctccatcatcaaatcaattaataaatcttaaaaaaaaaatctttatttcattcatatcatataatacacaacacataccataccataggctcctttcgcttcccttgtatactgctctagtacacttcataagtctttccgacaagtttcaacacacgctatctgaattttccagtttattctttcttactatttttaattccttgttttcatatacatatattttctcacatatccgcagacacacatatatatattttactgttaccaagaaaagaaagctccactgcttggttatagccagcaagaagaaccaccacctcgattcacgaactgggtcgtggacagatcttgttatagagccactgatttcacccataatcgctttgactttgaggtatatgagagagaaagcccaaagggtaaagataattatctttatctatctcagggtttttctattctgggtagatattaatattttgtttttgttaattggtcttggattgttcaaaggtgtgggaattttactggattttgtttttagaattttgtgacatgatcctgggtcattgtgtcctttttttcttcttgggattccctgttttacttccttggattccggtcatagtgtttctgtgtttcaatagtcagctttattggaatctgttcatattttggcttttcttaaaagggtcttgcttatgattttgtcgctgggtatatttatggtagagttcacggaaagtctcaattttgtttttggggttttagcttttgagttcgtgtatgcttatcttatcatacttttgaatttctggccttggctctgtgttgttggtttcacttgatttctgttggtatgtaaattcatttgtctttttttcttcttttttcgaagctgtttatgttagaagagaactagctagctaatgattttactcaaaagagtatacttctgatgctcagcttattagtgccatttttagatatttactttctgggttttgggggaaaaggcttcctgggaaatttggctgctgaatttagttttattctcagattatgcttgtttttgtccttgtgttttaagcattgtttctttccacaattgggggttagtttgtggtctaaaaagtccttaagaaacttcatggtttagttttttttctttttgttggattctatatgagacaattttcatctttcttttctcaggattcatatctagtgtgatggactccccacaatctgttgtatctccatgcaagaactcacttagctctgagcatgagaagcagaagtctgactgttccactaggacctcagctcctatctccaaggaaatcagtgtcaacggaaaggatgctgaagcagttaacggtgaaaactccattggtgttcttcatgtttacatacacgaagcaagggatattcacaacatctgcatataccacaaacaagatgtttatgccaagctttgcctgacaagtgatccagaaaaggctgtttccaccacaatcatcaatggtggtggtcggaatccagtcttcaatgagaaactacaactcaatataagaactgtagagtcctccctgaaatgtgagatctggatgcttagcagggtgaggaattatcttgaagaccagttgttgggttttgctttggtgccactgtctgaggttctaatgaacaatgggaagttggagaaagagttctctctttcttcaactgatctttttcattcaccagctggttttgttcagctctctctcaactacactggagcttcccctgaaatgatcatggccactcatggaacaactcgtgtacaggattctgagatatccgagtctcttcctagtgagttagacaagattgagttcccagatcctaaaattgtaaatgaagatgagataatggtttcagagtacattcagatgccatgcaacagtttggaatctgatagttctgagagtttggtcaatcatgaggctgaagctgaggctgagaatcagctcactgaggaagttggagctcaagttgtcgaaagcttctcaacggttactgctgaatctgttaaacttccaaaggttgactcaccaccaagcagtgtgtcaactaatggagtttcatctccttcagtccctgcaagctcagagtcatctgaagctccagctgcatccaaatctccaaatcaagagcaagtttcagctctgaaagagaaaaatgtggatggtaaagggagtgagagtgattcctctggtgggttgtcaagtgattcattcacaaagccagttgtttctgtgaacattgagcctgagcaaaaggtggtgcagcaggagatagtagaaatgtacatgaagagtatgcagcagtttactgagtccttggcaaaaatgaagcttcctatggacatggaaactggaaaaacaaattcagagaattcaagctctgattctaaagtacagtcatcaaagaacagtggctcccgtgtgttttatggtagcagagctttcttctgatctgtgagcccttttgttttcacaaagtgttcggaggaatttggcacaggtgactcttagattttagaaatgaagactaatactagtgttgaaatctaataacgtatggtcattgtagctttggtaattaatggtatcatcaatcatcctatgttgacatgttcttagatgacagaaatgtaactctctgtactagctatgagctttgttctcatattcgctgttgttcttttatataattatatatatatatatatatgaacttttttcattacttcttttcttcatctttgttgataaggtcattagactgaaatagttgatttatctattgctaatggttatatttatgcgtagaaccattatggtcccacattcacgtggtgatttgagcaaaagcatccgttatttttgtcatttgtcgattcacatgcatgattaggctttatggtcatcatatcttatcaatctcaatcaacatgtgagtttagactctgtttgccaatggctgcattatattgtgttcttgaggagatttataatgtattggtccatatatactgatggacataatgatctataatggtgaaattttttagggagtgttggttctgactaaatgtcttagtcgtaataatgctaaatatggactgtttagttgtcttgttctattaatattgttgttgttgtttgttcaattgtttgattaagttaattcaatgaattatgcttgtcattataataatgctttgagaacccaaaagacaatagaagccacctacttgacagcaccattttcttgttatgtagtttttagtaatgagctcaaaaccagtttaaccatgagttttatatgtagatatgaaagaaggtgggttaaagttgtgttgccttcacaaaacaagtaaattataataaaaaaacataataaaagaaagaaaaaaaattgacaatgtgttgcatattttcatacgggcacttcgattatttcttgagctctaaagtgcatgtgcctcctgcaaatccatgcaatctgtccactatctctgtacctcactctccataatccaaacttctcagcaatttcttttccagttgagcatctccggtcccttagaaagtccacaacccactgctgtgctgttttgagatcttgttgaatatcccttttatctccatacctgcttctgtttcttccatctgctcgccccatggctgcagcccccacagccccggctgctgcagcccctgctgctccgtaaagaagcgaagagtctgacagatgggctactgccctgcccaaatctggtatcatctctcccattccagctgctaaatgggctccaatctttagagcaaatgttattaatttcatgaactttgacatgtaaggagccaaactcttcacagccatgttatcaaccagcatcatttcacaccccatttgatcctcaactacgtgcatctcattgcgaaattcgcacaacatgtgcagccgaagagctgtcatgccggagatcatgttggtaaccaatcttcttgagtagttttctgttttaacaaagtaaaacatgtttggtactttcctctcttctacttgaacattgtagtttgttaagtagtttacttttcgatgaagctcggtcagtagtctgtgttcatagtatctcagtccttgaatctcttgtttcaagtctctgatctcttgttcaatgatcttcagtctctgtaaaactacttccaatcctttggcaattcctcctaaactggggtcaactttttcattctcatcacctgttgacgatgcctgcagctctgtcccatccgggtttgtttcaggagagacttgtagttcaacagcgaggttgtacaaatcatgatatcgccggtggagtacttccctgaaatcttcatctgataggaggtctcgagctaaatcaaaaccagctctcagaatttgcctgccagactctgaaacttcatcccaagtgtgctgataatcatacataccatctgcaggaaccgaaagcaatgcctgcttcaactgttgaagcgaaacaaattgagttcttctgtatcgcggggcagtcagattttggacacactcgggccttaaaatattttcagctaaagtgattccctggcagagtttatagatggctggtattataagctgatggataagtctaagagtttctgtaacgttcttggtggaacaggcaagcacatcaatgtagtaaccaagctgtcctcctagctcaactctgatattgattccatttatgtttatagaaattaggtacttctcaagactgtaagtagcaccatgctggttccttaggcccataattttgttatggagatgcacctgggttttcaaaaaaatgagattagtttcagatttaatagtaacctcaacaaatgagtttaaagagttgctctttaaaagtggttttttgttgctgggtttccgtattacagaggcagaatgcaaatttattttttgttgttgtgttttcgtattagtacagaaccaataaatttagatagtattaacaaagtgtatgtacaccattatgggccaagcaatggaatgattcttgaactaaagactaagattcaaaagtttagcagatttttttaatgaataaaaaagataatctatataattgatgtgttgttagtccaagacatgctcaaccaaatttattggataaagcaaaataagtaataacttttagtattacttttaagcattaagaatcgactttttacttttttgactttcgataccatactttcttattctttttattttttattttcattttatttatccctactagaccataaaataacagagatggtttctttaattatgtatttttttgtttacaagaattgatgattataagaaaaaaataaataaataaaggatggtgcaaaacttgcctgtaatctaggaaagaagcctggtgtgagaaacatatggcttgaatcatcacactcgagatgcctcccagcataaacatagtcagggctgcttaattgccatttctgaggttttcctctgccttcttcaagaattgagggaatgagtagcaatgaattcggatcagacgggtcttgttcatagcacagttccagtttaagcatcattctcacaaggtcacttgcatctaagttttcgaacaccttagagctcattccaggaatctggctttccaaacttctctttaaaatcttctccaactctttcctactgataaatccattcctctctgttgaactctgctttctcacatctagtcttactagttgtccaagaatatcaccacagaaccactcacaatccatgatcaagaatcccagttcatcaaaatatattacttctcctatgtgatgaagacaagtagcaacagcccttcttctcatttccaccttctctttgttgtcgtgcctcgatcgaactcttagtggtggaaccttcacttgacaaagctcatcaaactctttccatttcatagcaggcttgttgtagttctccgatctccaatctgatagtatttgaatcagatcattgcaaagctggtaaattctgggtaccctttgaagaattgtcttgcttgtcattcgaagatggtgcgtgagtttagtgaccgaagctgatgatcttgcatcgacagtgaatacagttgggtagaaatcgacaaagccttggaatttgtctctcaatctctggattgagtttactgtaccctgcaaatttggtgatggttgagtgatcttatcatggtgtgtgagtactattgttacatttggtagcatacattgttggactgctcttcttgaattggagattatgaacctgagccaatattgaaggtcttcttctatctctaccggagtctttggttctttattgcttggctttttgaataaactggatatgatgaggaagaaggatgcacttccatgtcccggaaacatgagatcatggagggaataaaactcatgctgaccaccaagattccatattgaaatttttatatcttcatctttgaaggttttgatcttcattccaactgttttaaccgcttgctcaactgggttcactatacttcttacatggtcaatgtagggaagtttggaggtggagaagttttgtgatatggaattacaaagtgtactttttcctgtgaatagaaatgaagaagataataataataataattaataatattcaaaagttaaaaaaagaaaaataaacgattccttataatttcatatcttgacaaagttcattacctgcatattcttgcccacagaagaaaactctacagctcttaggtactgttagtggcatgtccttgagagtgtccatatccaagtccatttcaggttcagtttttccattctggcctaacctttgatgaattccatcggctcttccggaattctgcagtggtgttcttgcaagatcaatctcttcaatccaaggattcacttgtagtgtctccatgattgtatgtagtaccaaatctccatgaacccctttgcagccttgtaaagacaagtatctcaatgaggcattcctctgcaggcaagtaaagattttcacaaaatcatctgatctcaaactctcatcgtcatatatccctaatctagtcacagtttcattggttgtcagaaactgtaatatggctgcaagcccatctcttccaatcttggttctaccacctccaaatgtcaaagcttttagagttatatttgcttggttttgaagggatgagaacctgctcaatggacagagtaaatgttctactccaactcctctaaaccagtttccatccaaatataagctctctaacctcttgttcttaaagagtccagcagctacatacacaacccccttgtctttcaagcatgtttttgacaagttaacctccttgattatctggttctgttccaaaacccatctgaactccttggcccaccgtgatttgagccggactccggtcatgtctagagacttaacagttgagttccaccccaaagcacaggcaactctgcaggtacctgagacatccaacttgtaaattctaagtgtgttgttctctggtacaaattccaccacctttgaactcttgtctccatgttctccactccaaacatgaacttccatagacctatttcttgccaaaactgctgaaataagtggagttgcagtgatagaatcggaatcaaagatagtcaacagcctcagtgttgagttgacttcaatcatctttgagagctcttctgctcctcttgatccgattgagtcctcccatatctggaactcttccaagctatcattcaccttaagagcagaagcaagaagctcagccccaacatagccaatagctgattcagaaaaaactacctctttaactgctctatttctcttcagaatctcagatagctcaaacatacattctctactcagttggttccttctgaaacaaagttgcctgatgtttgagttactctcaagcaacaaaccaagatttctcagctgtttcacatcccattctaccctgtgaaactcgaagtttctcagacatgattggctgctgccacccttggcagctgtaccccccaaaactgagagaatctcagagaagtatgagagactgtctttggagatgtttatgttgatggaattctcagtttcttggtaacaacctgaaggagctgggggctgagattggtagaaggaaatgctgtgtaaacttagggtctgagatttgatagcagcaagcacccattgaagatctttgaggttctgatttgttgccatagtttttacatgagtaagaaaacttgggaacgtttaagaaagggatgatgagttgtgaaaactgaaaaagtcgggtattctcaaacaattctttaatatatatttatatttatatatacagcattgctattgggcacggtgtctattttttttataggtggcgttctacgattggttagcgatatttttaaaaaaaatatttttttaaattttatagaattcgatatttaattacaccaataataatataacactaatgagagtactaagcactaatggtactttttagtaattctcattctcatatatatatatatataaagagaattgctataaggcactattgatgcttaacactcttttcggtatcatattgttattggtgtaattaagtatcggattacatataatttaagaaaataatttttaaaaaatatggctaaccaattgtagaaagctttctctagaatgtattggacactaatgatgttaaaaaacaatgagttcacgcttagcatttggtgcatagatttgtgaaatttgtccaaattgtaccttttctgtctgagaacaaagttaaggtgggaaaaggaaaatgtatacaattacaataaaactctccattaaagcttccttattctcttcttgcgcctcaaggtgtcctactcctttaagccaatcttgttccaaagttgaaggtatgaatacttttttttctttttcattgatgagagaatcgccgcacattccaaatttgattaaaagacattatagaaatatttttaaacaccagtgacctattaacatttattttattattattattattatttttaaaaaaaacatttattttattttattttcaataacacaaaatcctctattacattaaatgggggttggaaaatggtgattcgtgtgaacgcattcactttattttttgacatttgggttgcagtacagaaaattttaacgtttccattccattattttattttcccattctaaaagataataataataataagagtaatttgtggcataaatacctaagtttatcttcgagttgcaatttaatatttaagttaaaattttggcagcataaaataccttctgttacactttcagacattctgtaggtaccttactgttatcttgcacactggacatcaaatggcatgatacatcatttaaaataatgtcatatcatcttattaaatagccacctaatattaaccattaaagtaaaaattaattttactttaaaaaaatatttacataaaaattaagggaaaaaaacagga

SEQ ID NO: 15866 - DNA, 2825 bp, Cannabis sativa
tttttttattttgttatttgcatattgatgctaggagaaaacaaggtgaaaataattatgttcttaaaaaaaaaaaaaaagtgaaaaacttgtaaaatacagaataagtaaaaatgtaaaaaaaaagtttgatttgaagttcattatatagattttttaaggaatggaagatgaaataagttacccggagcgatatagccgtatgtaccagcaatcatggtttgattggaagaatccggatcaagtaatctagctgttccgtaatcggatacgaataaggcctcaaattccgagtttaacaagatgttggtggtagttatatcacgatgaacaattggaggagtgcaatcataatgcatgtaagacaatgcacaagctatgcctttaatgatattgattctcttactccaatctaattccacagcttctatatcattgctcagaacacagaacaagcttcctctttccatgtactcataaatcaaaaacatgctcctcttgtgtagacagaatccatggagtcttatgatatttctgtgacgaattttagccaacgtttccacctcattctcgaaactctttctgaatgatgactgctctgcctctgaattgtgaagcttctttaaggcaactattttgccacttggtagttgtgctctgtatacactaccataaccacctgttccaatgcaatatctaatgtcgaaatcttctgttgcttttaggatatcttcaaatgcaagtttcccatcgaaattccatatggacaatatatcaccatttttggaagtttctttggtaggttggacttgtctagttttgaatagacgctttttggccaacaaaaataaaatgatcgaaaacaaggcaatagagaatgccaaggcgaatacgataacgatcactgcaacagtgttagattttggggtagtcttggcacaatgaggtggagggtagaaagaagtattgataacaatttgatgtccacctaaagagttgtcggaaagatcaaaatgatttaattttactaagaagcagacaacttcagaaggtatggtccctgatatgttgttatgtgataaatccaaggaagtcagatttgtgagcttaacaatatttgaatccagggaaccatatatttcatttgagcttagggaaagaacttcaattgacttcaaagccataagaattggcataattggacagctgagtttgttggagcttagatccagatatcttaagttcttgaaattccaaatatttaaggggatggagccactaaattgattttggctaaggtccagctccaccaaattggttagattactcaaagccgaaggtatggtaccattgattttgttggaggaaagtgatagggaagtcaatctggttaactgaaatatagtgggtgggaggtttcctcggatggcgttacgagacaagtcaagtgaaatcaagttctttagtttcccaatatcaatgggaataggctcatttatttcattatatgaggcatcgagctcaactaatccagtgagacttgaaattgaaagaggcaagtggcctacaaatagattagatgacaaatatagatgagtgaggctggaacaaccagaaatagttgaaggaattggaccgttaaattcgttacgggtcagatttaatgcaataagactcttttcctacaatgtttctggaagtaataaggatatctttaaaatttatacatgagttatttttgtgtgaacttgtatcttgttttcttaatttgtaattgaaaaaaaaacaaaaagtcatctaatgatatatgttaaatgaactgattccttattctgaagaggaactttaatatattttcgttccattttaaaaatttgaggacaatatgcaactacgtacagagacacaccttcaactacgtacaaaatcaagtgatcaaaggccttttaaccaatcatttgaaatctcagtcccttgtgtttagggtgtttatctggattgtttcaaatgattacaattaagccaatctcaaattttgtatggaaaaataaaaatgatttataatggattattgggtgattatatatccgttttgtttgagtatttttctaattgataaaattctacagatcaaaatatccaaataagcctaaaaaacaagcacattatgtgatcgatcttcatattatataacattactgactaattaaattttgagcttcataaaaaattaaagaacaaattaagtacaatagtgaagccacgccggtgaaaacatatgactgaacctcactttcaagtttcaacatcttctaataaacactttgggatcatgagttgccctactaaaatatcactgaaactcttggctaaaagtcctttcggaacaagaagttgttgtgaaacttgcaacatcgttggtcgacaattcggttggacatttaagcacgcaaatgctagtattgcaacaagaacaacatctcgttcgatgaagcgatttctcggtcgtgacaagcgttggtctattatttcactcagtaacttattttgaagtagtgaggaagatgatgtcgacaataccaacgataataattcagcaggatgtttgcccattaaagtttcaagggccaccactccaaagctaaaaacatcacatttttctgttatggtcatggtgtaggcaaattctacattccacaaatttttaaagcattagaatgagataattatatattacttatttaaattatattcagaaatgaaaataacaaggattcaactaacctggagcaatataaccgtatgtaccggcaatcatggtttga

SEQ ID NO: 15867 - DNA, 9072 bp, Cannabis sativa
gatcatcaggtcgtcggatcagagtcggatcagatccgaccagccccattgacattcctatccaaacgagcccttatttcattatttgataaaacttaaacggttaagagtctaagacaagtggttactattaggattgcctcataataatataaaaaaaagttgatatacttacgggagcattaaaaggatgcactaattactctccatatgtttcggcattcgtaataatttttagttacattttttctatatatatacacgttgtaatttaagatatttaaaaaaaaatcgacatattaaattttttcaaatttcttaaaattttagaggattaataataacgtatatgactataaaaaaaaaaattaccaaaatattatttcaaatatcaaaacaattaaaaatacatcggtatattgtaaattttttctatatgttacctttttttttaacataaatttatcattccagcaaacaattacaaaagattaggaaattatgcttatagggagatgaatggggttattcatgaattagccaattatattttgactcacaaaactagttctattttgactcgcttgaagacttattatgctagtcttatttgatttagcttttataagctcttttatcacttttaaaattcaaaaaatctttctactagtgtttgaataaaaaacattttttttttaatttaaaagtttttttgagaagaagctagtatttatagtttcttccaaaaaaaacttttgaaaagctattttaaaaattaaaataatatacatacctcttaatttactcacaattttttttttaataataactaaatacttttagaaaaagctttttattaaaaataaatcttcatataataattataaaaataagacaacttatttattttatacttctaactataagaaaaaataaaagcttaatcaactggaccatttttcactgtacataggatatacaaggcaaaataaatctaaacaaaacagaatttggacagaaaaaaaaaaagaatacctcataaaggatacacgatctttgtcgttttcctttaaggccaacgacatgccgtcctctgttttctttgataggtttctttattaaatgccgttgatagtggttacgcgatttaatgctgctgttagggctctacaacttggggtctactctttatttgttttttatttaaaggacacaccattttaattttagttggtagaaaatgtgccttggaactttgttaatcacgacgtcgaatgtactagattcattattatatcatatcctttagcttatttaccatccaatctagatcaattagtaaattaattcacatgacgaattatttgagtcagaagagataactatcattattaatgctaatagccaatattgactatttttacgcgtttgtagttgggttgggacttgggagttgtgaaaaattcaaggggaaaattggtcactctacaaactaataagaattaaataattagatataacgatatgactgattgatttctaaaaaagaaaacaagtattacaaaatatacaaaaagtcgaaacatttgtttaaaattttataagacttgacatttttttttttattttaagatttaatttagtccaatagtggggaggatcctaatggattcaaatacaacagatgttaaattactaggataattcaccggtaatttctatatgaagggcaatacatacagctctcggcgtacttgaccagatctttaggctggggaagacgagtggccaaacctacaaacaatttatcacagcagatacccttttagcttttagactaatttttgcctggttaggaaaaaaagtaataataatgcaacaaagactcacccaattcatatgcttttgcagccactttggcagcaatttcagctgaaatctttctgatgttagcgaatggagggtatagcattcccttgtcaaagttttcttgtgagacctgtgcagccaaagcctccgctgctccaacgaaaccaaaagcaaaggcaaaaatgattagtgatctctcgcgcaacaaaatgttgaataaatatgtttggttcacttacaagctgccagaagcatttcatcatgcacgcgaatggtgcctgacattaataaacccaagccaaatccgggaaagatgtatgcattgttagcctgaccaggcacgaaaacctttccctcatattcaacaggtgggaacgggcttccactagcaaagatggcacgaccctggagtagcaaaccaagagcaaatgaaatgcgttggaagtggttaccgattatcaaaggttcgacattgcacatgtgtaatgttttacctgactccagttatatgcttcctcagctgtacattcagattgtgaggtcgggttggatagagagaaaataattggtttctgcaagtaggtgatgaaaacaagggtcagctttagctacactgggatatcaactgtagaagtaactattcgagttaacttagtacctcattgatggtggccatagcctcaaccacttcctttgtgaattgtttaccaactccagatgttccaatcaacactgttggtttgatgtcctgaataaaaattaaacatggaaataaggaaactataatgtttgaatcaacatttatacaaatgcaaacatattgagataaagatttcatacgtttatggcatctacaagtgttttaacaggttcatgttcatgagcccatggcttcttgaaatgttgaagtgattctctgcgagaactgacgatcaatccctgcaggaagaaatactatcaaaacatggaaaaaaagaaagaaaaaaaggaaatgacaatcaagttcagacagcaagaagaggattgtgtttacaacctttgagtccacaagccaaattttcttgcgggcctcttccactggggtatttgtctgcacaataaaacaaatgtaatttttaaaattgattcctcaatgctgtttcctaatagaattcaagatatttaatattagcagttaacctgttttgctatctcgagggctatcagttcggctatgccagtgcctgcctgtaaccaccaaatacaaggagagataagaaaagataggcagcatccaatgaaccaataaaatatacatttagacagaagaaatgggttgtctggaagatttatttgggaaagaaaaaagcaaattaaagactgaataaaacgactcacctctccagcaccaaggaacaaatatctgtggtcagataaagctcccttaactactttctgagatgcaattagccctgcaagaaccactgatgctgttccctggaatatagtaattaatataatatatcagagattcttaaaacaaatccaaatacatcagcataaaaattatttcagcaaatacctgaatatcatcattaaacacaaggtgagttgttccatattttgagagaagatcaaaagcattgtgattcgcaaaatcttcaaactacaaaaaaaaaaggcaaactatttggaagagaacagaaaaaacaagagaatcatatagttatattattatatacacctgtaatccaggtaactatttggtttatgtgtgtatgattatacctggatgagaattttctccccatagagctgcttgacagcagtcatgaactcatgcataagctcagcatattcctacaagttgaacaagagaaagcaaaataaactcagtaagaccagaaaaggaagagtctcaaaagcataattaaacacccgttgagccgagcttcaaagtttacctgtccagttgctctcttttgcctgaggcctatgtagaactcatcattcaacagctcctcattgtttgtaccaacatcaatggttatcggcaagcactgaaacagagaatatatatcaacttttcaacaggtagtgcaacgtcaaaaatgtaatacatgatccaattctggggcaatgtcaaatattgttacaaatgacacatcattttgttctaggggtacaagaagtgttttataataagctttgagaagtcaataatgactcaagttgaaactcacagctgaaggtcgtactcctccaagcgctgtatacaaggcaagtttcccaacaggtatccccattccctgtgtacacattacacattgtcatacattaatacagctatgcatgcgagaaagagaaaataatgtaaggatatttaagaagacttgtaaacaaagcattgcaataaaattttcatagaatctacctgacagcctagatcccctaaccccagaatccgctctccatctgtgacaacaataacttgaatattcttctcaggccagtttctcaatacctcaagaatccttccccttaatcaccatacaaacgagaaatactatcagaacaaggttattgcaattaatcagtgatactgaactataaagaggctgtggaggaacatacttttcgttcaaactaatgtaaagaccctgaggacgcatataaatgcttccgtatttctgacaagcttcaccaacagttggcgtatatacaactgggagcaactcctcaacgtttgcaattaagagtttgtaaaacaacttttgattcctctcctaaaatgtattaagaaaagaaaatccatttggccaaaaaacattagtgacaaacaaaattttgagctcaaataaagaagaatacgcagacagctagctacctgaagatccatcatggccatgtacttgtggagtggcaattgatattgacgaatgttgtgcatcattttcttcacctggtgagtagagtatgcttaagcttacataatattctatgcatatataataaaaaaaataataataaaaaatatgagtaaaacaaaaaaaaaacctgaagatcctgtgaaacaactgctggagggagaagaccacgtaagtagtgggcatctctctctttatcattgaaggcaagccctttgttgtgatgtggatcccgcagcaaagtatatccactgcaaaccaaaatggaagaaaaaaaaaattaatttaataagaaaaaaccaaaacttgacaaacaaacaaaattctgggttgtattgctatagaatatcatattcatactccatctaaaaacaacaaaaacatcaacttttgatatccaaggatatatgcaccatagatagaatcgaattgaaaagtgtaaacatcatgaagaaccaaacacttctcggccacaatcacgaagtatttaggtaaaacatataagagaaaacaaaaaatatcatgcaaatttaatgagacaaattgaaagaaccgatataaaacaaaaacaaaaggtcactctcttcaaagtgtaactttcaattttatgtaattttagttattatattatatttaataacgtttctattataatgaaaatcaaatgaattaacccactacgctttaccaattatatatcatatgatgattgaactattttatctaaattataaatggaaggctttttagaaaggggcaaaaggaggtgaatttaataatggaaattaatctttagcagtagtagaagggaaaatgtaagaacaccgatactaatttgtttattgatgaaaaaataatagtaagaaaagaatagcatctatgacagttggtcacacctagcaacggagacgttccatggagtgacaaattgatcctcggtggcggaatcttcaccgtacacgtcttggaccccaccgccgacggctgatttaggctcctcctcaactgcagtcaaggcttccctcgtttccttcactacgctttccatcacaacggtgccgtttcgatcacccgttcggctggtcgaggcaaccactttcagagaagctgcatatcttttctgctttgaggaaaccgggttgtacagctccgaaacccctaagttgttctgcttaacaccaaaaaaaaaaaaaacaaataaatcaataaataaagaaaattgagagattgtggaagagaagatctgcagatggaaatctcgttcacccacttcgaattttaaccaaagttttcgacttttggggaatttcgatggttacaaagtggaaaatgagagaaagaaattgaccccaaagagtaaatatacaaaagaaaagaatgcttttttttttccttgaaatgatgatctgagaaatgggtttggtatacattaccaaaaaactggttctgctgagagacatcatggtgacagagatgtagattgcttgtgcttaaaatgacagagagagcttgaaagaacaaggagagagaagagaacaaagagatgagaaagatatagagtatttggggtaaagggtggctgctcccgaggttttctccaactctatgtgtttctctctcttctctctctctccacctggagagccgaaagagatcggaaatgagcaaaggaagaacaaaggttttggtttgcttgatcaaggtaagaagacattgtgggcgtctttagctatatatatacacattgggtagtttgcagcaacatcctcatcaaacacattttacatataagtccctacattctaaattttaacatttaaatcctaagccggaagtctaattagttattattattattacacgtatgcgagggggtccaaagttttcttttcttttttaaagtgagggtccaaagtttttcgttattataaattcctcagaactttgtacaaattttttaatttaatcccgaaaatattgaaaaatatgtggttatgatcaattcggtcgacgtggatattcacaggaaggagttgctttgcttcattgtttaaaggacaagtttcatctcaattgaaatgggccagtttttatttattttcttttttagggagctagtggcaaatatttaggggtatgaagcttttctttctggaaaatataaaatatggtcacattttcttcctacattaataaccttgatgatgtattttataataagttgttgttgaataatagggatgaattaagacacggtttaaatgcttattattataccaaaacagcttttttgttttgaaagcacgaaagagtatttgatcagacagattagaatgtaacgtcacaagctatcccatttaaacaatatcaatacaagacaacgtttttatcaagatgttttttttttgataaattttttatcaagttcttaatacaaactaacaatatatttattgcttataagttaatttattaaggggtattatacttgcacccaaaatgtgattaaggcactcaattttaataatttatttaaaaattaatataaaatatatttttgtttaaaacttatacttaccctaatttctattaattttttttaaaaaaagtatagttcacaaaaaaaatatgtaaaatttgcaaggaaaaataattatttattattttttaaaaaaattataaaaaataaaatgcttaaaattcatacaaaaaaattaagagtaaatttaaaattattttaatttaatatgttttaataaaaggtacgtacttatataattatagggtgtaaatatgagtgtttattaattctattattatttactccttgtattttattttttgtttttaattcaatcataaattattattctttttcttttttttcttaaagaaagcatacaataaccaaaataaatattagaaacaaactatcatattaattcaatgagaatttgtaggaaatacactacatttatgatccaaacttttggttcgaaggaataaagacatagaaatgggcggaaatgagaatgcgaatagaaatagaaataaaaataaataaatttaaaatgcataaaagaaattgataaaaaatttaagtcttacattgaaatagtcttttcttccattttaaaaaatatatggaaaagtcattcaatcaaaataataaaaaaattattctattgaaatttaaaaaaaaaaaaaaaaaaaacaaccaaataaaataataaaataaaaattactttatttccattctatttcatttcaatatcttcaaccaaatgtcacctaaatgatcaaaatgccttattaaacatttcatcatcatatatatatatatatttgagcaaaaaaaaaaaaaagtccgcattttgataatttagcgacatattttggctaagtatcacgtatatgacttgtttggtacgttgtattgtagtattgtattgtacgttggattgttgtatcatgttgtatagcattagtattattaatataatgttatgtttggtattgacttgtattaataggttgtgtagataatatattttttaataaacttgaccccaacaccgactacaagtctagtccagaatcggagtccgtgagcgatccagttcccaagttgggtctagagtttgaatttgggtattggtctgggtctgaattctttgtaaatattataatacaagataatacagaccattggttatgtattaaataatacaacttacattgtattaaaattttttgtcgtaataattaatacaatacattactttatgtaaacatagtgttatttattatttaatacaatacaatctttatacgccctaccaaacgagccatattttttaattttttaaaatttcaaaatatataaatatatatgttggattctacaatgcatttcttaagaggggtgtagatgtacccttatttatttcgacatttaggagaattttttagtttaatttttttttataatcgtttacattaattatagttatttaggatatcttctaaattttttagaaaattaatttacaatataaaaagcagtgttcaaatagtttatttcgcgctcgtataaaataaaatttttttgcgtacaacagactgtttgaatcttgttttcgacgtgtgaaattttttaaaattttagagatgtctcaaataactacaacatattaccatgaaaaaaattaaactaaaaaaaaaaaaattcagatgccgaaacaaatagagatacatcggtatattcttttagaaagtgcattgtagaattttctaa

SEQ ID NO: 15868 - DNA, 14651 bp, Cannabis sativa
  modified_base (1782)..(1786): a, c, t, g, unknown or other
atccctgaagtacagtgtacttacctttaattttgaactcaaccgtttctcttcatcaaaatctatgtatggattcctcccattggatgcacggaagcaagcaagttcatccttcacgcgagaaagaaggacttctgtccgcctcagcttggtgctaaggtcagcattctgagtcttgagcgtgttgttttcttcctgtaaacatataaattcccactcaaaattgataagagaaatgtaaggagtttgaatctgaagaacagaatctgttagatctattgtgataatatttaatacaaaaagttagtgtgttatatatttgtcctaatatttagcattgttctcaaattatagaagtttatccaaaaatcagtttttattaatgtcattgaaaatatgtaatatgtttctttattatatttgctttcaggatttttgtcattgtcatctggctaacaaaatgtgtgatgtggctgtttagttagcataaggtgtataataatttgaaatatatgtatacattcttataactttttacattagttttacttaatttatgtttatttattcattaattgatttttactttaaagattttcttaaaatgcatattttaaattatacacatgccactaatatagcaacggacatgataatggactgagcatccgccagccaagtgtgacagaagttaagtgaatgaccacttttacaacattacgaaatcaggcctaaaaaatcatgggacacaataatgcttaagtcataatttgaggataaaaatctacaatagcctaaaataagaagtaaaaaatctagtagctaaactaataaaaaagacgtaaaagtaaattgaataaatttgtggtgatacaaaatatgcatcacgtaatagtgtgctaaatttggcacaatttttggcttaggattgaagcaaattttttatagtgagttgtattctggccattactaatttagcaagcttgtgaaaaagttaggacagttgaaagtaagtcataagatcttgccttgattttagtatgatgatgaattcgttgatggaggttttgctggccagacaatttatttatttctccttcaagttccatcactttcttcttgtgatttacattctccatctgcaaataatgaatacaagggtaacaaaccgtcgttaacttctacggtgacattccaataactttaatttgctaagcacaaattcatttatccacctttaacatctcattctcagctttaagtaattgatcacgctgtcgaagcttctctaaggcaacttttgcagctactacttcagcctgttttcgatcaatctcctctagccatctgaatcatggggaaataaacttagacatgcctaagataatttttgataatgtgtgtgttacttgatacttttggtaagtcaaatcattgcttacccttgtctctctttgatgaattcagttagctgttttttcagcttaacaacctcctgatcctgaaggaaattcaataaaaacaagtcatgttcatagcatattcaagagcaaagatgtcaagctaagattcagatgatgaaagctgagcttactacatcttgggattctatatcatgaaatcgagccttctcagtaattttctgaacttgctgattgtctagtagtgactggcattaaaatagtagatgtgtgatattagaattgttgtccagactaaaaaatgatctatttttataccatatttgccaatgttggcttcagaatatatatatatatatannnnnatatatatatatatatataacccagatatctgtatgtcaggaagagtcatttgtatacagattttatgaaaactttaatgaaactcaatttttcgaatatacattcaaactggcattagtttgttagactaaaaccagtaaggctaaatagttaccacgtaagtagtcatgtccaacttgactcccagtaagtcccgaatcacatcgtgggtcatactttcagcagctgccaatttggtgtttagagtaaatatctacattgagaagagaaaggagtaatccaaattattttggtaacaaacattaatagaagaacaaaacaatgacataaatgactcttatgttcattgtccaaatcttggagcaaccaattcagggcagcaaggcctacctctttttgacggcttgccacaagggatttaagctcttcaattcgcagccttgccgcagtaagatcctcatccctctctgattttatttgttgcaccatgcctaagccaatgcatttaaaaggagaaccagatcccctcggctttgcaacaaacttctcagcctttttcggtgaagaagtcagggcatgaagaaagctgctaccttcgggtctgacttgttcagccatggcttccaacgctttgaactgtttccacttataaaagttagccagatgaaacaaaagaaaaaactaagggcattatcaattatatatatttctatgcatgcaacctattcaatgaagtttgatatatccatttaatggtggtggcgtaccttttgtttgtactcactagcctgtgcttcagcatgcaagtttagctcagagatatgggccttgaattgggcaatctgtagaaagaaaaataattggaattacaatctttaatcacatgattaatgaactatgttcaaattcatttgtgaaaataaggggctctttccttggcaagcttagaataatttaagaaagatagtcacctctgagtccttctcaactatatccttctcaagaatctgtatttgcgcaactgcttcttgaagacttttctctttttcatgtaagtaactgaagggaaaaggtcaaatttggcactttaatacaagatacatttattattatgagtaataataaaataacttttttcttcaattaaattgaaattgttatggaggtgaattctagaccttctcatgtcagcatcagcattttcaacatttcgtgtttgttgttttactgcatgaagttccaattccagctcttctctctgcaaccgctgtctttcagcttcttccttaacaatagcaacctaaaaacaaagacatcatatgacatggtaagaataaactccgggccacaagaattacagtttacaaatcattatccaaaatttaccttgttttccagtacatttatagtatactctagctcttcaatagacctttcatatagcttcacttctgcctctttttcgtcaacatagatgttcttagattcggctatctgacacagagatgatgcaaaaacaaatcaggaaatgaaattataaagtaataataaacgacattgtttgtttccttgtgccaaatttcttgtacctgttgtgcttcctttgcaattgcttcttgctcttcagcccgtgcctgttctgcttcaagcttgtttttcaaaccaagcatttctagctgtagttgatccctctcgctctcaagttcacctagattacttctcagagattctaccgaatcattcaagcagtcaatagcattacccatttccatgagctccatttctaagctctcatttaccttctttgtctcagtcaaatcctcctcggcataacgtttagcagtaaaagcatcttctagctgagccttcagttccaaattttcactgcgaagaacatctcgagactcacaatctcttgagatactcaactcaagagtgttgattctatctgttttctcgtgcaactgagcttcaagcatttcttttgaagccatggcctcatcgagctcaattgatttcaccaaaagctcatcttctaaagcctcaagtgatgccactagttccttcatttcatctttttgatccttggtattggatgcagattcctgcaacaagctcagatcaaataacaagcctttgagaacatcatccttccttagtagctctgtttgaagagatttattttcgaattccagctctttgcattggccctttaggtactcaatctgctccataaactcattagtcttctctgcagtttcacatatttctttaagcattttatccaagttcacaaagcctccttcgttcagaacatttaacctgctatccatcaaatcaacacatttcttgatgttagagctggccatggtgagaagttcatgcttgtttctcttggaagacacaagctcttcttccaaaagaacattttcttctgtcatagaataatgagatagttggagttcatgaagttcatcagttttcagctggaaatctgtctccagattggcaacacgagtctccaaaattaaaatttcatctcgtaacctgtgattttctttctcaaagacatcaacttgccctaaatatgattcaacatcagaattcttctcttcaagattgtgaagaactaagcttttctcagcattcaatttctcaatctcaattttcagcacctcattttctttctcaaagctgatcattctagttagctcagcttccttctttctgaaatcagtcttcagttcatgtgaagaagattccagcagtagtagctcctcctccattttctgcttttgctgatcaaggacagagaattgacaagcaacctcaacttccttatctctcaagagctgatctttcagttctgcatctaccttgaagagaataatttctctctttaaatcttcaagaattgtacagcactggctatgctctctttctgcattagctttacgaagagccatttcctctaattgtgatgccaatataagtgactcgaattctttcacgcaccactccatcataaaagactcagattgtgatttgaagacctcctctttgtcttgcaataatttctcttgatccaaaagtgatgctgccaaatttttgttacttaagtccaactccgccatcaacataacaagctgagatcctatgtagttagacctctgcaccatcaactcctcttgtagctgcaactctgatatcttctcatcgaaagaggttagcttggcactaagctctttattttcatcctctgttttggaaatgcgattgaaaccatttttgatgtcacacaataattttcccttcatcaccctacacatctcaagctcttttattgacttgctattgtgctctttcaaatcagcaataacagcatttgattcacacatgccatgttgaagcagcccattctcagcatttagccccgtcactgtttccaatagaattcccatgtggcaaaggtgaaggactgacaccgcacaatccctcccaattatctcagaccaaatttcatcaagccatgtcttcactagctttgaagtgtcaaatagtagactcttcagagtaccgaagtccgaggatagaagcaagaaattttctttgaaagaagcccggacctccacaatcataccctccagttctacaaccaatgcgtttgtctccgataaatcagacctaagttgttcacattgctgacttttgatgatgttaatggactgcaagctctgaacttcattagctaatatatctttatcttttgtcagcctgcaatttattttgtgcaatttttttacttcaagcttcatggtctcatttgctatcatcagcccattaatcataatatctgcttccttcattgtatcttgcgcttcttcaaatttagagagaatgcaagcaacttcagcagctttctgagcagcaaccaattttgcatcatcaacttctaattcaagcaactgttaaacaaagacacattagaagaattctaaaagtagcaaaatgctaaaataaacaaggaattaatgtttagtattacgagaaagcaaattgatttatttatgcctaaatacgttatcatgaagagaaaatttgaaaaggatgtatgtctaaattaataaattatcatatgttgacatgaagaaagagatattgagtgcgaaaattcaaatcttttcaatgttacactttcaatactcaaatatttcttttggtggtaataatatactctgtctagattttggtgtaattgttaaatcttgctgttaaatgcctgatatgacagcttataccaatattttatttaattaaataatttatcattatttcaattattttatattttgaaataatttattatttgttttaaataatattcaaaacaatgttcagtactcagtagaatatggaagaattagaggcatcccaaaattagaggtatgaaagtctttaatcacctctctagtttcatacaaatgcgagccagcttccaccacattctgttcagatgcctctagccgttgattcaaaacttccatcttcagtttggattgaacttcaaagtcagtcaaagttgtttgtagatttcttatttggtttgtaaaacatgtcatgcttttgcgactatattgctcagacttcagtatgtctttattctctctacgtagcttttccatctcaacctgcacctcttgtaaactttgaagggcatattccatttcccttctcagaagaataatagtagtgtccctatcacatttttcctcacaagggaaagacttgaacttatcctgatcacatgaatgaaaacataccttcttccctaagtcaggagaagacttggagatgtcggttcctgagtcctcaacgatttcgtagtcaacttcatcatcttgatatatttcattatctatctgcaagaatattcaggtttaggaactataaatcatgcatccgtaattaaaggacctcaaccaatacaaagatgttaacttacccagcctgcaccttctccatcgaaagatgtacgatcttcctgtggactattcctttgaagacttgtatactgctccacatgggtgcccatgcatgacttgagtgaggaaacaccatattttagctcagccagtttttcctttgcaactaatatattattctcttcaacatctttaagtttttctgtcatagaatagttacgtttttgctcatcagaaagcttttgctttagatcagatgaaatttccttcaagtttacaagctctgctttcaaagacatgatctgtttttctgcttcttcaaccacaacagcctgttcacagaggagggcatccatcctcatgttagtttcttctgatctagtaagttggatattcttatgctgtaattcatcaaggttgtgatgattcacttcttctaatctgttgacaatgacaaaagcaactgttgcacaaactgatgctttttttagctcatcttcctgtaatttcagtctattttccagcttatctatggtcgatgcttttacactcagcagtgatgtcaaggccaggatgtctttctctttttcactgaactcgcgctggtgagcttcagtgataaccatcgctgctcctctcagtgactttagcatactctctacgtcactttgtttgttgtttgcatcctctaaacatcttctcaattcttcaatcaataattctttttcagatatggttcttaccatcctaccaacatgttctgatatccaaatccttttctgaggaaaagaattagatatatgttcaagttgatcagaagcatcaatgagtaactcacacccatctgaaagaattgcttctatctcagtagttaacaaagaccattcttcagataaacttctaagttctgcatctttctcctttagctttgcatttaaactcccattatctctgatcaggagattcactttttcatcaacctcctttaattcagtttctgaaagcattaaattccttctcatctctacttctttcaaatgactatcctggacttgctgctgaagtatggccaactcttcctgcatgcacacaatcacctcagcagtttcagcttctacctgtgagcgaacctgatccatttcttcatcattagagacatgaaattcacgatcattttggtaccatgtgttcagtctcttggccttttcaagggaacattgcattctcgtcaccttttcctgcaacaaagaagtatcattcttggagcagtttgtaggtgagacatcctttagctccttcaaagcaagatgctcttgaagagccataatttcaacttcatatttactcaaaagctgcatataacggctgttagtgtttcttaggtcttccatttcgttgatagacaaaatctgctgagactccatagcctcaataacagacttagcttccatcagttctgtctttgtgtcttcatgatgtttgatcgtcaaaaataaatcttcttttgcacgctcaagttctttgtttaagcatgttactctttgctctgaaacttctttgaaaatgatctttagtatatccaattccaattgcaagttaacaatttcttctgcattcttagtcataatggattcatgctttgcctccatctcctcgatttgattttgaacagcactattaagtttgagagatcctaaatcttgtgaatcctgaaaataatgttatttcccattaataaatttagatataaacaaatgttaagctaacacttaataacctaaacatagctcataaggggtccagacaatcaaccaatgagactaatttcttttccttgtctcagtggtatttcttctttaggagtatttaaaaaaactcaaacaagagctatatacttggagttaaaaaatgtatgtacctctgtggtcttaacactatctacttgattagaaggcttaggcttaacattgatcaacattgattgtgcatcttctagctccctgcagaatttccagaaaaaacagcaatttataagagatcggaagtgaaaattaacataaaccacttctaactggaggactatctcaattgaagcttggcaacgattttctcacctactgagttttgcattttcatccaaacaagcttttaagttgcgccggcattcctcaagttcattaacagttttctccaactacaaccagttacaaagcaaaatatgagctacaagtatataactaatatgtaacttccttcgaaaaaggattaggtgatacctcttgagtaagagaatcattcttcttgttcatgtaaatggcttcctgtgtcaaaaaaatatatatataatatatattaaaataagaatcttgggataaaatgatgaaaggaaagtggcaaaaagggctatatatgatatcatcttccactgaaacccatatttccacaaacaaaatgacagagatgagaagcttgaataatagaagaggtgagaaaagtatgccacctcaggttctgtgataaaattttgataactatgatgtatggagtttccatcaagaaattgaagtagctgcaaacaaatgcatcatctttagtttcacaagccccataaagcaactcaactggcaagaaagaataatttagtttatatttttaaacacctgatctcgcaatttggatacttcagacaagagtatttctctctctccttcttcgtagaattcttgaaatctacaatgccataataatgaaacttgtaaaattgatttaacagctagaaatggttgaggtttgcaaaaagtaccttctaagctggtctaaaagtcttatattttccaaagcaaatcgagttacttctggattcttatctagcttagcttgaagtagttgaatctcttcagatagagctcttgtctcttcttgcaaataaatctcagcaggaatagaaccattaacaagtgcctcctgtcttctgattttgtcttctcgaaacctgagcatcatcttagtacatctggtgtcttcttctctttgacgtgcctgacaagttataaatacaggaataataaaacacaatccaaatgacagttctgaaaaggaaaaaatggcacactagatatatataccaaacgatttaattgctctatttcagcctcaagttgcttaatgcaagtttctgccatctgctcccttcgtaaggcaccagcaagagttgtctccaaacatttcagctgtaataaatcattggtttaccacatgtaactgggaatacaagatatctacagaaaatattacttgctgttgatagaattaacagttaagcaaactacaaagtaaactaaattcttatttttcatttaatgtccagatttattgtgcatgtatagaaaagaaaacgaaagcatttatcaaaaagtccatcgaaataaaaactgtcaaagcaatatacctgtttagtagacattctcacagtgcctttggattcagttttcagcaaatcgtcatcttctacatccatgtcacacacatgtcctggaaaaccactttcctgctcttgtcttgctctcgtatcttcaacagtgggaagaccaaaggacaaggatctcgatacattctgacgtctaagaatagaaagctcctcctgttacaatcatagccattgatgttcaaatcatactatttcacatatggcacaggcaatgaatgaattatcaaatttttctctaacctttagaagtcgtatttggtgttgcagagtggtgacatctcctgaagaatcttcattcactacggcctatgcaatgaagaaaaaaattttaaaagtataactcaaaagttttccaagccttcaaaatattaaataatactgcattgattagaaagaagcttacattattctggatcatttttgctctctgggcaaacttaagagtgtttaaagtttcagcttgagagctgaaaaaaaaatatacatgtgttaattaaaggtcagctatgaaactaaggtactgtaattcccagagatgaaactaaccagatagaagggctgacatttgcaataatcatagtctttgagttcccaccgagtgagtcctacattttaaataattgaatagaaacattacgagtcataactaaaaaatgtagagctattcagtgctaattaaagaaatcacaaaacagtattaacctgtaggaggaaggtaagcctcgagtccctataaggaatatgtcttggcttcccttgcgccacatccactagaaccattattacatgactgaaaatgcataggtccatgtttaaagacagcaaataacaaagactgatatccaaaaaaatcattatgtctcaaaaatcaagctttgtcaatgtaacaagaaaataagtaccctaatgtcgacaaagatttgttaatgttagcagcttcttttaaacgctcaccctcagcaccagaagttttctgcctgttacagggaagggaagaagttggtgagtgaggaaagtgtcatgcaaattcttggaatcacaaactgaagcaagactgatgatgttgccttacctttctgatccagccagatcaaccaagtttagtctagcaaaccttaagttggtcgtggaatcgttttcccatctactttcaatcacacaggtaaatacactatgtgaacgactgctctctctgttcatatttgtagatgcaacttttctatttgaagaaccctataagcagaaatcactatcagtgcaagcatatgtaaataatgaaaaatgcattagaaaaataatcatactaaatgaaaaagaataatgatgaataagttttaacctgaattagaagatttacgatgtcgctcacagtccgaacttcaaattcagagagattttctacatatacaccctttttaacatcctcacgcagctggaaaaagaaaataaagaatagagattgataataaattggaaagtatggcatttctcaaaagacagcaaattaaccagacttacaagcaaattagtacatgagggatcaaggagatctgtgatctgttcattgtaaatctctaagaaagaacacttgcaattgtatgttaatttctcatccctcctgctttcctcttcctaaaattagaaaggtatatggcaaacaacactgtaaacttgcacatacattgtgaaggaaaactagccaaaattgaatacttacagcttggatcctagcaaacaaaaattcaaatatgcgtggtgtcattccccgatgtggactgggcttgacttccaagttttcaatatccccaagcattgtgtatgtttttccacttcccgtctgcatcattgaaaccctcttgatgattaatagtccaaaaaaagtgaaatacttgacttactattattagcacaactggtattactatacaaaaattaccactctgtagaagtattagataaggctggtcagcacaaattagtcatgcaaaatccatatgtatggttattcaaaatattattcaaatgcacaatatatgatgggttgcatacttgtcaaacagtcatagtagcagtatttataacttatcatgcactgcattgcagagtgcataaagagaaagaatttgctgtgaactgaacttttacttgctgtaaaataggtagttgtcacaacactttgtgactatgtacacttcacgaatataatcagtatttcaacaaaacctagacttaacaaaggcatcaatgaaatgacaaatgttaaacaagcttcaataggactacacaatagtagactcaatatatcatcaactaggtagtgtttgagttttgaaagaaagaaaacgaaagaaaacacccaaattgtttaaaaggctagtatgtatatggatttacctgtccatatgcaaacatacagctattgtaccctgacaggcagttctccaccatgggaagacaggccatcctgaaaagcatttcctgcaagtcatagctaaagcaagtcagctcatcaattcaagggcagaaggttaagaaaataaagtgttagtactattcactactctatccggacctggtctactgtttcacatgctacatggtcaaatgtgaacctagtttctggatggccaatccaagaaatggtgttaaagctttcttgcttcaagcacctactgtatccgtttgtgcttcgctccatgctattaagaggacgaacacgaataaccacctgcacaagtgttcccaatcccatcatcagaatttatcaaatcaagcaatatattactagcaaactacgcatacccagttcacgatttccctaaatcatcaataaaaagtaggatcaactgtcttaaagaatgaaagaaagaaaagccaagagaatcattacctgtacattgtgctccatccagaacgatggattttccttcaaatcgaagtgaggaacttcgactgtattaaccactgtacacgaaccagaaggaataggcgtgcctttgtacaatggagcaaaatttgcctgtcgggcaccaccagttccatccaccttgctccggagactagaacccggaggtttagaaacgcttttagtaggcgtgctctgcgtggaattggtctctgaaaaattcgaaccagctctcccaactgttctcgttgtagttcgaggcgtcatgttcgcaaaacctccattactaactccagctccccggacttgtacatcgtcacgcaaatcaccggcagtagctccaagctcgttcttctgcgccgcccacccgaatcgttgcctagctgaaatcccagctccatacttgtcgggcgtccgaagaggcaatgctggatctgcaactctggttttgaccttactcggagtcttatcgaccttactccgaccactgcccatttcttgttcttgcttggtatatgaagtgggctcctgtatagcgtttaaaggagctctagatgcatccgaagatattctactaaccaataaatcattccggccaacaggaatgttctccgcctcatcgttcttcccagtatttccacgcaaaaatttgaaatccctcaacatcctaaattacaccaaagagcaaaaaccaagaaatcggtttgtggaaaaccaatatgcgcagctgaaaaatccctgaaatgttagtagaaaatcttggccgaagtgaaaatcaagtagatcttgattcaaacactcatgttcctctgctctttctaagtttatcgctttctttttctcttggctttgagtttgaacatcactctctctcactctctctctactgtctggaaatagaaaaagctagttatgtgttttgaactgagattaaatggagggtggagatgtgaactggatttgaatttagtggagatgtggccgcggtatagggatttgaattgcgagagatttaaaaatgctcacaaatttcaaatttcaacggctaaatgccaacaagtcaagtaaaaactttatttggaaaaagatagtcctagccattattacaagtttaataattaatagggtttaataacaaatagctcaattctaataaattgctcaaattaaattgaataaattgataaaaaaaaatacaatctgaataactttacgaaaaattaaaaccgcccaataaatatattggacggtttgaatatttttctaacccgcccacataactcgaacaaaccaaataaaccgatttacatattttttactaaaattatctataatataatatataaattcatttaattgttaaactattttacatttaaaatttgtattttatagtatttagtttgaaatttagaatggaaaatttgatatattatgctaaaaaattagaagtggtgtttaattaaatcaaaaatttacacatagtaaat

SEQ ID NO: 15869 - DNA, 5380 bp, Cannabis sativa
tatccttgctgatagtacaactggctttagaaaatgagtccttagcaagataatgagctaccttattcgctgatcgctttacaaattcagcagacacgtttaataaaatagacaataaaagtttaggctcatgaattaaaataccatatggagaaatcatacggactcaactctttattgcgaagcaccacattgatacagtctgtttccacaacctcattcgaccatccatgagcttttatccaacttaaagtttctttgatgcctactgcttatgctatctcaggttgaacaagaccaactttacaagcttgaaaagcttcaatgaaattaccttcatgatctcttgtcacaaagccataaccaaaacatttttcttgagagaaagttgctccatctatattgactttgatcatagataaatcgagtttagtccactactcccctttctcattgatttcattattgtgagaagaattttgagcagacttccactgattcaaagtaagggatgccaatgaaatcactttatctactgttgtctactgctttgccaaagaaactcattgcggcacttccaaatagcccaacaaagcattgaaacttcttttttgtcactttaccattcttgaagaccattatcaaacctagcatcaaaagtgccttcagtgtcacagcaagtaccaaagaattttttccaacattgatgagcgaagctacagtccactaaaagatgaagagctgattcagttgctcctgaacacattggacgggtggtgtcgacgataatatgtctattcctcagctgatttctagttggtagacagttgaagcaagtcctccacaggaagtctttcacttttgaaggcattttaaactgccaaagatctctccaaaacccagaatttgggtttcgagacttgttgcctttgagagtttgtagcaatttgtaccctgttttgatagaatacataccaattttatcatgcatccaaaaccagtgatcatgttccaaaaatggagagttgcagttgcaaaataagatttaaatctcattcattgaagatatcaacaaatcctctcaccgatcaccattaagctatcaaccatcttatttactaaggatgggtgttgagtttgtatgtagccattatcatcatcagggagccaaggatcttttaaaatactcacattgaaaccaggtccaattgcccaacgactacctacatggaaaagatcttttgattcaaggatgcttctccaaacaaagcttgggttgcttcctaactcaacagataaaaagctaccgttggggtagtatctcactttgaaaatcttacttactaggctattttgattcataattagacaccacctttatttggctagaagagcaagattaaagtttcttaagctacaaaatccaatacctccacgggtcttgtgcttgctgagatttttccagctcttccaatgtatgttgctgcgctgagaagaagaacttttccactaaaaacgactcattaatttttctattttattgcacatagttttggaaaggaagaagacattcattgcatagttgggaagagcttgcacagcagatttaatcataatttctttttcagctctagatagataccatcccaactttctatttttttttcttcattttgtcttgaagatacccaaaaatggcatttttgtttcttccgagcatacttggaaggcctagatatttcctactctcattagcttctgttatacccatatcaatacatatctaaaaacgagagtcctcatggacattagaactgtaaaaagttgaggattttgcaaagttgacttgctggcttgacgcatcttcaacttttttagtaattccactacctttgaagtctctctagtatcagctcagagatagctgtcattaacaaatagcaaatgtaaaacaataggagcccctcgagcaacccgacagccatgaatccaacctttatgctcatagttttttattaaagctgaaaggtcttcagcgcaaataagaaacaagtatggagaaagagggtcacctagtcttattcctcgagatggattgaagaactctttttcatgaaccccactgataactttgtagttgactgtggatagacactgcttaatcaaatacacaaatcgatcagcaaagcctaaacgagataacatagcacaaagattaggtcattcgacacaatcaaaagctttactgagatcaagctgtagaatcataacacctcctttgccaagttgctttcttttctagtggagaacttcgaaagaaaccatgatattgtcagtggacaaaggcgctttgattatcagagataatactgcccacgagaaatttcatacagttggccaatactttagagaaaaatttgtataaaacgttgcataaggaaattggcctcatctttgacaataattcagggtgctttttttttggaatccaaaccacatgcatgtcatttagatcggggggtagtaacccatattggaagaattgttgaacaaaaagcacgaaatcatctcctacaatgtgtcaaaatttttgataaaaagtgtggctcataccattcagacctagagatttgtctgggtgcatatggaagactgcagacttcacttcttctttaggaataggtttaagtaattcaacattttgttccacggttatacaaggctaaatacaactcactgtatcttcaaaagatgattcagtagcagtaaaaagtttcataaaatagacttgtatcaaattagtaaggcttgagttccaatctagtaactgaccttgatcattctttaggctgagaaagaaattcattcattcttctacgagtggaggcagacttgtggaagaattttgtgttttgatccccagagctgagccacaattgtttggaacgttggcgccaataaacttctctttgatgtaaaatttgaaaaagtttttgctgctcagattgatagagaagcactccctcaagatcccttctacccttcagctttttaatctcttttttacatatctgaattcgtttccgaaagtctccaataatctcagctccccattgagaaagaagatcaccactcttggaatttttgtctgaacatttgaaagagtagagtcagcccagcaatccttaattatctgcccacacataggttcaccaatccaagcattttcaaatcgaaaacgtctaacattagtggtatgagtgataaagtgaggatcgagaagaataggacagtggtccgaagatgaaatttggaattataaagtctagccaaattgaatgaattcaaccaatcttcagtgacaacaacacagttaattctgacctctatccaatttggggtgcctattcctttatcccgtgtgaattgagaaccatgaagcttcatatctgtgagtttgcagtcgaagagagctttcagaaagccttcaattaatcatgaaggataattattctcccaccatccttatctaattggttggtaacattgttaaaatctccaataaggcaccaagacaaagaattcccctaagagttctaattaattgccaagtttcctttcatgtcacccactttcttaacaactctttcagccctaaaacctgactgcatatcatatatctgaacccatatttcaagtgtgttcagagggatggtacgggggtcatctccttcctttaggcgcgctatgatgagttgtttatgaatacatgtctagggactgccctcgattaccctggcaatgtctacttcatggtagaattagaataaatatcgactcaatctcaattctttgacaatcatgcccatacctggtttccattatgaggcatcaagaaagttaaatatatgctaatcaattaaaatctagtagaaatggttacctgtttttaggttcattgggatatctttcaaggctataaatgttccaggactactttgtttctacactagaatgacagtaaggttttgtttatgtttttgaacatttaataacaattcacaattgccttagtcatctccttgcttagcaatgaaccattaatgttctacttcaaaatgcatttccactcttaatttttaccaaccctagaatcgaataatgatatcatttttgagttcttatgtgtaataggaactagatcattctatgtccttaactaaaagtttatgtgcaggcaaactttagatgaggttgagatacgagagttgctcattgatcatgttgggcatcgttgttgttggggaagtcgtccagctaggacctggaagattcaagcagtggaagattgcaatgtttatgttgggaccctagagactttcacagaggaaagggaaacagtaaaagaaaccgagccttaccttggtggtaatgttgatggaaaagataagggccctgagccaggaatctgggaacttgatttaagatctcaattccctgttttatttgtacctttcatggaatctagggttacaattcctcattctgagacgatcgagaaatgttcaggtaagcttttaggaatacgcttaatggaaggaatcactgaatgagattgttattgtatagattttgttattgttaaacctggactgagtgaagattgctttttgagcaattggttattttataatggtattttaactgaaactttcaattttcagtctgttgtcattatttcccacaaagtaaagttccctttatttccgtaaaccactactcttataatcttctttcccataataaacttggacaatatttgcagattgtggtgggcgaggagatattgtgtgtagcacatgcaatgcaaatcaagaacctggattctataaggcaaaccagatgatgcaatgtccttcttgttacggaaggggtttagttgctcacagagatggatcagatacaaagtaagatgcttttaaccaattcagttcataaagttatgagtccttgctatggaatgcttattccagactatttctattaatatttagtctgaattgactcagtctttgcatacatgctgccatccaaatcccaaaacttgaggattttagtccaaaattaatcttaactatttaacaattgctacagttggtgttagaatgcgatagccagcatctctaatttaatggtaccagcagggactttgagtgtttggcttagatttctttctttgtccttgcagatgtgtgaaatgtaatgctactggaaagcttccttgtgcaacttgtggatctcgtggtcttattaaatgcgagacatgtcacggtggtggctctcttctgacacgcaatattgccattattagatggtatgt

SEQ ID NO: 15870 - DNA, 7219 bp, Cannabis sativa
attcaatcctatgaaattttttggtgcagaatgggttgtatttagattcatgtatttctcttggaagcaacagtagctattcagtgtcaaaagatgatcatgtctatatggagggtggtaatgaaagttctatccaaggctcttctagcatccctgtcaatgagctaccatctcagagtagttcagctgagagttcaacggaatttataattgagttgcaggtccactgttgcttaactttctcaaacggtgttttcttaattaaaaaaatacattttattgtagagaaattggtatgctttactatttcttttacattttttttttgaaaaaaaaggaagaggccacttgtcttagactgacccctccaccgttatgtattgaataccctcacttgtggcggaggaaaaccgtggttatagaagtttagcacaaaatgcactaaaacataccaaaagactgaagattggtaaaagaaaggaaagtaaattccatcaattagggaactaaaacagctaataaagtcttaataggaagactaggagacagggattaacatgttaattacttcgtgtagttgcatcaagatttcctataggttaatatgtatgttgtcaacagtcaacttttggtcagaaatgtacagtttaagagtaagcctttcctactaactatagctgaataggtggagggctgattctgttacacctctaatgtcagtgtcatactgagatggtgtccctttgagccattcttatgaatgccttattgatgacttcctgacttacatttaactctttctcctctacgtcttatttagtgttttcactctacactagtattatttctcaattatatgggatttatctagatcccatataattgttttcacctatatgccattttacttctcatttgttctaaatggtccctttttttttacttttacttttttattttgaggctggattgtgtctttcgtgacaagttacttcttttcaggctattggtccagagctgactttttataacacatcaaaagatgttgggaagtcacctcttctctctaaccaattattgcatgcacaactcgatgcattttgcaggtctaatcttctttaatgtttttcttttattctttgagttgaattattgaaggttttttttattatatcacttttatttaatgattatacatttattttaatacgcgtaccaatctatcaaattaaagtaaaatttcattgcaggaatgtatgttcataactaaaaaaaaactttggatttgacacatgtatgctagttctattctgtatatgggtttctgtttgaaaggagttcaagagaactttttccttcttcaagattgattttcttattgtatgtactggagtttgtctcctattagtttggcttagtaatactgagaactatgcatgcaaccatgtttagtatggtaatgtgttgggattgcatgatactggacagtcttttatcatatgacttatttgtgtgcatctcagctcatatttaagtctcttgactgcattaaagtcatgtatgtgttgttgtggaatgcatttttctttgtttctgcttgtaaatataaaatatacacatctcgtttcatagatgttctgaaagcttaacatttacaaaatattatagtatcaagaaataaaagtaggaatttgaagtagagaccttagaaattaagcaatataaatatggcctttaacgtgcatatgctgttacaggcttgttatgaagggagaaacaatggaaatgaatgccaaagcacttggtttgaccatggagagtaatggcatcagaattctggagcctttcgatacctccataagctattcaaatgcttcgggaaagactaatatacatgtatctgtttcagatatattcatgaatttttcgttcagtattttaagactttttttagcagttgaagaggatattttgacctttctaaggatgactgctaaaaaaatgacagtgatatgctcccagtttgataaggttggaatgataaaaggtatgaaagtatactcagtcactcattttttattaagtcagcaaatatagcctgtgtttgttttctgatgacagattgtttggatattcagatcccaatagtgaacaagtatatgccttctggagacctcatgcaccgtctggtttcggaattctgggagactttctgactccattgtcagtttacttcaactctgttttctcttgattatcagtcatgattcaatgctgtaaaatatttatatattagtcttcatgtaacagggacaagccacctacaaaaggagtgattgtagtgaattccaattatacaagagtcaagagacctgtatctttcaaattgatatggcctccttcagaatctggaaactcatcttatggagattgttgttccatttggtttcctgaagctcccaaaggttatgttgcattaggctgtgtggtttcccctggaagagcccaaccaccactatcgtctgccttttgtatttcagcttcattagtttgtccatgctctttaagcgactacattgcaatcaatactgtcaatttgtaagtggtgatttgttttttcagaccaaattggttgtactaaagctgtcaattccttgagctcaagatccgaacttgacttcattatgaccagattcttgactaatatagaaattattaatattgggtttaatttccatggaggattcttatcatagtaatgaaggcagcaatgtgattaacggttactaagcttgatatgtctttttgatcaggctagttgggaatagatttaggttgtaggtactttcatttatatagttcctatcatttggaactattttggacattttggcatccttcttctattaactagtgttttaattgctccatcattaaattctaattttagacactaattaagatgtgtcagcactccaaaattttactcatcaactcaaaagtgtaattggcattagtaaattcaaaatctgtgaaatttgcatacttcagattaacttttggccttggttatttatttatttatttttttttttgattgttatagtgctcatatccattttacccttgcagaggcttgccaagtgtggcattctggcgtgtggaaaattctattggtacttttttgcccgttgatcccacttctcataacttgataggtagagcatgtgatttacgtcacattatgtttgggtctctggaagcctcttcaaaaacttctaatagtatgaatgctcaatcttctccatctcacactcttcaatcggaaagacaagcattgaactctgctcagcgttttgaaacggttgctaattttcagtggatatggtggaatcagggttcaaactcaaggaaagaattatcattatggcgaccaatagtccctcagggaatggtgtatttcggcgacgttgctgtcaaagggtacacaatacctatggatttgtaattgttctaagttacatctattacattgcattgtccacctttctacataaaaataagttacatttactcttttgaacttaggtatgagcgtccacgtagctgtattgttctccgtgatactgaagatgaagtgcttttcaaaactcctctaggtttccagcttgttgggcaaatcaagaaacagaaaggaatggaaagtatatctttctggttacctcaagctcctcctggatttgtttccttgggttgtgttgcatgtaagggaaccccaaagctaaatgagttcagcacattgagatgcatgcgcagtgacttggtaactggggatcaattttcagaagagagtctctgggaatcatctgattccaaggttggaacagggacatttagtctatgggaaattggtaatgagttgaggacctttatcgtgcgcagtggcttcaaaaaacctcctaaaagatatgctttaaagcttgcagatacagatatgcctagtgcttcagatgacactgtaattgatgctgaaattagaaccttttctgctgcactttttgatgactatggtggcttggtaagaattcatattccaaaacatttatgtgaagtttgtagataattatataaaaacacctttctttggacatttattgactgttagggtttttggcacaattatcattttgttagtgattggacgagcaccaatttctattttgtgcttgaaacaaatatcttaatagagaggaataaaggggcatgacagtgtcctaagagagagcaaaattctgctgcttagaaccttcttcctgttttattgtaattttaaccatatggtttaagtttttgtttagttttcttgttactaggtggagtattcctagtgctcagcctatttctttatttttttccctttaaataaagtctcttggtttttgaagaaaatgatagcagcgcatttcttaatgattttatcctgtaatttgtcagatggtcccattgttcaatgcgtctttaagtggaatagggttcagtttacatggaagaaaggactatttgaattctactgtcaacttctctttggctgctaggtcctacaatgacaaatatgaatcctgggagcctcttgttgagccagtggatggatttttaaggtagtttcttttctttatacatagcttgtataacacattttagcaagatttcatattgtatgtgaaccagtaaacgtctcattaacttcatcctccactacttgcagagattgttgttgctctatttatatttattatatttatctgtttcccattatatttttttctggtgcataattaggaacttgctttatctttcttaaataatatatgctttgctttgtaattttctttgtggtagtttcattgttctagatgttagtgttgagattgtttgatatgtaaagcaacaaatgttcatcacctcttgtctttttggagctctgtactttccaaagaaaatgtattggagtaaagaggaacagagttgtaaatttaaactgtcaaatttagttttctagtacttgattatacttttgtttctgcattcttttttacttcttttgctgatctttttcattttcaggtaccaatacgatctcagtgctccaggtgcagcttctcagttgcgtgtaacatctacaagggatctgaatttgaacatttctgtatccaatgctaatatgataattcaagcttattctagctggaacaatcttagtaatgtccaagcacatcatgcaacaacagtaagtcttttcttttttgtttgttgaccttatgcactttcttaattttgtattttcatgttgcttatattattataaatcttttaacatttctttacttcttggaaaatttgatgataaacaggagaccttttctccatcatctggtggaagatctattattgacattcatcacaagaaaaactaccacattatccctaaaaacaaacttggacaggacatttttattaaagctactgaattaaggggtctcacaaacataattagaatgccttctggggatatgaaacctattaaagttcctgtttccaagaacatgttggactcacacttgaaaggcaaactttacaagaaacttaggacaatgattatagttactatagctgatgctgaggtatttcaatgtgactgaattgtttttatttcttccatgtccgtttacattttaccttgtaacaatgttttttcttactttatctaaaccaatacagcttccaagaagtagagggttgacatccccacaatatactgtagcaatccatctcacaccagacagaagtcttcctagcgaattaatgcttcagcaacagagtgcgcgcacttgtggaagcagctcggattatatgtcatctgagattgaagtggtcaagtggaatgaagtattctttttcaaagttgatactgcagtacgtgactttaaatatttgattcatcttgattttttttatacacttcattatcacgtcttttaccaccctatttttttaccctaatcatttcatctctttggattccatttcatttctcttttttgtgaattacagctgccgtaaatttctgcttgtcaattatgttctgtgaaatggatttttgaccttgcagctgttttaatatactaatgccaaaatgaatgaataagatacaaaactaacagcgataatattagataagatttgtaatgtgttttatatgttacatgcaaaataatgttcatgtgaattttttagttctttgcctgccaatatcgagtttatgacgtacgtacttgttttgtatcttatataaaaataaaaacaaaaatattgactttgtgattgttggattcttcaatttgaaaataatagttattcaatcagtgcttaatcttaatttaagaatctgattttagtgtttcttctaactctcacactttaagtggttggtggattttttcccccttcatagtgctttcttagttttctgatatgccttccatccattttcatttaggagattcataatgagttggtacatttgttgttttagctttcgcattggatgaagcagactcctttaaataattatatatcccttggccactttctctaccctcttttcctttttccagtgacctaaagttgttattgtaacttgtgcaggagcactacacggtggagttaattgtgacagatataggaaaaggtattttactttgttgctttcactcagttcctttatttaattctttgtgttatgtaaatggggtttgtgaagcacgtgtttttagttgttgcaattgtagattcaagtttcaagattttaaaattggattaagctcaatagaattatgaattcacatatttctttttctatcatagagtgattggctgattgctgtttaaatttttgtttagtgtttggattggaaagttgttgctttgtatttggtcaatgtccagttatttatttttattttttttcatctttgtttcctccaacctctgtcctcctgatgtatttggtttctctctccaataaatttgtctatcttatacaagagaatccagaatcttccactgtgacaacaatgtagtttataggttgatgcttgagtaatttttttttaaatctttcgtgcctattcaaaagcatagctctacttactgggagact

SEQ ID NO: 15871 - DNA, 3544 bp, Cannabis sativa
  modified_base (817)..(818): a, c, t, g, unknown or other
ggtgattttttcgacaacttttaagatgacaataacttttctagtgtttttctggcgcatgcgacttttttagtaccagtgacttctccgacgattgttctagtgatatttgttattaaaaattttatcaaatttatttatggtcttttatttagtttatcatattttaaacttcaattattttttaatatttatttttttttgtataatttatttatttatgtgttataaaagtaaagtctaaattattttctgatttttatgaaaaatccccattcaaaattgactaaaaggaaaaataggacaacaagaacagagcaaattattcgtagtcctatgagacagtttgatatgaaccaaatgaatgagttgggcagtacacgatatctcctatatagttccggcccaaaaagaaacatgtacatttgggcttttagagtaccatggaccaggtagttaaaagaggaaattacactctatactctttttatattgttctcttttatttatttatttttttttaaagtctatcatttttacctcttttttttaaatattgtaccaattttgcacctgtaacttcaatatactctctatgtgactctcttttgtcaaggtatttaaggtacaatgcatataaaaagaggtatgtttcaattaaatataaaactaaaggtaaatttaattaattgattaataaaaatagtatttttcaaattacccgtaattaaaattgggataattacaccacatactcaaatttctaattttttttacttttatactgtggggcgaaattttttttaaaaatactgtnnaagttttatactatgtactgtgttaagttttcacagttgttctatggttattttttagttattctattgttgtttttagttgttctattttgtgttccactgttgttttacaaaaatacagtatttttgaaaaaaaaaattgagtaacaatatttttgtaaaaattaactaaaattctaatatttttgtaagtttctcgttaaaattttgctccgtaaatgatgagctggcattgaaatatgttactcgcacaaacaaaagtagttggtccaagtctaagttaggaactttttcgagtcacggacttgactatttttaaacatattaaatctccttgtacagcttccagacaaaaaatgtatctgaagaagtttaaaaattcgattccggtgcttctgttcactttttcttttttgtctttggtttcagttttagtcaagctaaaattagaggtaaaagaaccaaggacttaacctttagcccatttggtccatcaattgggttgtgttgtgttgttgttgtgaccacatgggatataatattatatgataatatggtgatctcgtgtcatcatcattaaaatttaaagggtattcactttcttcttgtgccaaaatactgtgatgtggtggtattttttgggcttctcaacttcttgtccgtctctttgtttgatggagcacatttcaaaaagtggtccaacttttaattctccttctctatacactagttcatttgtttatattttgctttgtgagtaatagggcttataaataatatataaaaagatattctgtcattttgttttgattttagtccattgggagttatagtgagtgaaaattttactgatggtaatattttcattaaaacttcattgggttataaattataaaaagaaaataatgtggctccattcattcaacttgcaatatgcttctttttataatttataagatatatttgaatttatttaccttttatttttgtcgaagtaaagtttccaacttgatcacatacacaaatagtttttccaatccatgtacttagtttggtagtcattttaggcatatagtgcatactagtttaagtcattatcatagaagtcaatttctaaaatatttgatctttcaaaaacatcttacgtaagaaacacactactttaatcgtacatcacaataattaatactaaaaatatttagtaaatagtatataattatttgttatatatgttcattaggaatctatatcaaaacggcatttatcataagcatcagttttgcaaaatatctacaatgtttttgacatatttatttatatggaggggaatcgcttcggttcatacataaaatgagatttttatacatataaatgtttgtatatgtaaatgaaatttcgcataagtaaaacatgaaactatgtacacggcattatacaatgaaattaatattatccgtacataaacggagatagataatgaagttactaaaatagcacgtcccttttattttatttttttcttgtgaaaggtaacatgtcccttctctgatccctaaatcttatagccttatagggttagatgggagataacatgtcccagaatcaactaattataattatagggtgaggatataatcattaatggagtttggtttctaacaacttcagcttagttcaagtgggcataggagtgtgcgtgtgtattagaggtcttgggttcgagttccaaattatgcataattgtaatatataaacgcttaaataaaaaaaaatgcaatttgtttcaactatcttctcacttactaccaacaaaaataaatttcaatgacttattttaaaggattctaaagatttttagtgaccttttactatgagtcattgatgtaagtatcaggaaaaatagtatatagtgacctttttatgtggatcactaaaatattttagagtcactctatgcatgccactatacccttttagggcaacctacattgagtgtcactctatctcttgtttttttttttctaattattttcctaataatgtacttttttaatgatttttttagaaaagttaatttcaggttaatacattaaaaaataacaaaaaataaaattcattttacttacatatagcaacaaaaaaaaaaatactctacattttgataaattaatatttctactaataattacaaaatattttattactataacaatgaataaacaaaattaacataaatctaaaaattacaagtgttatcataatttttcctcatgacgtggcatgcttacgtggagtggacaaaatcagtgccacgtgacagtacatctcaccaaaaagaaggccaagtcagcatccgagcaaacgaagaccccgacactcaaacggggatcaagtgacagatcagctcactcttaaaagctggccagctggtcgggcaaggattgcaatgtaggccccacaggacactcctacacgtggacatcaaaggtgggctgtgaagtaggccctaaaaacccaacagaatagctgaataatatatagaatcaagggtattttggtattttataaatatctaactaactatacgattttcaagggatttgaattgtaaacctagggtttaagactttctatataaaggccttaacctttagctaaaaacttaagttgcctttaagttagaaacctgatctcaagtgtctaataaactctctctctctctctct

SEQ ID NO: 15872 - DNA, 2465 bp, Cannabis sativa
aaaaaacaaaggcataatgagatgttggaaataacattctgaaaagtcaagcttatccctcacctaatccccatcctgggttagatacataggggtggtatcggcattgaacaaaaaaaaaaagattctagagataatattattattattattattatagactttgctttgccgcctgtttaagcgactcaactatagaataagctttcgctgtcactatgagtatgatgaaggtgaccactgaccaatttgacccttaatataatatataagtgacattggtttatttaacaaccaaggttatttaggtaatttagctccttcccgtcgtccataaaaccagatcatcctcgtctcatctaaacacaaaacacaagctataatatagtgcttcaccaaaaataaaatgggtgaggaaaagagcaaggttttgatcattggaggcactggctacattgggaagttcgtggtggaagcgagcgctaaggcagggcaccccacgtttgctctggtgagggagaccacactgaatgaccctgctaagggacaactcgttcaaaaattcaaagacttgggtgtcactttgctatatatatatataatattattggcatattatttggtcatttaggtgtactaattgtattctatctatgtatttaaattaacgtgttctattacatgcagggtgatctttatgagcatgagagtttggtcaaggccatcaagcaagttgatgtggtgatatcaacggtgggtcacatgcaggtggctgatcaggttaaaatcatcgctgccattaaagaagctggaaatattaaggttagttaattaattaattttttgatcacttcccctgttttagtacaattttaattttactacgtgattaattaatgttttgatttccccagagattttttccatcggagtttggtacagatgtggatcgtaacaatgcagtagaaccagccaaatcagcctttgaaatgaaggtccaaatccgtcgagcggtggaggctgaaggaatcccttacacatacgtggctagcaactgcttcgctggctattttcttcccacattgattcagccaggagccacttctcctcctagagacaaagtcattatcttaggcgatggaaatccaaagggtacgatacataactaattaaaacttaattactatcatgttttacacttgccatttctatgtatgcatacaggcgaaagagattgaaaattattttattttattcatttgctgagtctgttcgtattttgggaaataaatatatatatagcggttttcaacaaggaggatgacattgggacgtacaccatcagggctgtggatgacccaagaaccttgaacaagatactctacattaggcccccaaagaactgttactcatttaatgaactcgttgccctttgggaaaaaaagattggtaaaactcttgacaaagtctatgtttcagaggagcaaattctcaaagacatccaaggtacgtagttatattatatattatatacattttgatcttacatttactcatcagatatatattgtttgataattgttttcattattttcagagtctccaattccaatcaacattttcctatcaatcaaccactcggcatttgtgaagggagaccttaccaactttgaaattgaaccatcatttggagtggaggcttctcaactctacccagatgtcaaatacaccactgtcgaagaataccttgaccagtttgtatgagaagattaattatatggttattttccaaataagtttttaatcatatattatatgtatttaattacttgctattccagcggatcaaatcagtggttgtgttgtttacaagttccttgtttctctttccccttactttgagcttgtattgtgtaatttcatcattaaataataaaaaaaaattaaaaaggtctgtgctatatatattggcttattatatacataagtactgtgtttgatgatgtaatttcccgataatgacagctaaaagaaacaaggtaaaaaatgaagtgtatccaaataaataaataaatatttatatatacatatagactatagtaggttgaagttgtttgtattatttagttgtatgattaattaatttttagataatatattttgatttttaattgttacatataatagaaaatattttatataatttaattcaataaaaaatggtattttaaaaaaaataataaataataaacatttactctaaacaataataatggtcatgcaaatagacataaaatagcttccaaaaaaggaggccaacatatacatcaaaaaaatattcataatagaataataaaatgagatgggcagtgatatagcatgaaatttaggaaaaaaactaatcaatctgctcactcaaacacagcaatgttatcccaagaaccatgttaaatagaaggccaaaa

SEQ ID NO: 15873 - DNA, 7638 bp, Cannabis sativa
  modified_base (7403)..(7404): a, c, t, g, unknown or other
aaaaaaaaaacataaatattttataaaaagaaaaattattaaaagacggtgtatttataaattttaagagtgtaaataaataaaatttccgacaccaaataaataagtatatgtgcatgtgaaaacgacgataagttaaagccgacaataccacataataaacgacagctgttttcaatacgacgatatttaaagacggtgacaaatgtgtaccattaaacgatgactttgtttacaaacgacgatcttcaaagacggttacaaatatctacgtatgatgatgaccgtccgttgtaaacagataatggttctatgagtgacacgtatactaatcgcagattttcggggtcaagaaaaacaaagtttcaaatttcccgaaaaatgactaatgaacctaaatacaagtctgactgggccccaaaatttgaatcctaaaaaaggaggcccatccccccaaaactaattttgctctctcaagtccctatcctcatcatcatcatcatcatcaagaattttccaaaaccctaaccctcatcgaatccccacattcactgagcaccacaagctttaaaaaaaaatacaaaaacaagaaaatggccaaaaagaaagcaagccagcaacccaaagtcccaaggcaagaagcccttgtacagtcagaccacagagcagagcaaatgagtgacgccacacctatcccccccatggccgccgtcgatgactttccagacaagctccagagcttgaagtccctcaactcaagacttctcaaggagacctttgagcggaggcaacagatggagtcgctggtccaagataaagaggctctcgagtctgagctggctcggtctggtcaggaaaagaatgcattggagtctgagctgactcgagtcagcgaggagagtcttggtttggagttggagaagggtgtgtttcgtgttttcttgaacgctcaggtggcccaaatggggattgtgtttgatgggttggtgagagagaagatagttgaggttgatagggttaagagtgagaacgaggttgagataaggtcactgaagagtgaagtgaacaagcttgtggatagtcttcaaagtgagagaagtgaggtgaagagggtttgcctagagagggatgatctgagaaaggattttgatgttctggttcaggaagcgactctgttaaagaagaaagcggtggatacggagacgagagagagattgatgaaggaggaagttgagaagctgaaaatacaatgtgaagggctaatggaggaaagggttgagaaggaaactgcacttgaggtgctgaagaaggagaaagatttggctgagaggaaactaggcgtgtcgcagaagttaattgtggaattcaggagcgtgaatgagcggattttgagtgagaagaacgacattgagagggagaaaaatggattagaaagacaaattggtgagttagagaaggaagtggaacaaagaaatgatactgtatcgaatttgaaaagagaggttgcggcaatggaagccagtattttggagtcggagaggttcaatagggagagcgtgaatggtatggaggcggagattaaatcattgaaggaagagacgaaggtgaaggaacaagatataaagaagttgcagtcacagttgtatgaagtagagttgactctaaagatagccacaattgaagtggatgataagcaacgaatgattgaagaactggctgaaaagaaaacccagattgaggatgagtttcgcaatcaagaggatgaaattgttaagctgaataaggaagtgggtgaactaagggatgctctattttcacttcgaacttcttacagtgatcaagaggaagagaataaccaactgctttctgaattaagtaacagcaaggatgctattggccatgtggagatggagctcaagtcattgaaggaggagaaggaatcaaatataaggaagttacagtcgcaattgcatgaggcagaggtggctttgaatatgaccacaatggaagtgaaggataagcaacgaaacattgatgaactagctgaacagaaataccagattgaggaggagtttgctaatcaagggaatgaaattgttaagctgcataaagaaatgggtaaacttaaagatgctctacttgaacttcgaacttcttgcaaggatcgtgaagaaaggaacaaacaactgctttctgaagtaagtaataacaaagatgctcttcaccacctcacccttcagaagaatgaggctcaaaacgcttttgatggtgaaaagaagattgttgaaaacttgaagttggtcatttcagaaagggagaagaggattgaagaagtcactaaagaatcccaggctctgagtgatgagcatgaaaagctactgaagaaaactaaagaaacagagaaacaattgggatcgttggtaaaggaaagagatgcagcacagaatagccttcttgaggtgcagaccaaaatggaggaatggaaagctaaagtagaatttgctggcatcaactccgaaagggcactgaccttgttgaagaaaactgcagccatggtttcggttactcaatccgaagagggcagtaaagatggtaagaaagatgtggtcatccggcagaggaagctcgaaggagaagctcaaccgtatgttacagagttggaagccatccaaaatgctttcaggaacaaggagaagatggtagaagatatgaagcaacaggtggagcatctgaagcgctcaactgcagaggcgcgtaagcagaaaagcatttggactttgatcacttcagcaactatttttgctgcagcttcttttgcatacgctgccaaagggcgctgagtaactcttttgattcccttaatcaagttttgttactacaatatgacattagttgcttttggtagaattactaggaacaatctaatcaagatctgcttgatgtcatggcataatgctatgctatttctcctttcagaatttcctattttgacaataatgtttctttaccggattatgatccctattagctgctacctcttggcttctttgttactttttacaagtatgaatataagttttttgaacttcttgaatgtgttcatacttattctatatgtgtagatgtcacatgtctgagttctgatgaagctgattttcttactctttaaatttcacattttgggcttgttgacttgtgggtctggactagtttttcctcatttaaaagacacaggctgttgctatgaaaagcaagtgaaattgtacaggcagtgacagttggttcctaataaggaaatatgtactttcgaaataagttctagaaatggaaaaagagtacatctcttcctgttcacttaaatttgactacaaaagagagcaatcataatgtcataaatgcacgaagatgaggattgggttgcacatacaagctagatttttttttttgggtggtgtgattttttattattatttttttacctaaacaggaatgaagaatactaaagtttatatgcacttttccgagccttagcggttccttgctatcgtagtgaaatgtttaaatgattgtgatagcaacttgcctagcctacaatgggtatgtaatcctcatgtgattccacaaaaacaaccaaatttcaaccaccaatattgttattgatattcattttttttttgtctataaacaaattaattttttatgtagtgtttctcgtcatgcctatgtccaaaataggcattgaactgacagagaataatctagttcaatctcgatcaacaacagatatggaccggttttacttgctgctagtcatcaattgcattatggaacccgttttcttgctaaagatatctataaagctttctttatcacatcccactaaaagttttaggcttaagcctattaaactcttgttcatcccttctcactttttgggtattggttccttttccttaatgagcgaggcttttttcctatatatattggtgccttgaatgccctattagagaagctaagaagttgaggctccattaaacaattcaaataatggtttcagcatagacttacatgaactaatcctagactagagaccccacaatgcaaactcgaggaatgagccacgccacgcaagagctaaaaattaaatggattgagcgactttccacctttttcggtgtcaagaaatcacatccctttttaagagggtacaagaagcagacaactttcttgctgaccatagatacatccaaagaataataatagcaaagaggaaaagcaactacgattccatatttagtgggagtaaataaaatatcttaatttacagttgttgagaagagttgtgaaaacttgaaaaatataaagagcacaaaataaaactcaataacaagcaaacgtttttaatatagtctctacggcttatatcttataaacattacaagattacaataccatggatgtttttctatccatgtatcgaaaattagctatatattaatattatataacatcattagccaggcacccccaaaaacaatgatcctctatctttgtgggtgaatctttgaagtttcgtaggactgctaaccttggtcacagctgatgcttgcctcctcaaggataaacaaaccagaaacattagatttccgtaatacaaagtacaaatccagctacatgcagaccaataccttctgaatcctatcattcaagcacatgccttgttttagtagtaaaccaaggaccggattccggcagttaatgatctttaataccacagcaatcaatacaacagtaagcagtattactacacaaccttacaaactgtaaaaaacaatcccttaataacgcgggagaaaatgtcaagcttctattatatatggctgcctgttggtatgtcaatttattcacagtcagaactcacaaagttacttatctcatccataaccgtatagaagtggtcgttgttcggtaacaagtaaaacccgattgtcgccttctccaaatataaaagtttcaccacttggttagccttctcaagccccttagcgtaagccaattgccagtcctgaataagatctaaaccagccaccacaactaagcttttgggaaacgttagtccttccaggctcttaccccttggaccaaatgggttgcatgccggatggtccctatcttccccttcaggcagaaatgctctccagtaccagtctcgatcttttagggtaacaaaatatttcccatctaatcgtgtctcagactcagttctgtcctgcccaccaaacattggattgagcagaatgttacctattacttcaattccagattccactgctttcaaagcaacattgtgtgcaatgtttccgcctgaactatcaccagccatgtatatatgcaccttcgagtccttgcttcgaagccatgttctcgagtttacccaattaagagtagtccatccatcatcatatgcacaaggaaaacgattctctggtgcacgacgataatctactgagacaacaacagccttacagattcccactaatcgacggcatagagaatcataaatggcactatttgcagaggaatgagcgaaacttccaccatgaaagaaaattattacaggtacaacctgaccatcagctgaagccacaggcttctcaagatcaaggaagttcagacgaggctcctcgggattattagttggacgatatactctgcaaaggaggctagtttcacggtcaatgatggtgtcaaaagagtaaactccatcaactgagtgagcattggcaatcactttacgatcaagatattctgccaagtgccggttgaaagttccatcagggcgacgaagaagattgtaagccaacttgaagttggagatcaagacccatgtattcagcggaaccaccatctacacagatcaaaattcttctttcagcataacaaagtaggattacaaaaagtatcaaccaaaattgaaaatgacaccataatattcctatccacattgccaagttttgcagaaacgtaagactgcacggcatataaagagaataaacaaatgaaaatagaatcactagaacacactcactcggcaaatgagaactctgacaagagagcagggtgttcagagtcggcttaaatacgagctcaacgagttaaaactaccaacaaaaagtcaaaaccccctaatttttctccaatattaaaaatcaaacacagtacttgaaattgaatccaaatcaggaccgtagatttgatcattgaacagcattaatcaaaagctgtgtcaattaacaaaacaagaaaataaactgaacttgatagcatacagtagaaatcagaatccaaaaaagcagtctctaaatcccataaaataaataataaataaattccgacttttaactactcaatcccaatacccgaacacagattataacctaaaataaacgacaaacaacacaatataaacgcccaaataaaacttcccacaaaccaaaaccaccaacgaaaatcgaaacttccaattataggaacaataacgcatcaacagattgaaaatatatatatatatatacaaaagctggtaccttggactcattgaggttgacttcattactcccagccattagaactggacctcgaaaatcaaaagccgaaacgaaacgaaacaaacccttataaaatcaactcaaccccaactctaaagatccctcttttaaagaaaacccagttccgaaaaactctccatgtataaaacaaggaagcagctcaagtttcaaccgaagatcaatgggggaaaacccatcatccaaaaagcatgaaaacaggtctgatccctttcacgtagcttttagctgagcccctgaaatatatgtatgcaatagaagggcaaagaaaaatcccagtaaataaagcagagagagaggaagctatgagagaagagaatagagtagaagagaagagagaagaagaaggtgcgtgtgtgtaagagagagagagagagagagagagagagagagtgaatgataagagaagagagcgtacggtaagcagaggagagaggacaaaaggctaaagtgcgaaggggatgaacaaacaaaggacgatagagcggacaaagtgatcggccgaacaaaacactgttttctgggtcccacttatctatatattattaacttcattaaataaataattaattctttttctttttcttttttttaatggatgaataaaaatgtcgggctttgtttagctaccactagtgacaaagtattaaatttaggtgatgtttggtaccaattttttaattaattttctgtttctaaaattagaaaagtgaaaatattttttaaaaacatgttttataaaattgttttcaatttttaattttttaattgagaatnnaaattttaaaaataaaaaaaaatcacttttaatattttcttaaacaattttttatcttaatcaatatgttagactccgacgagacccgaacccaaatcctccccctacggccttggcgctgaaatcggcctctaattctgaatccaaatccgacccaagacttagacccgatttaaataaaatcaaaaaataaaaatgacaataagctttacagaacacacttttattttctgt

SEQ ID NO: 15874 - DNA, 5759 bp, Cannabis sativa
aaaaaaaggcctagtgctgaaacctggaaaattttaaaaggcactgacaaacctgaatattcagacaaacaagctttggagtgtccatgaaaaacacacacgttcgataatcttctgttttagatctatagctactttgtcacccaagtaaccttcaaccatgttcttctcatcctcatatgaatcccaaagagctgtcaattatcttaacctccattgtggttagttgtttccacagcaacctacaaagaatagatatagctcttatacttgtcttactaaaaaagaacagttctagttctagtatgtcatataaacagctaacacttacatcatttgaataaggtcagaacggcttggcttccaaggtggaaattagagggcttgattgcattatgtggcgccaccactccacaaccaagtgccaacataatttcattaaaatctgcatgcagattttttcgcgaaaaacaccaaataatgcagaggcacaaaaaggcagagtcaccttttatcgaaagccagtgagaagggttttatatgaccaaaggaatctcgtatgttgccttgaacgagcaaattttaaggtactcgccgttaactgaataatacctgaataagccaaagatagtattaaatcttgtatttctgttagaaaataaaatatagacacacaacagagttaagatggcctactctacagagcccaatttcaggactacacactactacgacagtggggttccggtgcaaacccccaccaatgtcatcaaaaatgttaggataagttatgtaatgtgaaaaaatccaatgttcttatgatttttcatgaaaaatcatctacagtagacatgctttatcgcaaatcaaacaaatgatttcgcaagttctttatgtcaaatgtcaatatggagacaaatagtcacatcacatcaaatcatcacagttgaatcaaacatcaccaattgcatgaaatacagaaagagaacacaaaaaatggggaaattctttatgtaccttcaattcatgaactttaggcttatcagttgtctcagcttgtaacaaatatcctctctgtttcattgttccatgctcgccctctttcaagcatagaatcaaacacaaagcgagcctcctgcagcttgttatttttgtataatatacagagcaaccagtgacggttaaatgagcgagggatataatgaaaggcaatcatctcttgatatatcttgaaggcactatcatctaaattactagcacagaaacagttcagcaaacattcgtaagaaagcttgctcgggaaaacacccctcttgcgcattgcataggaaagtgtcaaggcatcgactggtcgcccagctttacacagtcctctcaacaaagtattgtatgcaattttatccgggtcacaaccatctgctttcatcttgttgaaaactccaactgcacaatcgatatcgtttgattgaacatgtccactcatgagaatagtgtaagtaacttggttgggacataaaccctctgtttgcattaattcaaatttatcatatgcctcttgcatcttctgcccccaacaaaacccagaaattataccgttatataggtacaaatttggcatgaaccttgtattttctattgtctcaatcagcttgatagcaaagcttttgatttctttcgaagttctgacaggaacttgtagatagttttcatttggaagcagattactctgatggagcaaacgaaacaacatttgccaagcttgtagggactgtctacttagaatgtgctgcttattctgaataacaggaatatttctacaaacaccactgaccagtgcaatataggtgacaagatcaaactctatccgactgtaattcatcaagtcaactaatctaaaggcgaattcgaatttacccttcttcaaggaatgagttattagagaggtgtataacacaacatttggcaaaacaccatctctcagcattctagcaaggtaaatgcatcctttatcagtcatgtttctcttcactaatccacttataagggcagtgtaagaaagcatacttggctgtatcgaattctccatcattttctcaaacaactgtcgggcttcaataactctttcattgttcaggtatgccataatcattgttgtataaacaacctcatcaggatccacaccagcctctagcatcctcttaaacatattttctgcttctacaacacatttctctctacctagacaagctataattgagtcatatatagcaacaccaggtctcatccccatatcctccatgtgatccagaacaccaagggctgattctacatcaccttgtttacaaagttcatttatcataatcaaatatgttgttaggtctgccataatgccctgctcttccataatggccattaaggattcaacatcctcaaaaagtccctcactgcaaagagacttgatcaaggagttgaaagtaaaaagcaaaggtctgcagccaagatttgccattctatccaagcaattcaatgcagcatctgttttactatccatacacaaggcacatatatacacactaaatgccacagaagctacatttaagtctcgttttacaatttccccaagcaagacttcaattttttgctctaggtcaccaggaggaaacatatcattggaagctgagagcgtagaaaggtcaatcccgcaaccattctttccaattgcctgcaaaatcataagagcaagtcgaagctcatgtcccttgggatagtttttcaaaagggtaaaataaagcacatgatcaggaacaatgccatttttaagcatgttcttgtacaattcatctatttccgtaaatcgtttatccctgttaagtgcattgatcaacactgtgtagcagtgcacgcttggaattaaactgcaactgatcatggtgtccaaaagcatcaatgcagagtcacatttaccttctttacagtattcactaatcataatgccataactaatcacatcaggctgcattccccaatctaccatctgtttgcttatgacccatcctttgtcaaacaaacccaacttcacaaatccgtgaatcaacgtattacacgtgcgattatcaggaacacaaccggtcttcagcattcgcagaaaaacccgcattgccatcttcatttttttactctggcaatattcatgaattaaagaagtatacattgtcttatctatgtacacgtcgtgagactccatttcgccaaataacaactcagcctcaacgacccaccctctcttacaaaaaccataaaacaatgacttgtacatgtgaactgtaggtaaatatccaattctctcacgcattatatcaaacacttgaagagcttcatccatatagcctctaatgcataatctatcaatcaaccgactacaccaaaaacccaggaatactttagcattactaatccaaacgaaaaaatcaaaagcatctaaaatcatttcacgttcatacaattccttaagaaggctgttacaagtagctttacaaggaacagaattcttcacaagaagtttatccaaatggaagcttgcctcttctaatttccccaatttacaaaagcaaataatcatatgagtcaaaatcaaggagtcaggatcaatacctctaacacacacattgtcacgataaagagcctcagccagttgatgctgacccgaatcaaccaacttcttaatcaatgcaccataggtgcccaaatcaaggtccaacccacgttcaataccgaaattgacaaccgaaatcgcatccgaaaccgaagaagaatgattgacaagtctctgcatcacttgctgagctgagcacaacaagccacggcgaatgagctgttcagccaaggtgagacaaagagatttatgatcattggcaatagttgagaatgaagtatctgaggtttccattgggagagcccaagaagttagaggccgtctgcttttgcagaaaaggtacaaagaattgagagttttcttcttcatgttcagaccaacactacagagtaaatatcacgaaaagacatagccaagcgaacccagttgaaaaagctgggaaatttggctgacccagaagagagaaaacgaaaagattacaaacccagaaagcaattctcattgctgacaaaacaatctccattaacagctgggaattaaagaatctgccatttgagacgaaaccaaacccccgtatcaaaacagcccagaaaaccagagaagaaaatgggtaagggaaaagtgtgttgcgattgaaaaatccaatacttgaattgagtcgcataccaaatgggcaagtgcaacagggggtcgtaggaagagccgcagggttttagtttgatagagtaacaaagaacgaactgcttaaaccctgtcttaggttacttggccaaaaaccaaaaaaaaaaaaaacctttcttttcttacgttaaaagtgatttttatttatttattttcttttctaaaatggattttcttttatttttatttctaaaaccggattgttatttgtttaatttagagcatcgacaaggttactctctatattttagttaaatttgagttaaaatagctaaaatattaaaataaagaactattttttttaggctatttaagatttttgcccccaaattatgacatatacattattatgtctctaaacttttcagcatgttacaaatgattcataagctattcacagtattgtaagttgatctttctattaaattttgtcacacgtggcaaacaacatggtcgtcttaaacattttggagtttctgttctaattttaaaatttgggccccctacaaaagaaatgcaatttattaccattagggtcagcccttacaaacaaaatgatgacatgactacttagcaaattccacatcagtgccacatgtataatttaacattaaaaaaattaaaaattaggtattttcaaaaaattcttaaactaaaaatcaattaatggttaaaaaaattacgtaaaactaaattaaaaaattttaaattatttttttcttattaattgcacatgtgacgttaacatggcactaatgtggcaactgattaagcagtcatgtcatcattaatatttaaaccacttaaaaatctccatctctttttcatttatttgattcattttcttaattcttactttaatatattgagtttctaaaaatctcgataaacagcaacaaaatatataatttagatagttttttcgctaatatacttttattaaattatgtttagttttaacttttatatatctaaataattgttaatatatattttattaaaaattttaaaatgactgtaaaacgtttaaattgatttttaaataaatataaaaattaaatgatctagaccaatcacagagtgacacgtggacaatgacctgacacttaacgactaggtactcacgaaagttctaaaattttaacagaagatatttttactgcaaattttgtttacttaggtatcaatctacaactgaaagttaaacttaagtgttttcaccgtaaaatattttttaatatatagatagatatatttgttttatagtgtacaatagaaaaaaaatgtgggtagttttagtaaagaataatttgcaattttatcctttgaactttttatactgccaagttgtgttctctaagttatacggtttgttaataatacctatcgaaatagggtaaatagcggcataagcacccaaagtttt

SEQ ID NO: 15875 - DNA, 4128 bp, Cannabis sativa
  modified_base (145)..(145): a, c, t, g, unknown or other
  modified_base (337)..(346): a, c, t, g, unknown or other
tttatgaaaaaagccctataatatacaaacttcaatttaagtcaaaagttaacatattattatatataatatatataataaaatataatgtaatatggtatatactaaataaatacttcaaaaattatataaataataataatanttattattattattattataccaccatacgatgttttaattagtactaggtattagtaacatgcaatgtttatttgcttaattaaaattgtattagaaaaattattacataattattaatttaaataacaataataaaaattaaatctaatacaattcaattatattttttaatatataaaatttaatctannnnnnnnnntatttataaaaaaatatatctaactactttttttttttacaaaaaaaaatgcatcttatccatgaccagacaaatcatccaccaaaataacttgaaatgtggtagggataagtcccccaccatagccacgacttgaggaataacaagtggcaatcgctaactaattggttgccttgtttaaagatttttcaacaaaaatacaagaaatatatttaagatcaaacattaataaagtaggataatctaaaataactaaactaaaaggagacaataaaggagccaaactatacagagcatcaatgatgcttttacaaccccactcaacaataatttagtctaggccctgttttttgatccaactcaaagcttccttcaacccgattgtctctgttaaaagaggagagccacgaccaagaaattgtttggaccaatggtaaaggacaactccataatgatcacgagccaaaccttccaatcccaaaataaaaagctccagaagtgacagaggcatctacattgactttaatcatatcaatactgagaaccgaccaatgctccacacaaacacaaggcctgtaatccattgtgtctgtagaattttcgtgagcaatcttccattgattaaaataagaaaacgcagcacccaccaccccatttgcaacataattttcacttttccaaataagcccatttcttgctttccaaagagactacattatcattgcaacatgacaaactaatgtcttcgaaattcctatgaccagttgataaaaccattctgaaaaaactgtggacgaaagattgcaaatagccccatcaacctgttgccaacaagctttggctaaagggcactcaaccaaaaagtagagaattgattcattcataccttagcacaccagacaaatgatgatcacatcaacatgtcgaccttgtaactgggtcagtgttggtaaacactccgaacatgtcctccagagtaattctttaaccttaggaggaattttgagttgccataataccctccaaaggcccgaattattatcttccgaccacctaccatgaagtacctagagaagcttgtaagcactcttcatcgaataaattcttgaactctctttgaaccaataccaatgatccgacctaagattatcattcaatacaatactcttaattaaccaccagtcagaattattgaaaatatcctcaagaattttatcatctcacacccaggccccctcccaccatattcaaattgacctttgccccctctaaattaggatgaaaatatgtaatttgggactgctattcacacgaaagccacgactgtccctgaatctcaatagaagaaccataaacaacgcaccacctggaacaagctttcaataactcttgagaagcaagaatacttctcccaatataactaggattcgactccaattttgtagacaaaaacgatccacgaggataataccagacttgaaatatacgaccaacaagcgaccataatgagttaaaagatgccacccttagttccctaacatagctagattaaaatcatgtaaactttgaaaccctatcccaccattatttttatgaactaccagcttctaccacaataaccaatgaatacctgggctattgttataaattctgattaattaattaaattaacgtctaatttaaatttaagagttatctataaaaaataattatttaattttgttattagttttaaattatatttagatatttaaaactatttttttttttaaaaaaaaaaagatatttaattaattgatttaacgattttaatttaaaccgttaagaaaagattaaaaaattgttaaaccaataattttcgttagatagccacaattaatataagatatttatatatataaaaattgtttaatattaactttttaaaatcaccatccataaataaagtttatatatggaaagaattattattttttaaaaaataaaactaaaaattaaagtaatctactattatatgtaattattatttttctaaaaaaaattaataaataagaatgagaatggaaattaattttcttcttccttgtcgtccatatatatatatatatatatatttaacgtagtgattaaaattactcatgaatttaggatggagacattcacaaacagcgcaggaatctccttgaacctggatagcttatcgtctaactaaagtgcatgctttgtcaaaccatgaactgctaaagtcagcgagcaacatgagacaaaattgtccacaaaagtttagacaataaagctataaagtccgaaacagcatacccaaagagctagagctataacttatatcactttatgctacacgccaactcattaacatatcaagaaagatcccaaaatatctataaaataaaataagataaaaaaaaaatgaattagtcccctagcgatagtattaaaactaatagaagaaattctcaataattagaagataacaaatctcaaaaaaattatttaaaataaacttatcggcaaaagttttgtagcagttggccctcctcaaaactgatctacatattaacaataaataaaactccattaccatacaatttaatgaaaattaaatgatgagaataaatatggtaaaataatcaatattataatgtcaagacttgaaacacttatttgtcaaatttaaaaagttatttgtagaattcatgagcacaacatgaaatacttctcatacccattgactatatcacaaatctatcttaaacaattaggggcaagccataaaatggcacaaaagccaaaaccatcaaaagttggtgaaaacgagataatcatcaaacctatatcttattttcccacacatatatatatatatgggttattttcaataatatgagaaaaattattaaggttatgataaatatgacataaaaagtaaataccactaaatatggtattatctaaccaatcaaactaaaaatatggaatctgaatttaagatcattaaaaataaaaatttaacgtatacgggattgaattaccataaaaaatattaaaatttccttcacatttattttttttaaaaaataaaacaaatgaaactacagtgatcggcggagttgtcactcgtgccgaaaaaatcaacggagtttgctaccggcaccgaaaaagttgtcggagtagctgccggtaccgaaaaagtcaccagagttggcgctgacgttgaaaaagtcatcagaattagtattgtcacaggaaaaatcaccaagaaattggtttcttgatgaaaaactggtttcttgatgaagaaaacagtttcttggtgatttttctggtaattttaccggcgacaatgccaattttgacgactatttcggagtttgctgtcggtgccagaaaagtcgccagaatagctgccggtgtcagaaaaattgtcagagtgtctaccggcgtcaaaaaagtcgtcagaattggcattatcaccagcaaaatcaccggcaaaatcaccggaaaaatcaccaagaaaccgatttcttcaccaaaaaagtggtttcttcatcaaggaactagttttgtcacacaacaataataaagattatgaaaacaaaataaaaatgatatacaatgaaaataattgaaaccagttttaccaatcaattaaatggtgaaaaaaacacaacaaaatactcataaatataaacaaaacaacacacaatgcacaacaataatctaaaacaaaaaataagtgtgaaaactagtttcaaacctagaaa

SEQ ID NO: 15876 - DNA, 8213 bp, Cannabis sativa
atatgctaattcatgttgatgtgtaatgaactaaatcagtcacagagaaatgttgataaatgcgtacaccattgcctctgtgttgcttgaagttctcacaagaataacaagtgcagccaatcctcaggtatatatatatatattgctgttcttttctgatattctatcatcttcaatgtcatttttaccatgttattttatgttcttgaaccaaacacttcaactcttttactttattaggctcttgcaaatagagaaagagccaacaaaaaagcagacttctttgtgccttataatattctaccacttgatcatggaggcattcaacaagcaataatgcaactcaatgaggttagtgtctgtttggatgaactaatttgctctttctttagtaatttttttctactctaataaggactcaagttagagactatttaagcatgataataaagtttcccacaaatggtacagataaaggctgcaatcgctgctgttcgcaatgttcgtggcttaccttcagcccaagattttcagaggcatggtgaattcattgacttgtttgattttcttcagtactgctttggatttcaggtacttcagatcagaaatatgtgatgatatagttgataagccatgttcactttcttcttcattattcatcttatgatgtttctctctgatttttttttaatgtgttttgcaaccaggaaggcaatgttgccaaccaaagggaacatctgattcttctcctcgcaaatattcacattcggaaagctagtaagcagtctgtcttgaaggtattctcattgttaaggatgtgaaaatttaatttgctttaattagtctctaaaatctgactttatggcattttttctatcacagttagaagaagttgttgtggatgagttgatgaggaagttcttcaaaaattatacaaattggtgcaaattccttccaagaaaaagcaacatccggtaaaatagatttcctttatcatttactacataagaaaggaaaaaaaataagaagaagaagaagaagaaaagtttcccttaaattaattgttggtttttgaaccaggctgccttatgtgaaacaagaggctcagcaatataaacttttgtacattgggctttaccttcttatttggggagaggctgcaaacttgcggttcatgccagagtgtttatgttatatatttcaccatgtaagctggaagttctttactcaaactagtttcatgtgcaactttaacctatcaatatccataccttgaattgattattcttttgcaacaaactttattgaatgatttttttttttttacttgttttgtttaagatggcttctgaattgcatggtatgttaactggagctattaatcccacaacatgggagaaagtcatgccagcatatggtggaggaccagagtctttccttaacaatgtagttacccctatatacacagttataaaaaaggtaatccttgatttaaatctgtgttaatatcaagttctttctttcccatcactaattatttgtttgttttgaaaatttctaggaagccgaaaaaagtaaaaatgggacaactgaccattcaatttggagaaactatgatgatctcaatgagtatttttggttagaatgaatgtttagtcaatagtttgtctacttctcaagcttaaattaaaatgaagttgtaacatcttctgatgcttttgcaggtctcctgattgtttccaaataggatggccgatgcgtcctgaccacaatttcttctttactaacagtgaacccaaagatgagaaggcttcaggatcaagtaaagctaaagaaaagcagaagagagaagagtcacaagaggaagaagaggacaatgatgagcatgaagaactaggggtactacattcactatatcacttacatgataattgataactttgctcaaagttgcttaacttaagactataatgtattttgtgaaaaaactttgtgaatataataaattggcttttttgtgtcactagcagtgactgttcatttgagaatgttgttttatggaaggtttttacatgagttgttgtatagttataatgatattggcatctgcattgaacttattttcaatgtaggttcatcataaatgaaagaaattttttaacacagcataaaaataaatgacaaaagtactatctgaatcacatctgcatagatggatattatccatatgtcataatcattgacatgggaactaaagttccattcaatagatttatatctattatctggtttatgatttggcttaacaaatttgttcagcattatctaatccaattcttgtatttggtgagcaagaggccacactttcctatgttgtttgtctttttttttctttttttgacatgattggtgagcaccaggatcaagaggcaaactggtccccatactgacatttgggtcctgttcacatgtttacattgttcccatgttttcctctaggaaaagtgtactgataagaaagatgagcaagaatggttagggaagtcaaattttgtagaggtgcgatcattttggcagatctttaggagtttcgatagaatgtggagctttttccttctatccttccaggtgcaccaattacctaacattacagaataaatcattcttgtactgttttcctggtatgcttatatttacatttactttacaggcgatgattattatggcgtgctatgaattggaatctccacttcaattgtttgattcaggaatatttgaggacattttgagcattttcattacatcttcaattctcaaactcatacaaggtatggtgtttataatttgaatatgctttgttccttgtatgaacttggtgaagaagattattcatctttgttactttagctggtgttaactgttacttttactgtgaacttgtaactcttgaatggcagagaatcttattactttgtgttctttcccaatttatttttgatggattttggcataaattgtgaaagtcacatggacccttattactggcattatcatttagctttcatccatatttggcttgcagcaatattggatataagttttacatggaaagccaggcaaatgatggtataccgtgaaaagataagactaaaggtgaagctggttgttgccgtgatatggacaatagttcttcctacgtgctatgcttattccagaagaaaatacacttgtttctcctcacaatatggaagctggctagaagaatggtgtctctcttcctatttggttgcagttggaatttatatgatacctaatgcaattgagatggtgttattttttgttcctgctgttagaaagtacattgaggtatcaaattggagaatattcactctacttgcttggacacaagtaagttcaccataaagccactttttcttctttcagaattcttggagaatatttactttctttgtctgatgaattctggttttaagctttgtatatattctctaatttcttttttattatttttttttatcacatagcctagattatatgtgggacgtgggatgcaagaaagccaggtctcagtgttgaagtaatttctccctactaaattagctgttgatttgcctctactcttatcattttcacctgatgtgttataatttttgtatgttgtaggtacacattgttctggatactagtactatcgagcaaattttctttcagttactggtttgaggtaacaaatttctgtttgttttcagaattgaactacgtttatggaaagttataaatgcattgttattctatgactcttgaactatcttattctcaactttggacataaatcagcgttaattaagtcttagtattcatgtttattgtaatctttgtgactcttatgctgattaaatataaacatgaaagtatatgtgtacttacttttaactgcgacgcccaatggaataatgcagataaagcctctcataggaccaacaaagcaaatcatgaaaattggtgtgaaaaattatgactggcatgagcttttcccaaaaggttttctctgttcctttgtatttagtttgtccaaaaactttaatcagagtcctaactcccaaaaacacttcttctcttgcagtacagaataatgctggtgcaatcgttgcagtatgggctcctatagtagttgtgagtgttgtttgtttcacctactctttaatttattaatgaacagaagcaaggataatgaattagaagcttagtttatagatcaaaatggttcagcacaaattcttgatacattattttgttctacactataggtatatttcatggacacacagatatggtattctgttttctgtacaatattcggtggactttatggtattctgcatcaccttggtgaggtaagccatttcttctatctctctctctctctcattttttagagtacattggcagtgttcttactcgggtatgctacagattcggacgttaggaatgttgagaagtagatttcacaccttgccatcagcatttgatgcctgtctaattccaccttcatcaaagaatgagaaaaagggacgaaaaggtttctttcaaaacagatttcataaggtatgtgcagtttttgtatgtttcttttaatcaatattttaacaacaatctcacacatgctaagtattcattaactttctcaggagtcaggagttggaaaggatggtgttgccaagttcgtacttgtgtggaaccaagttataaacagtattagatcggaggacttaattagcaataggtgagttattctcttactgatgtctgcatggaaagcatggcatggaagtcttggaaagttttttatggaaaaattaatgtgtaccttttatgaatagggaggtggatttgatgacaatacctatgtcatcagaattattttctggtgttgtccgctggccggtttttcttatagctaataaggtcagtaaaagaagtggcattactttatcaagatggttctttttctttactcaagtttcctactcaaacaagtcttgttgttcgcacactagttttctacagcgctaagcattgcaagggattttgtggggaaagatgaaattcttgtcagaaagattagaagggacaaatgcatgtattatgctgtaacggagtgctatgaaacattgaagaacatccttaagtttctcattgtcagagatttggaaaagaggtagacaaaaatccttgcaaaactcgagttgtttcatatgcacattatttcctgtgtttcttttcctgatagaacattcaatgtttaaatgatgaaccttgtgttgttactttctagggtcatatctgaaataataagtgatgttgaagaaagccttaaaagatcaactcttctggaggactttaaaatgactgagcttccaaatttacgagataaatttgttgagttgcttgaacttctggtaagcattcatatttctggcttatccttcattgtttagattaaggagtccaaacctactaactaagtattaaaatgtttcaaggttgaaggaaatgaagatcatgctggtaaagtagttaaagttctacaggacatatttgaaattataaccaacgatatgatggttgattctgccaggtttgatgcgttcagacttaacattcttttgtaagatcagtagtagttgacatcttctatatactaatgctaacatacttcatgttcaaaccacacagaataatggagttgctaagttctttccaagagacggatgaggaagctccttacttttgcagacacattgaaccacaattatttgaaaagtacgccggtgagatgtccatccaatttcccttgccagacaatgcaccaatggatgagcaggtgatgaattttgtaaactatgaataggctgattttaatcaagcatagacaaacaaacaacctgcaattgtgtgtagtagttagacatgttagtgaccaaagttttccacagcagatcaggcgtcttattttgctacttactgtcaaagatagtgcactggatgtacctactaacttggatgctcgccggcgcatatcattcttttcaacttccctgttcatgaatatgcccacagctcctagagtgcaaaatatgctgtcattcaggtgatatttcatgcctatgagtattattttctgaattctaatgtgtctaaaactatagaagatataaaaacttatgatcagtgcataaaattttcattgatacagtgttcttactccccattacatggaagatgtaaatttttcaaggaacgagcttcattctagtcagcgagaagtttcaattatattttacatgcaaaagatctttccaggtaactacaaagctcagacttttctatatattttatttttccacttgaacacaatcataacatttaaatttttttccttcagatgaatggaaaaacttcttagaacggatggaatgtgcaagtttggaagcattgaaagctgaagacaaggaggaagaacttagaaattgggcttctttccggggccaaactctaagccgaacaggtaagggattgaaatgtgagacataaatgtgattagatgttacttatccttaatgtaacacagcttatttttgttctatatggtgttatagttagagggatgatgtactacagagaggctttaaaactacaagcattccttgacatggctcaagatgaaggttttcaacactacctatttaatttctcagaccaattcttattcttcaaacttactttcttcttgtttatctaatgagagaatccattccttttgccttctggttgttttggccagatattcttggaggttatgatacagataaccatgtattatccgctcaactagatgctttagcagacttaaagtttacatatgtgatttcttgtcaacaatttggatcacaaaaatcagctggcgatcctcgcgcacaagacataattgatttgatgaaaaggtaatgaatgaagtacatgagaaaatgcagaatatagatagaacacatagtactagtagagcattttaactcactctacatgattaattattgctcaaaggaacccagctctgcgtgttgcttatgttgaagagaaagaagtgattgtgccagatagtaagcctcaaaagatttactcttccatactgctcaaagctgtcaacggttttgaccaggtactacaccatctaatctaattcctgctacattgtacatattagtataaatggttttaaggcaacatagttttctttagataatactgtaaagaaagctcttaatcttcaatgttttaccaaaaaagaaatgttgatgtgtaaccatcttgatctttatgaaccaaagtagcttagttctttcattatctcttttgttgaagtagaacttttttttgtaggaaatatatcgtattaagcttcctggtccacccgaaattggagaaggaaaacctgaaaatcaaaaccatgccataatatttactcgtggcgaagctcttcagaccattgacatgaatcaagtacactctttgtccaaagacctaacagtttttctttacctctttcttgttcttatggtgttcagttaatttacaggatagctatttggaagaagcattcaaaatgagaaatcttttgcaagaatttcttcgaagccaaggaaggcgtccccctacaattcttggcttgagagaacatatattcactggaaggtttgaaaatattataggctaacatacctaccaatcacatgctttaggtatgaataggatctgagaattcaacgagtaagatatacaattaagaaatgattaaggatcgaataaacaacacatcatatgtgagcaattttaaccacacagaaatggtaggcatcaagtctaaattactatgtactaacaagtttataggtgcataaacaaaactcctttgaagttgactaatgtccattggaaaattttggaataagaataaaccactatgaattatatgtaagaaaataattccactaattaaacctttcttcaaaatgcagtgtttcttctctagcgtggttcatgtcatatcaagagactagtttcgtgaccattggccaaagacttcttgctaaacctctcaggtaatagaactgtgtttccacaagttcttttaa

SEQ ID NO: 15877 - DNA, 1903 bp, Cannabis sativa
  modified_base (1364)..(1370): a, c, t, g, unknown or other
tatgttctttccagggcattggttaaaggaagcgttcgttttcatctatctccagcggcttcttgtaagccatttgcttaattctcggcattttttctgctgctcaatattaattagctaccacaatctacccaaaaacaatccaagttcacaccagtgcaactcacagattaagaaaaaatcagagcaatgtaccacgacaacaaatattctgatagcacaaaccaaaaatgatcaccaatatgcaattcaaccaaaaagattttcaatataactcacaaacaaaaaattggctcgacagtggtgaacaaaaccagtggtggtgctggactttgctcgtgaatgttgatgttgaagcttcggttggagcttgatagtggtgcttggtggatggagctcggtagtgagtgctttgagctggctatgcaaaatggagctcgtgaagatggttgcgtgtgtgcgaaagggggttgttcattcgtgaggacgagtggtgatggtgagggccggaggcagtggggacaaacaatggtggtgttttttggtcgtgacggtggcgttgaaactggaattggatgttgcgatttaggggagattggttgtggttctacaggtacagacgaagctgggtcgtggttcgtgggttggctgctggtgcgatcgacttcgagtgatgggttggtcgagcttgacggctggctggctgggttgagcgaagaagaacgctggttgatgatggtgatgactgaaggttgtggtttgctagtatgtggctagggctggtttagaagctcaaattggggggtgatgatgctgaacgatttgttgggctttgtttttgtttttttattttttttggttaaaataaaaatacaaaaaaaataaaagaaataaaataaaagtttatttatttatttatatatatatttaaagatactaatctattatctcctattaaaattgcttttttttatttatatataatatattatatctatatatatttatatatataattttaaaaatccgtgaatcactgaaatgaatcttcactcccagtaatcttcactcccagtattttttttaaaaaaaaaaaaacaaaacaaaactctcagttgttacagcatagtttcagcaattcaatctcttatacatccctacttcaaaatgctgagccaatgctataactcctgggacccgctgctccacacaataaattttactttttagcatattgcacaactccataatctgtctttcacctgcgataacattcaccataccattacaaattcattagcaatcgaaggaaattaaaaattatatctatatttatataagtatgtatatatttatatatatannnnnnntttttcttttttttttctcttctttttttttaacaaggggtggcacaccccaaacttaattataaatactctttttttttcaaagggtggcacaccccaaacttattacataacatatatataaaatgatatagtctagttcctccactcccgggttgcccacatgtgagtcaccaaagccatggcaacccgaagtcatttttcttcaagcctcttccaaagtgatggaggtctttgctcgatcaacctcccctccgatgtagtgtttaagtcgctgcccattcactttcaatatcctctctgactattcattctttacatccacagctccaaaagggtactccttgacgatggtgaatggtcccgaccaacgagactttaacttttccgaaaacaactttagccttaaattgaataacagaacaagctgcccttcttcaaatactctgtgttgaatcctcttgtcatgccatctcttggttttctccttgtacaattaagcattttcataggagaaaaacctcatctcttca

SEQ ID NO: 15878 - DNA, 5059 bp, Cannabis sativa
aaattagactaaaaaaattttctcgatgccgaaacaagtcaagggtgtatcagtacatcccttttaagggggtgcattctagaatcaccctatagtatttaattcgttataaatatttttaaaatataatttttacaataacacaatatttttatcatattttatttaattttatcgtaaaataaataaaattgtaaatgataattaataatttaatacaaattaaatacactttatactttgataaaaaaaaacattttatactttttatattaataaataaaagatttatcacgtcactcgtttgacgataaaattgaatggaatctaataaaaaaataatattattgtaaaagttatattttgagtgtcattattaataacgtgtcttatagataactggtgtaaaaaattcaaaaaaaatgttaattattattattgttattaagcatacttagcaattgccaccttgaccacctcattgtgtatatgataaaaatacataaaataaacataggcaatgcttgttaatttctttgtttgttacattttcataagatatattattaggaaatcatcccaattacaaaacaatgaataaagacaaatatgacatgtatgttgtttcccatagttgaagaaatgggacaagaaaactattttccatttaaatcataaattggatttttttttttttttttgaaagggtaatgataaattggattagaatagcaaaacgacacgtttagtttacaaaaagagagagagtatgtgtgcatataatatgcatacgtaatgtatattattatttattatttaaataaataaatgaagtcccatatcccaactcccgaggtttttgttagttgggtttggttttggactcaccgctcccttacatcacattatctcaattcataatactcatctatacgacgccgtttcattcatatattaactatacttaattaatttactataaatatttaattttaattctcaattatatataaaaatttaaatttaattttcaaataataatacttaaattatatttttataattttcgtaaatagttgaccatcaaacgtaatataaatagctacatgataatacttaatttgtctaaatcattaaatttaataatatataataacttaacacgataaaattactctaagatgtgtttagaaataacaatacttattaacgcgacttttcattcatacaactagtgtttttttaagaattaagatttttttctaccaaatttaaatatatactaaattatgtttttttaaaatttttagggaactattgatattattgtatttaaggattttttattcaattttactaaatataatgtgaattaaaattttgggacacggtgtggtatatgtcaaagttcgagagacacaattatattaaaattgagagaatgattaaatacatgatagttgttgcattagtaaaattaagtaaagcttaataattatttttaaatccgataatcttaaaatttaggaaaaattttaatggttgaaaaaaaaattaaaaatataatttaatacatgttaaaattaaagaaaaaaaaatcttaattatctttttttgaacattctcttctctttgtctctctctctcattaataatcatctatacgacaccgtttgattcatataaaactatattttaacactcttctcttatgtttgtctctctctccttaatataatctctattcttcttcttcttcttcttcttcttcttctccaatctccatggccatctctctctcctattgatctgatcctcaacctcaaccctaaactcctctcccctcttctctccgcacaatcaaggtttaacctcttcttcttcttatttctacgattacgatttgtcgaacctactttcctactgattattgatatagattgatgtcaatttgttttctcgcattaatttgattcccactaaaacactcatcttttcactgtatacgcatttaatctcgattcatactgctctctcaagctattcaattttaaattatatatatgtttatgcaattgagataatagcttcttctttttttggcactgaaactgaaataacaggaacccctccgactggttgattctccttatttactgtttcgggtggtgagcggttgcttttccaaccatgccttctctgcaattattgcagttaacggagcatggtcggggatttttggctacaaggaggtgaatttagattacctttctttctcattagtgttatcgttaatagcttgtcttgtgtttgtttttggttagattattgagtttcttgtgttgtaggaaaactttattactagctactggcattgtctttgctggtggtgctgctgcttatgtgcaatcaaggtatagctctagaaaacatgattctttgggtcactacaatggtctccaaacgaattcagaggataaagctgtcaagagaaatactgataaaaaagggggacttaagtcactcaaagtactggctgcaattctattgtcaagaatgggccacatgggtgctagagatcttttatctttagttgcaatagtggtaacttttcttttctctgtcctctcaatatttgaaattcataataatttaatgatgtaattgttattttaaagcctttttttgggtatatcttcgagaaaatcattagtttgcagtagttgaattcacttctcgtcgtatatttacacacactagttctaagtaatcttaaaattataggttctgaaggtatcattgatgtgggttgggaaaggagggtcttatgtattttaacaatagtttttttaaaagaaaaaaaactgcatgttatgtttcagtttccattaataggtcatatagaagactggtcctgtgataggagaagcattcttggcctctcttctgatgtttacttgtgtactatttgcaggcgttgcgtactgctttgagcaatagactagcaaaagttcaagggtttctatttcgtgcggctttccttcgacgtgtgccattattttttcggctgatctctgagaatattttgttatgttttcttctttcatccatgcattctacttcaaagtatataacagggaccttaagcctgcggttcagaaatattttgacaaaacttatccattctcattactttgaggtagttatggttattataatttattaggctgacatagtgaagaacaatttactaatgatgtctgctcttaaatacattcatcggaatgatctttgaatcgcctttgcaatttatctattgatctttgtttgggtttcagaacatggcatattacaaattatcacatgtagatggccgaataacaaatccagaacaaagaattgctagtgacgtaccgaggttttgttcagagctgagtgaaattgtacaagatgatttaattgcagtcactgatggtgtgctttatacgtggcgcttgtgttcgtatgcaagcccaaaatatgtcttttggattttggtaattttctttcttccaaagtcataaactttattagtctttcataggctttatacgtttatttatctgcaaatcttttgttaaagctatctgggtaatgcttgattaatgttttgtttcaggcgtatgtactaggtgcaggcacactgataagaaacttctctcctgcttttggaaaattaatgtccaaagagcaacagttggaaggagaatatcgacagcttcattcaaggttaaggacccatgcagaaagtattgcattttatgggggagaaagtagagaagaatctcacattaagcagaaatttcaatcattagttaggcatatgagagtagttcttcatgaacattggtggtttggaatgattcaggactttttacttaagtatcttggtgctactgttgccgttatcctgattattgagcccttctttgcgggcgatttaaggcctgacacatcaacattagggcgtgcagagatgttaagcaatcttagatatcacactagcgttataatttcactattccagtctcttggaacactttctataagtgcaagaaaacttaatcgtctcaggtaaatattttttattccatctatatgcaagcttattgtttacacccattgaaaaggtgggggtctgcttgtatggttaaccaattatgacatactcatattttctttatttcagtggttatgcagatcgtatccacgagttattggccatttcaagggaactaagtattggtaatgataaatctctgacgaaaatatctcagagtagaaattactttagtgaagctaacttcattgagtttgatggtgtcagggtatgtatgctctaataacttttcacatgttaatggtatatcgttttgtattcaacattctgattgcagtgggatattccaggttgttactcctactggcaataccttggtggataatttgacacttaaagttgaaacgggatctaatcttcttattacaggtagggttatttgtgaaagagtatttgtctgattctataacttttctttgtttttttttacggctagcagttagttaacctcagtaagtacacattattttgcattctgagaatatgcaatgaaaagtggcgattgctttgatgtgtggttttgtggcactatcttggaccactatttaaattaccattgcaaagtattgaatgtggcatagtatgtaaagtaggcagcttatttatgataaaaatgttctttttgcaaaatattgctcaaaatagttagtgtgtctctttaattgaaataaagatctttttttagcaatcttaaattacttgtgataaaaattagttgagtggttgaatatgatgttcgtttgtgcatgatggatgaatttagcacatgcagaatctgaagttcttatcagggatattgttgatgtgccctgtgcttttatgtttggtgcttgctagatgtgtttctctgattttctttcccgttaagtactaaaaatataattttaaactacctggtta

SEQ ID NO: 15879 - DNA, 6474 bp, Cannabis sativa
acgaatttgagtataacatatctcgaattttaatggcatgacatgttgtgacctaacctataattttttatagcatggtacaaaataaattgtatttttttctttggcacgttaagatacgacgaatatttatgacaccacatattcacagcactagatccaaccagctagctataaattaatacaatacttgtttaataatcatgattattttgtcctatatgtaagaaataaattaaaaaaagtaataaaagtaactgttagttatgttgaaactcataaagaagaagaataagatataataacaatattgttgtgcgtggtgatgatcaccgattagaagagtattgctattgaatattagtggtattcggtactttttataggtgatattttataattgattaatgatatttttaaaaaactattttcttaagttatatgtcactcagtatttaattataccaatagttatataacaccgaggagagtgttataggcacgaatggtgccttttaagaattctttaagaattgtttaaagggtacttagtattctccttggtgttatactattattggtgtaaatatcgcgtcctatataacttaaaaaaaatattttttttgaggatatcgataattaattgtgagacgctacctatcaagtccaacactgatcctcaatagcaatactcttaattttattatttttaatttttttaattattaaaataaaattataaaatatatgtagaatttgtatatatttatgaacaacaatttaatttcctctgtcacttattgatttttctttttttaaaaaatgaatagtgtatgatgggaagaaccaccttaatataaaatttatattttgagaggtattatttataagtcgtatattataagagacacacagtttaatgatgtaaaaaatttatgagaaaaatactaattactctcttaatggcgattataaaaattaataactatttataggacgttatctgtaagattgtgcctcatatctgtactcatatttttgttatattattttagtactatttcttttctacaacattaatgaataatgaaattaatgatgtagatccaacaataatactatatagtttttgtaatttatcaaatatattactaatttattattattattattttaggaggcctatttgatgttggtgattagtattaatgttttctttttaataaatgtactttgttattagtaatatttagataaaactataacaatagttaagtttaataatttaatcaccatgcaacaataaaaaggaaaaaaaataaaactataaactagagcatcgagaggccaaaatagatgcaaatacgatccccaaaatttgattagatatccaaaaatttatattttttttaaaggaaatagggatatttcattaataggcacaaagcctaaaatgtctcaaaatacaaaataagcacaaaaaattaaataataaaatccataagaaaccccgaccaccaaatacgggacccatctaaaacaaacgccctctttacaagagattgggcaacgatattcttagacctttacaatgacacaaagatagactttgaaaagaattccatgcattagaaatatcattaagtacaatactaaacttattataacaaatataattataattaacaacgagaaccatacatagataatcaaagaatgctataaaattgttaaaccccaaccaaaggtaaaaggaaagatcgtgaaacaggaccattgcctctgctatgtgaggctcgaggttaccaaaaagtggaaaggcaccagagaacaagacatctccatttggagcggaaggtacaactcctaaacccatctttcaatcctcgttgcagagattggcatccaaactaggggccgagatactcctcgagcccaaattagtggagatcaggccattagacacacccacacccacacccatttgagggtcttgatacccccaaagatagttaagtgcccaaggactaaccatattattagaaggaagcttgttgtcatggacaaagatgttacgtttatgccatatacgctaattaagaataacaaactcttccaactcttgtttgctcaaaatgtgcatgcaacccaaaagaagctcatagaaactagaggcatcctttaaagtatcaagacctttaagatgtcattccgaatgaattgtgttaagggaggtgcaaagccatagcgcatgcataaatagtggtctcattatcatgaaagtaaatggagtagaccttagacacatgaaggccatggcgagtgaggttggcataagatggcaaaaaattcaagcttgccttctaaatgaagattttaatatttggttggagattaagcccctaaataaatttccaccaatgagacgtccctaaagaggtcgactcctggccccaacccaagcttgaaacagtactccaataaccactctcaacagaaaacacaccattgtcagaaaagtgccccacaagtctatcttgtctatcaaacaaagagcaagaaatagaaatgatagctttagcttctaccttatcaaacacttcctgaataagagttgaattccaaatgccacaatcaagtttgagatcactaaccaaccaaagatgaggaccaccattgaaagagtaggtatgaccatggtcctttggtatccaaacatcctcatgagtttttatagtgttgccttgtccaataagccaacaaccttgcctccaaagatcacgacccaaaagaatactcttccaagaaaggagaaacgctttgcctcttaaacatcaagcaatgaactattggcatagtagaaacccttcataactttagcagccagggatcctgagtggttaaatagataagcaacctgcttagcaagtaaggattggttaaaacaagaacatatcacgaaatctagcccatacatccatcatttttgtgccatcaaagacgggaccaagtacactaatgcatcttcatagtatcatcatctccacccccaccagaatctagcacacatttgatgtatttcattcacaatgcccactgacaagcaaaataaactcatagcttaagcaacgatggctttgattattgattttaaaagaacttccttgcccccaacagagaagaatttagacttccacccaaagagtttgttctaaattctatctttgattgattgaaagaggccactcttacttttaccagcaaaacaagaaagcccttatcatggcaaggaacaagagggacaccaaggatatgtgccaagaaagcacaaaaatttgacggcatacgagatgagaaacataccgcaaacttatgtagattaagaagttgacctgaagcattttcatatgctaatataatttctttaaatcgagaacaactggccaccaaagcttcaagaaagaaaaagctatatatcatcaacaaacaaaagatgagaaatcataggacctcaccgaccacaattgttacatgaaagagagcctaagtcaatctcgtgcttaattatggaagacaacccctcagcacagatgagaaacaaaaaagggggaagagggtccccttgtctaagacatcgagatggctcgatatgaccaatgatatatccatgttaacattaatagcacaagacactgtagtgatacaacgcataattaatcctatccaaccaggatgaaacccaaggttagaaaacatacctttgagaatgacccaacaaagtctatcataagcctttgccatatttgccttataagcaagaaaacccttaccacccttcttgtgccttttgatagcattaagatacttaaatccaatcatcacattactagaaattaagtgcccatgaatagaagaactttgttcttcaaaaataacgtcattcaacacttatcttaatctagtagtcatcatcttttcaatgattttataaagagcatcacaaaagctgatgggccaaaaatcacttgtaagagaaggagattttaccttagggatcaaaataaagatagtttcattaataaaggactccgaatatgatccattaataaaaccaagacatcctttacacacattcttaccaacaatatcctaaaattcctaatagaaaccaacctcatcccatccttacatgggctcttgctcaggtgcatttggaacaaggccactcaaacatcacctttagtaaacggtctcatcaacacaccattcatctcatcagaaatccgaggctagatcgaatcaagcaccaagtttaaagcatcatcaggcggtctattagaggaaaacaaagattgaaaataatctttaaacatcgtagtaatacaaatagacgagaactctttaatatgggaatgaagaatgtggaacgtccagttattcccaagaccttgaacgtttcaaagctaaaaaattcataatgctcggtggccttgttctacatggaccacctcttcaaaactaaccacaacatatttctcaaacacaccaggtaaaagagaagacatcatgacaccagggacatgtacaattggaatcgactgtatcgatacgaacctcatgaagatcaatcggagtcaaaatgagctgaatgcgatcctccttaggaccacatttaagaacctttttaggactctaagacttagatttaagaacaccatatttatcttgaaaagaaacctttttaatttttctttgtacgcacttgcgatgagcttgatgtggttccatgcaagatatgcatgggagtcacgtacgtgaacagtgcctacttcaccttcaaccatatctttagaaatcccatgcattgaagagcccatatatattactagcacataaagtatccacgtcacccttagcatggtcacctctttatgcaccaactcatattattaggcacacattgagtgttagactccccaatcacaggtaaataattaccatgggccacgggtaaataaataatggggattctgttaattatggaagaagagtcaatacgtctgccaacacaaggaattatgttttgaaatttccaaacagtgatatcattttcaggctcgtttggtacgccgtataagagtcgtattgtattaaataataaataatactatgtttagatgaagcaatatattgtattaattattacgaccaaaatttttaatacaacgtaaattgtattatttaatacccggacatggacccaaatccggacccaaactcagaaatggacccggacctgggacttggactcgagacctagacccatacccaaactcgggacacggaccggacccagacccggaccaggactcaaacctagcaccccggactcagacctagacccagacccgaacccaaacccagacccaaaatcagacccggacccggacccagacctgaacttgaacctgggacccaagcccggacccaaacctagacccgaacccggactcaaactcagacccggacccaaactcgggacccggaccctggacttgggaccgtgacccaggactctcggaccttgacctagacgcaggaccggacccgggaccggacccaaacccggacttagacttggtcctagacccgaacttggactcagactcagattcggacccagacctgaactcggacctggaccctggacccaaacccagatccgaatcccaaacccggacccaaacctgacccagactcaggacccaagatccagaccaagacccaaacccagtcttagattcggacccaagacctggactcggactcaaaacccagactcggatcccagacctggactaggaccaccaaagactcagttcccaaacccagttccaaacccaagaggcaaacccagtcctagtcccggtcccaaactaggaccctggacctggagctggatcagacccggccccaaacccggactcagaacctagacctagatccggactccagacctggaccaggatcacccaaaactcgatccctagacccagtttcaaactgcgaagacgcaaacccggtcccgatcccaaacctagaccctagacccagacccgaacccagacctggccccaaacctggacttgaaacccaaacccagggctcaaacccgagacccaacccatgcgtagtcggtgttgtggtcgagtgtattgaaaatatattataactttatacaatctattaatacaaatcaataccaaatgtcgtactatattaaataatactaatacaatacaatacaatacgatacaatgcaatataatccaacacaatacattttaatgcaacgtaccaaacgagccctaagtgtgctagatagatgatgccatttcaccaaatcattggccacctttctcgtcattcatagccagcgttgattgagacgtcaaaacaccaccaccaatagcc

SEQ ID NO: 15880 - DNA, 2348 bp, Cannabis sativa
  modified_base (1763)..(1766): a, c, t, g, unknown or other
ttttagggtaaaataaaaaaaaaaataaccatattgatttggaaatatgcaatccaacttgaacgacaaagcacaaagaatttaagagggcaatatatgggtactattagctaggctatgactatatatgattatttatgagtcaatgatttttattatcattcatttatttatctcgaccactataattggatacttccatatgatatgagtatcgtggtaaggttaactacttagccaaacaatataacaattgatgtttaaggtaagttttaaaaaagtcatttttataatgagtgagaaaagtataattaaaaagttggttaaacccacccacacccatctttttttggtccagtccagtcaaatccaaattgaaattttacataattatacatgatagataataaataaccccatcacgttcgtctctactatatctgctagtgtttgtaatttgctttctgtcttttaatcattatcatggaatatgataaagtttttgtacttaacataatttcaactgattaaacctgatgagattcatcagttggtatttcatttcatatccataaatcatgtgccctcctttggacaaataatgataattttaatagtaatgatcatgaccaccttataatttaaccttcatacaacaaaccatgttaagtaatattattgtacgaacaaaccccacgaaagactgtttttgtagtggagcttttaaattgtttcatttgacaccacatatttcatttcacactgcaataaaaagcaaacataacatacatatatatctaaattacagtccatgcgtgtatgtgaggaagatggagagccatactccatttatatatatataaaaatatttaaatagtgaattcacttctactcattgaggaggttgaattgaagatttcatgtcttgtcattttcgtccattacataagaacttttttcaaactctatagtggtccgtttgcatagactaattaatggacccctccttaggcccatagagttgccacatgagaacaatttgctccaatcaaggggacaaccaaacaaatttaggccttatcaacacccttcgcacatttgagatgtcttccacgtgggatccatccatcgattggaaaataataattttaacactcaaatgaaatcagtaaaataatccaattaatttttaatcaaaggaacacagctattaaattatatacggagcttaatttacactactttcatccacaataatatacttttaaaaaaaaaaatgaaaagggaattgtttaaatgggaaggaaacaagagttattgtgtacatatcaaacaaagacaactataagacaagttcttggcaccataacgatggaccccttatttgctctattgtttcccactatatttattggtgcgggtaacatgggctctatttgcatgtgaaaaagggaatagttctatttacaaacaagtttatcttttgttttctttttcttttataacatattttcattgagtataggagttgtgatgaagccaaagcatattattatgctattcaagaatatatatattatcctttacagactgtatatatactactatatatataaatatttgtaataacagaacacaaagaaaataatatataaacggaattagagagagagagagagagaacacattaattttgaaagcagagtgctgtgcagaagaagtgccaatttgactctacataataaacacacacacacacacannnntatatatatatatatctaacaatagtacaccactttacagtcactttacttatattctgggaggaaaagaaaagaaaaaagagaataaaatagaaaaaaaaaacgaatgggtagtgtgtacttatttcttctctacaaaatgggtttgttattccatggtggtgttcttttttgtggtgagagttcttagactccagccttgcttgtttcttaccttgaccccttcaaccttggtgttgacgtggcaaactgttcccttgtttgacctcttccatcggctaagctgaaacaagtgtccaatccgcttccgccacctcagcgatgaggcacgtggcttcccatgctctaccacagtcttggtctccttattgcttccaaagctgtggttccaggaagacacgttacaattctctagagacacttttgacacaacagcattaccattaccattgttgctgttgttaatattggccttgttcttctcccatgacgccactccattttcttcaaacttaattgatatgaatgaatcatctgaaataccaaatcaaatcttaattacactacaattaattaatcata

SEQ ID NO: 15881 - DNA, 3844 bp, Cannabis sativa
aatagggcatttcagttccaatacagggcacaagacaagagacaaaagggattaagttaaacggattatatgacatgatacaaggcaatctaatgatacaattattcccaactcttgcttacatcaacagtcgacacaatcaattcaaccacttaaaacagcatcaataaatctatctaatgaacacaagaaaggatagtagaaaccattagttagaccacacgtgtactagaccatgcctattgcctgtatagatctcattccgctcttcgtcgtagaataaagcagtaatatcttccaatgcttcagcaactgtgctccgagttctggctgcttgggtacgcttctttgatttgcagttgccgctgctgccactgacacagcacttgtcactacagcaaccttcactctccaatggggtgctgttacttgctcttattttagcaaggcatttcccagtcagaatattgctgatattgattgaccctgctgcaatagaaatgcagtgtaagatattatatgatctatattttatgaaattgatagaccaacaagactatcatattagaataaagatatagaagagatgcaatcaaattcttatatagcaaagagcaaataatgtcatttcatctattccccccaattcactcctcaagatatcggtaagtatagcagactcaactgataatcatgattacttagcacaaatacacccaattgattccagtagcatcaataccaattataattttattccacaacataggctatgtgcagttccccagccttatgagagggttgtagaacttctaaactcattgacttaatgtgttgaatataaaataagtcacagaaacaaattaccacttccttcggacaagggatcatcagaatcagccttgcagtaagatataataagatcttgatcactagtaatgtatatgttattagtattacagtcggggtgccacaaaaggtgatcctcaaatgaagttacaagctccccacggaagttccaaacagccacaagtcgatttctaaacgttaagaacaactgattctcatacagaaatataaaagctgacggtgtcataaattcagttctgctaacttctgttaactcaaaattacgaacctacacaatcgaaaaaccaacggtaagaaaaatgaaaagtgaacaaacaaatacaaataaaaaaggctagatttcaagaagacactcacatcaagaatctggaggttctcattttcttgcttgacaagaagcttctcattgaactgttcgataaaatccaccttcttattccggtgaaggagatgattaaatgattttaaaactgtaccatcctctatagaaagaatcttgaggggcacatgaccactagccttggttaaaatcaacagcatgatcccaggactgtttaagaaaaggaaagaacaaggtgagagataaaaaaaggtatccattaaaataaaatggtgctacacttatgtacatgcacatgcacatgcacataagctgtgatagttcagaaagtgaacaaagaataccttatctttatttcctgaacatttttatcggatatggagtacagcatcgtatagttcttgaggtcaaaaaccttgtatatactaaagaaagaaagtataaggtatatcaataataagaagccaatagtgttagataccattagaaaactcgatactgacaaagcaaaaactacctatcctgtgcagaatacgtgagaaccttcccatttacatcgtcaaactctacaaaacctggccattttagtgactcagattcaaaaagagcaaagccagcatctggtttgccccttcgaatatatctgattcataccaaaaaaaaccagtctttagcataatatggaagaaatagaagaaaaaaatcatcaagattgcatgtagattctctcttttttccccttttttatatgtacatttttcgatacttactcgatcctcgtgcttctacattttaaagaactgaaattgtctgaagcataaacagaaactgtgataagtgagtcattgttcttattataaaacaagctgcgtataacttcatcaggactgacattgagaaagcatatcctctgattagtctctgcatccaatgatgaaacatttcacacattcatcaattaagtgtcggtcctaagatcttaattaacatcataccaaatagaagatcagaacagaaatattaaagttattaactattacctctactaaaagctgcacaaacaccagattgggcaagagcaaacacaatgtcacgagctgctacaatctcaatgatcttggacctcttccttaaaaaaggcagtaccatagaacagtgacccttcggatcatgcgtatcatattcttcctacacaaatgttcgctcaaattcaatcacttgattgcaaaactacaacaacccaatatgcatacactaacaccaatacttctaactaaactataatttcagacagaacaaaatcaagcatccagttttaatatttcattccccacagactcgaaaaaataaaatccttcgggacacagggaggtctcccggttgaactgcaaggggcaaaaatttagaaagataaaagataaaataaaatccagatatttcattgaagtataaatgagaaaatatgactagtaatgaatactgtctccttgctaatctcctactagaatactaagcaagaacacagtgaagtgagtgaattaataccaaggcctttcatttaaacgattcagaaactcaacaatctacttccttagtgtgtcaattgacagtaaagaaacagagatgtcaaacataacaaaaatttctcaaatttgggggagagcatagcataattacttcaaataatagcaacacttcgaaaccgacacaacgcctacagtttgatttaatacttaacaatcaattcattcatcataagcgaagatctcacatcttatttgctaaaaaacacaaaacccaagttccaaaccctctttctttcaccaaaaaccaaacaataataatagtaaagaaagcatgaagagccgtaacactattaaaataagtaaacagaattcaaaaataaaataggcaaagaaaataacctgtagacgaatattgcgaaatctctcttgggcatcgctcatggtgaaagcacggtcccgtttggaactgatttctcgtctctgaagcttcttaacactattgacaaacccatctacacctccaactcggggccttttcttcgccacaacccgcctaacactgcatggtctagggctcgccgaaatcctccttcccccaccttccatctctcttactctctctccctctccctccgaacttctaaaccaaaaatctgagcatttacatttcagtactcctactgaatcgcaagattctcatttctatcattacccataacgaaaataaaccctaactcgcactatctttctcaaccaaagcagtaagaagacgattgcaacagtctagggctaaccttttcggagttataaatttgaagaggacatcaaaagagagctgatttaggttgaagaagagaatagccgtctctctctcttctgtgcaaaatttgaaatttgtataggagtgtgtgttgtagagagaagagaagagagagagtagtgaatgagaggaagagagctgtcatgaaaatgaaaataattagaccggtcaccggggtcatagatttccaccacagtctgaattggaatgacggcttgggctttctactgattctatgggcccatgggccttttctgggctttttaatgcaactgctattacccttga

SEQ ID NO: 15882 - DNA, 5632 bp, Cannabis sativa
  modified_base (5296)..(5306): a, c, t, g, unknown or other
gttctttgagacattcactgtagtttggctctctttcataatgtgagtctttctcattgctctaggatagttaatgttgttactcataaccttgctaagtatgccttgtctgtagctactagtaaagtttagtagtcagatcatccaaattgtattcaacaatctctcatggctgatgccatgaatctttaatgacatccccctcttcctcttttttgagagcttttgctctttaggatagagtttagggattttcttcaaaaaagaaaacgaacagtataaaaatttaattaattaatatttttaaaaatatttattttttaaaatcaattatttatttaacatgtgacccaataaaatatcaacatgtgtcttttagttggcacttaacggatctaggtgacatttaacagtgaaaaaagattaggtgcaacaaaatcgtaacgaatagaaattttgccaccgttttttttattgagatcatatgtgtaacaattataaatattaagagaatttcactgctaatatcccaaatttatgttcaattctttatttcttactatcttttagttctttatgggtgttcattgactctaatgtggtttgccaaatctataattaacaaaaaaaaaatattttcattcatttttcttttttacctttctccatcacctagtcctcatttttatgtccctgttcttcttttctttatacaacaatgaaactagccacaatgttaataggctcaaacatagtttatgtgaattctctccttttcgtgtaaggattcgaaatgtggtatcggtggaactactcaaaggcgacagagtatcagattcacgaaagctaaagctagctaatgttaaactgtctgagatacttgaaaatccaaagatgggttcaatacaacaactcattccaattaatccttacaatgtaaaaaaggattatgaagacgagggtggtgttccggtcttggtggttcagttagcgttttttactgtggcgacattgggattggcatttgcatttgcatttgcatctcacacaaagttgtccatggaaccacattttccacattccttgttgtgtgggttgcaagtgttagtgcttcatctccctcccatggcaatgggaatgacaagagaatcacaccctctttcgactcggcttgtggtttttcctaatagagagatgcaagttcatccccctagtagctcccgatcctaataccgtcgttgtctgactaacatagttgtacttgctttgtcttagtccattttgattttcagcgagtttgttgacggtcaacatagaacatacaatggcgtaacatcctttgagtcagggagggttgcgacaaagaaatttctgttcgaagtttagcaaaactcaattccaaagtaatggatacccatagtgatgattttaccctactaggatagaagttgtgacaaaatatcatccaatgagaagatctctaggccttccatggtgatatcccatgtggtgaatctgaggggaagaatggatccaccattgcaagagactactgagcggtcgcgatcatcatggaatttggaggagaagaaagcaataagcttgagttgcatgatttggtggttcagttgaagaaagtaataaggaaaataaacaaaagattatgtggccaaaatcagaactgaagacaagattatgattctcttaaggaagcaagttagaggaaaaagacatgggtcaacttagaggaaaaagacatggcttgatttgaacaggatcccgagtttctgcagttcgcttctcaggcaccgggctcataggaattccacttgccatccctgctcatataggtaagaatatgcacaagtaacattcttttaagaaaagaaaaaacaagtaactaataataggcccctaatcatttaaccagaagaaaaaagcataatagttaaccatgcaaagggtatagagtcagagatttgcttcagcaataatccattgcccctttgacacaaaacatctgactacatgatatacatcttcatgttctaatcatatccaacaatatttcatatgaccagcataaaactccaaaagtaaatggaaagttgaaaactgcagatttgagaaaatctcaacctttattctagaaggaaaaatcatcatagtagttgtctttgataaatgcaacataagacaaaagctactgcatcataatactttgagatatgattgtataaatatgctacttctgttttaacaaatgagtctgcattggtaatggagattgcaaaattcttaactatagtctaatttgattataacaaactggctaacatgcagataataatgaatatatggttttctttcttcaggtgctattttgcaccccgttataacaaacttcttcggtcgaaaaaataatgatttaacttatttctgaaggaagaaaaaaaggataaacaaaacaaagtgcttcccaatagaatagataacttttctttgaagcatgtgagaatagataaatgaacaaaacattcaactattcaaaccattcactactcaccagtttttctttaccaatctcatctcaactgaaaaaagaattgcaggccattcaaattgtccattttctgctaaactaggttgtagcatgatgaggagcttcccgcgaaacgagcactagttcgttacttgtgaagttcttcacagcgagctcttctaagcgtttccatgtgacttctcgccttgctttaatctcttctttttttgactcgtcttcattaaacttgtgtaagcactcttcaaacagctcgggatcaagatcgtggaaaatcttacgtacatttaaggtcaagctatgaacagcttggttccaatgatttctagcattattttccaaggcagggaagattattggtagaatgacattgatattttgtttgatcaagttctcaatgtgatcgttgttccacaaaaacaatgctctctccgcgacctgaaaaaacaataacaacgagcactatttgagaacatatcttaaccagatctgttcgaatcaatatatgcagtttgggatgttggcatgtcaccaagctacaatgttaagaaaatgcatcatgttcaagcagactggcaagaaggtttgttgaattggctttcgggtttttaaatttggtcaaatttattagaaaattgtttgaaatgtgcactgatttccagcaagctaagctcataaactaactaaaataatagtatttaatagaaactttaactaacttccaaccaacataactacgaagaatcggtttaataaaattcacttaactcggccattagaaacattgtgaatgcagagctataaacattataaacaattgagtgtgttaaagattcacagaagcactagtttaacattccacatacataatttccctgtcttaaaaagctttatacacaaaagagaagcataaaatgcaataatgtgttgcacaaatgaagagtgtgtcactacctgaaagtgagaactgtttaaacaacgagcaatctggcgaaacaaaggcaccatacatcgctggaactctggcagatgagttgcttctaaaacttcctccaattcagctaagaacatcacttccttggaagtattggttattggccagtacttcaataagcctcttatgactgtatcagcaagcttacaatccttttccacaaattgtgtgatgcagtatgataattgttgatggtacattaccaaggatttcggtttgtgcagaggaataagtgcccggacaagaaacaacttgtgctcttctttcaatggtatagcaaatccatttacaatgctgcccaaaatttctagaagttcagtgataccattatgcttctctgtctcaaagataaaacgataaaaaatgttgttaatcgccttcctaatgaatggacgatgaaccataaacttcccataaattcggtgcaaaatggttttcagatactccctttctctaaaatcttcagagtcaaaaagctcaagcaactgaagaataaaagagtgatcaacatatcgtttagctaatttcgcatcgatataagatgatgcaacaaatcttacaaaaaactcatacacaatttgtaagtgagaccatgctggatccatggaaggttcctcctcatccaaatcaaacccttctccaactttgttctcccgcggttgtggattgaaggttctaaataagtttatggacaccattttaataccctcttgcataacagtttcagaaaacttatcatttgcagaagtcaagtaatccactaactccaacaatgtcaactgtttgatctctttctctttaaggtgctttgttggatcagtgaaatcaaacacaacacaacacaaattcaacttctttatcattaagctttgcttctcagaacttggtacatccctaaatgcaggcaatgcttcataagaagaagacactgcaataccattctgcttcgaattcgcaaatccaccatttttgctaccatgatgattttgctccacttctgaagcataattggtaccagtaggtaaagaaataactgaagttctagacttgttactctcttctaactcactacttcttgaattagtagaagaagcattattaaaataagtagcatagtttccaccattttcatgtctttcattgctcttagaagacttccggggaagcttactcagaatctgttttaacatactaaaaatataaacaaaacaaaagtttccaccttctaaaatttcactaaactatcaacaatagaccgcatataaagccactaaaaactccatcaagaccaaatcaaaggcataaaaagctcaaatgcttaaaccccaatatttgaatgaataaatactgaagagctaaagaaaaacaagaatttttattattattttttttccctaaacctaatatttgaataagccaattaaagggtgcataaaaaccccacttctcatctggaaactaaaatcaagcccaaccttttttacagctgaaactcagaccaaaccgtgtgctttgttcaatctcatactccaagaacctttttttattcacttctcaaactctcagcttctttcaccctatacccagattaaaattttgaacatttgagttgaattgaaaaactccaactaaaaaggatcaatcttaaccaaaaaaagcagaaatcttatgaagaatcagagaaaggaagacccttttccaatcagttcctccactagaaaaagataataataataataatnnnnnnnnnnntaataataataataaagaagaagatcaatcaatcaattattactttctttcttctcgatcgaaaaaaataaaaattaaaggtatcaaaactccccaaaaagaaaatacagtaatgggtgtgaagaatgagccaaaactattgatgggtattttagtaatgaatgaatatgacttacagaggaaagtgtttgttttgttccaatcctgcttcttgttgtttttttgttgactcttaaaactttggttgctttgtttatggggttaatttcacaaatacacaaaaacaacaaaaaaaaaaacaacaaaaatacagtttcacggaattt

SEQ ID NO: 15883 - DNA, 6933 bp, Cannabis sativa
cccccccctttaacatctccacaactccgtgagttcaagagagccttaatgcaccaaagctaagaaaccaaaaatgaaacacagtgaacaagccgagaaagaaaagaggaaaaaagtagcaccccgaactccatatgccagtgtgaaaggaccaccaccaaagctccacacccaaaccatcgagagaggaaaggacctctcagatccaccaccataagttctaagaaaatcacagctcacagtcatcgaagaccaccaccacttccaacaaccaccccatctgagatccaaaacccccacaaccagaactcgtgctctaataactcaaacacatgtccttattttttgtgttaaaggaattaaagctcaccatcgcacctaaccttcttgaccgccaacgcctacaactctgattcaaacgaccaccatctgcccaaaagaaccacgacccactgttggacaaacaagcactagtgcctctcagccaaggtaaaggggttcaaagagagagagattctttattctttatagtgaagctccacaaaacacatccttagtgtgtgatttttgtttacaagtattatgtgtgattaagtttagtgatttgagtattgagtgtatacattgtgtattatcattgtttaaaaaaaatacaaaatattagatgcaataagagtcatgtgatccataaggagaaagactggataagctatgtaatccagttcacttgagaaaagtcaagtgtgatgattctaagactatgtaggtatgtgttatgcccatatttcgagtagcaaatatgttcatgacacaataaaatacccggttgtgattatatcatgcaaacttatcaaaattcacccgcagtaagacaatatgagcacactatataataatatagtctattagcacaataaatatcaaaattatgattttacccttcgatgatcaaaattatgaaaatgcccctaattcataaatggggtcttaaatacaataattctcaaataatttcatataactaactaatccattttaaataaggttgttaatctattttctaatcccggaatattacaatgactctgataaggagcctgaaccttttcatctagacatacttaactcttacttctcaaggggattcaaaaatccccatgtgactccttatgatggaacgactaacccagtagcacatctgaacaatttcaacactataatgcgagcaaataatataaggaataatttatggtgtatcttgttcccgacttccttgacgggagcagcgagcgattagtttgataaatttaccaagcattcaataatctcatgggaacaactatcacgagatttcaaaaaaaaaattctcaacaataaaaagtaagaggtccgaagcttcgtcattgactaacataaaataacaacccgacgagtcgttgaaggcatttttaagtcacttcaacacagcggcatcaaaagtcaagaatctggatgatagttaccagtttactgctttacaggctgggatgactgtaggaggagaactatgggatgacatacaaggtttccccttaagaacaataaatgaggtcaatgatagggcattgatgtatgttcgaaaagaataggcttgttcagagctcaaactactgaagggtggctcggaaaacaaacccaactcgagtaatgaagaagctagcgctgcaacaataaatgtaaattcgagcaaggggaatgagccccaaggaaaaataaaagatgaatccaaaggtacagcagaagataagaagaaatagaaaaatcataaaaaaaaaaaatatgtaccaatatactctatttatgcagaattgaatgaaattcaagaaaatatatttctcgcaaatgaaaatagggtcgccttccaaaagcccgaacccatgaggtacacgaggggtaaacgtgatcaaaacaaatactatcattttcaaaaagacattgggcatacaaccaaagaataatgtcgtcaacttaagaacgagattgagagcctcattttttgaggttactttcgacaacatgtaagaaacagggggaatgaacaaaatccacccaacaaccacaactaaaatcagaatatccaaccaccacctactgatggggaggatattttggtaatttctagaggccccatcttccaggaaccagtagtaatgcaaactaagaagcaatatgtaaaacaagtaagaaatcaaaactcagcttttgcacctaaaatactcaagcgcacaaaaccctaggaacttcccattgttttcactgaggaggacgcattacatgttcagctcccacatactaatcctcttgtgataatagttcagctcgcaaataaaaggataaaatgggtattggtcgataatggcagctcaatcaatatactatataaagagacattaaaaaatgggattggaaaatattaaattaaaaccttgcatggtgaacttgtgtgaattcacaagggatagtgtcacaagtttaggaataatagagcttccattaataatggaagaatcaccattgtcaataactcaaatgtaagagttcttggtggtagacatgccctaggtgtataacatgataatgggtcaccctgttgtgactggaatgcgagctataagctccataaaacatgtctttgacgtttccaactcagtccggaataggcactgttaaaggagatcaattaaatacaagacaatattattattggaacttattttactaggatcttaatttactagcatgtatgtttgattatcacgtagtaatctaacatcctaaaatatgaaaaatataagatcaagtaacacataatagtttaagattacttacaataagggtagtggaataatataagcctttccgttcagtagtctagccattgctcctttttgttgtagagtatcaccaagtattgaactcgaatcttcttttcctttaattagcaacatgtaacattctacacgatcttccacaaaggtctgagtgccatcttgaatagtgtgggctgacactcaacttacttagaaatctaattggctaaaatcaatgagaaaagagagaagaagaatttgaaatccaagatgcatgaggattctgaatctagatttaaggaattcattatgattagaatattgataattatgtttatgtttgtaatcaactctctatgtgttttttatcttgtaatttttcgttattttctagaatgtgtaattttgctgcccacaatgtggctaaagggccttcacccagaacattacaagtttcgtagagctatcctcgatacctagaactatcatttgtaatgaccgcgaggtctaatcttatttatatataacgctttggtttcaaaaaaaaaaatggaagagaagagaagagaaaaatgaaccaatgttattattctatttgtctctctgcctttatataggcacacactatgttgagattaaaatgtttatttaactaaaataataagataggttgttttaggtggctaaaattgaatctcactcaaaacctaattcaaattaccttaaatttaattactttcgtatcatatgtaattaaataaaaatcattatgctattattaattaataatataatataattatatatatcaaaaacaattcgtacataataacgaatttatatttattatattataattatatataatcttgattaattaatttaaataaataaaaaaattaaacatattatatattacatttaaatctatatttaatttttaataattataaacaaatataaattaaaattttaaatatagcaacttattaatttgacatcaatttctcacaattaacaataaagcatatatctctcatatattttcaatttagctcaaattagtaaaaaaaatttaaaatttgacacagtcaatttttaaattctaattgatttattaaatcaattaattaagtctacaagatgatattatcccagacaatatgagattatgaggaccatgggcctatataaccaagctcccaataagtagatctgaaatttacttattaattcctcctgacttcactatagatttgaaattgcactcttgattacatagaacgctatgtataccaaatataaatacgttatgattatctattgttacaatctcaatagtcattgatcctatatggacggttcatatctagtaaggacaaatttactatttcaccctctaatatattttatccttaaaataattagctctttgtaaatgatatttgggaaaactaatataattatcgaaacgagtgttctatcatttatctcgtttagccaagctctaagaaaattatcgcttcacttctaaatagttatagaagttatagattctatatctatgattaacgttgtcactcaattgcattaccgaatttccaagatgtaagtatgggctattcctacgagtaaactggtaacgaacaagtcaaagaaccagtatagtacaattaagttagaacttaaccatctcaggattgcgatcaattgacctaagatcaactaagtgatattaacttagaattagatataacagtaagtttataatatcttttccatttctacggtacaatatcaatccaatctgatgtatagttgatacatccgatccaagtttgctttgctaatgccctagaaaagacattctacttacccaagtataagcaaactatattgttgattatctcattagtgtaaatctagtttactgaataatcgtgggactaaatagtttgaagtatattatcatgattattttccaccgtgaagacaatactataatcatgaataataatatgttttggatttaactcaatttatatactaaacatgtaatcatgaatttgacttgtgaaccaatcaatataaaataattcctgatcttttattaatagtaaattagattatattgaaatgggttttatttagggcataaaaacccaacagttataacatagagctaaaagaaatagcgatgacccatcatactatggtagttatagccgaggctaacaatgaagaagagattgaagatctagacccaaggctcattgatgaacaatcacaacttgggccagtggaggagttagaggaggtggtattagatcccatcaaccctaccaaaattataaaaattggtaaagggttgggggaagaattaaagtagcaattaatttgttttttaatggaaatccaggatcaatttgcctggagctatcctaaccatgtcgggattgactcgaatgtcatttgccaccacctcaacatagatcctaactatccaccaagacaacaaaagagacgtcttcttgatcctgagacacggaatgctctaaaggaagaggtcgacaaattattgactaacaacttcattagagagacattttatctagtctggatttcaaatctagttttggtcccaaaactgattggcacatggagaacttatatagacttctctgacctaaataaagaatgtccaaaggattattttcctttgctcagaattgatcagctcgttgatgccacggcagggcatgaactatgtcatttatggacgaatattttggatataactagataaaaatatatgtcccaaatcaagaacacacgagctttatgaataacacggggctttattgttataaaatcatgccatttggactaaagaatgcaggagctacatactagcgtctctacatgaaaacataaaatttataggggtgtcagacattcccaccccaaaatatgatataacatcttcaaacatgctaaatcctatatgtattagggacgatctgaaaaggtgcgactgtgaggtagttacaaaaatctttgaaatatttatttaaggggaggatggccccagctctaatgtgttcgacactttaagtgcatattttaggggaggatggccctagctctgatctaggtttttcttgctagcttgatttcatgaagagataagagatcaatatgattatttagtttatgccaatgacatctggaaggcagtgcataataagtacaatgccactcatgacatattggcttatgagagaaatgctcattctaataagatgaacattttgacaaagttacgaagctggagaagaaggtaaaaatgatttactcacaccctgttgataaacaatagtggattgaatagttcttgaccaatgacattatttttctctttcgtgtagatttgtgaatagatgacagtatgtatcttcacagacatgtctatttcaccgagcctctctttgagacaatgcccagatcgttacgcctttcgtgtgggacgaaacttacccgacaaggaatttcgctaccttagggtgggtgtagggtggactatttcaaagtggactccccattcattagatagagaagatcaccaagatttcgtgatccactgtaacaaaaatggagaaaatatttccttttaattggcgactataaaaaaaaaatctaaaaatgttatgaaatttatattaactgcatttagtataagttcaagacacataagagctctaactagccatagtctttttttagcttagcctgacacaatgcatacacctcacaagggaatccatttaggcttagggaagattagactttgcagaaaaggaatgtgccttggataatccacatctcaaggtcaagtgctgatgagcacattgaactatccatgtggcttagagccctcacaacccaagaacgacgtaattatcaggggcgcgctctaccactgagctaatagcccgtcgtgcgggcctcccactgggggcccagtatgccaaaagcgagagaaaccccatcccactaaaatacccctagagagggatagggcaag

SEQ ID NO: 15884 - DNA, 10880 bp, Cannabis sativa
gtaaaataaattccaacagttagagccaagttgagactattggtcacgccttatggaactgccctcggttgaaaactgtgtggaaagcagtagggttctggcacctctttcctgaaggccttggtttgatgacggatctgctggactttctaatgttcatgagagaaaaatgcactaaacaggagtttgaatcctttttgggtttgagttggctggtttggaatcaaaggaataatcgaattttccaagataaaattactcctttgaagagctggactctgtgggctcttgattacattgaccatgctctggaaaagtctaatgagagtagagcagtgaagaaagataaagggattagaagatggcaggctcctctcctccgactggcacctatttgttgaactgtgatgctgtgctgtgtaacgatcaaaagggaagtggaatggctgctgttatcaggaatgatacgggtcgtttgatagctgctgaagcttgcttttagaccgcctgtgtttcagttatgctggctgagtgtttggctatcagattaggattgaatctggttcagcgaatgaattctagacctttttttgttaactttgatagccaaactgctattaatcagttgctgtcagacagagttcctcgggtagattggggggtgcctttgttggaaattttctctactaatcttttagatgggtgtgttggtataaagtttgttaatagagattgtaataaggttgctcactctttagctaagtgggttattactgaaagatgtaattttttttagtcagaggtgttaccctcttgctgctgcctttttaaatgtagagaagcctgaccatttgtagttcttttgtttgctgaataaagtattttgctttcaaaaaaaaaaaaaaaaatcatttatttaaaaaatatgtattgaaataaaaaattaatataattaaagatacaatgagcgcatttataaatttttttgggtgcaaataagctttttcttttttcctcagctccggttcgtactttaaccattctgcgcacctaagtccgtcatctcattcgatcaattgaaccccaaaactcacctcttctctatctctcctagtttttctccctacgattcaaaaaccctaaggagcttctctgtgatccatccatggcggacgaagccgcgacatcgcatcagccgtcgtcgtcgcctttaggaaactccgtgatccctatagtgaacaagcttcaggatatcttcgctcagcttgggagccaatccagcatccagctcccccaggttgctgttgtcggaagccaaagtagtggaaagtcgagcgttctcgaggctcttgttggccgggactttcttcccagggggtctgatatatgtacgcgccgacctctcgtgcttcagcttctgcagacaaagaagaatgctgatggaaccgatgacgagtatggggagttccttcacttgcctgggagacgttttcacgatttctctgaaattcggagggaaattcaggtttggaatcgttttttttttcttgaagcagtgtttattcttgtgtagaaatgtttttagagtttctctgatggaaagacatgttctttggggattaaagataatgtcatcgtgatagttacttaatctgcatttgacatttgtactagtacttcattacatattcaagtagagtttcatttgcatagtttatttacatattcattgataaatgttttgtttgatatgtcgaacaaccatagcctagtcaagctttttatttatttataagtgcaacggcagtagggtgtcacttttctgggcgtctctgcgaatgaggaagaaaaaaaacaaacagacatacgtgtaactgaattttcaaacctgcttacaaaaaatggtgcccttctatagaattttaatgtatatatattatttatatatatgctttgtttctcatctaccattttttattgaattttacgaccatatttgtctataataataatcactactaaaaacgatatgcttaccttaaaaaaaaaagcttctaacaaataacacctattgtaacaaactgctggtcatttgataagtcgttcacaatgcaaggattcatttattgtaattttttcaagtaatttgcttttgaaaatttgctttgtcatggcctgttgatggccttggtattaaactttgaaatgttccttataatttatatagaaatgattatccataaagttgaagtgtaactgtgggatatcaataccctgaaactggaagtattttataagtaataacttccttagcttgtaaatttggagagaaagaagaaaaagctgaggaaaaagatgaaacttttacttctttgattcggcaatcagtcaaaccctcatcttttatcaaagtaaaactacagtgctaccaacttcagcattcctggtctttgatttctatctgagtgactttctgatttatacaacggtttagtgatcttattgtcatcataatataagtgtctcaatggttggcttaccttttttttttcttcatgtatgaacatgaatttttgggtacaggctgagacagatagggaagcaggaggaaacaaaggtgtatcagacaaacagattcgcctgaaaatattttcgccgaatgttcttgatattacactggtggatctgcctggtataacaaaggttcctgttggtgaccagccgactgacattgaagcacgaatcagaacaatgattatgtcttatatcaaaattgatacctgtttaattttagctgtgacacctgcaaattcagatttggcaaattcagatgctcttcaggttgctggaatggctgaccctgatggtaagtgttgatttaaatgacagaattgtagatggatatttgatgatagctatctcattattattattattttgcctttttcttttggcaggtttgagaaccataggagtaatcacaaaggtgtgtgttttcacgtatttccttttcaaattgtaatgtgctcttaatgtttggaaactataaaggttctgactttctttttttctttcctttttgatgacagttggacatcatggacagaggtactgatgccaggaatctgttgctgggaaaagtgatacccctaaaacttggttatgtaggggttgtgaatcgcagtcaggaggtaatctttatcttcattggaaatcggaacaaaaaagagttcgattttttttattgttaggaagacttttgctgatctttcttcctttctctctgaggttttgaatcccatacattttattaatgtatcttgctacttattaattgcaaagttgctattatattagtagctattaagttgttaagatttgaattgagttcttaaatttactttttaaaacaggatattttgcttaacaggagtattaaggatgcacttgtagctgaagaaaagtttttccgcagccgtcctgtatggttatacctataattttctgaaattatgataatgtctttgcataaatattttgaaaagtctcacatatggtattttatatcgctcttatgcaggtatataatggtctagctgatcgttgtggtgtccctcagttggcaaagaagttgaaccaggtagaagatcgtggcagctgctagtcattgttaagtcttgtggaacaactaaattattagtagcatatatggcctgccgctgctgttgtttcaggagtttatattaacaaaacaattccattatttatatttaattataagcatgaccttgattgataacttattttcataatcatgaaccagccttattttctagattttttagttcctttgccgataccattctcatactctaaactagcttcataatttgtttgcagatcctagtgcaacatattaagaaagtactccctgaactcaagtcacgcatcagctctgcgctggttgcagttgccaaagaacatgccagctatggagaaatcacagaatctagagtatgtcgttgagatctttgcatgatccaccatattcagttttacctctgtgatttagggtgctgtgtcttgatttggtattatgtggttgtagtagcttcagtttttgttgctttacttgcttgttttcatttttgtcttctacttctacaagttggaattttttttttttttaaagtttttattatttaactgatctaaagagatgtaattatttgcttatattttatttatctctgtattgttgttgataggctgaaaagagatttgattatttgctttatattgcacttatcagtttattgttgttgataggctggtcagggagctcttctcctgaacattctttcaaagtattctgaaggtaggttgactttaattacttattcttacttttagctgcctaatgagtcctgtatcttattcacgactctgtattgtctgctctccgtcttaagttcatgaatgatgtctcattctttcctgttgactacagcattttcttcaatggtggaaggtaaaaatgaggaaatgtcaacatctgagctgtcaggtggagcaagaattcattatatttttcagtcaatatttgttagaagtttagaggttagtatactctacaattcctgcacaattatactgtttgttgaattgattgcattctattggattttatttccattattgtatggtgcagttcatcatacagggtttctagaacaattttttgtatacagtatttattttactagatattatttaaacaacttttaaacgtaatcagaggttccaacatggagctttcatttgtgggctttcagcagaataactaatgctaggacctagttacctttgcttataatacatgtgctttacagaacaaaacaactctaggattctggtttttaatttgttgggtgtataaaactgatgtgcaaatgacaaattttcttgacatgatttgcccttttttgcaggaggtggatccatgtgaggatttgactgatgatgacattcggactgccattcaaaatgcaactggccccaaatctgcattgtttgtaccagaagtatgtcttctttttgtccctcttctgtttgtacttctttagtaatttaaaatctcttttattttctttgccttcctctaaattaagatattagtcgggttttgaaaattttgttaatgttgccttcttctaggttccttttgaagtactcattaggaggcaaattgctcgtttattagatccaagccttcagtgtgccaggttcatatttgatgagttgatgaaggttatctactcccacccaaatgtctctgtagtctgtacttctgtacatctttggtttgactctcaactaacaatcttttttccagattagtcatcgttgcttagtaaatgagttgcaacgattccctattttgagaaagcacatggatgaagttataggtaactttttgcgagaaggcctagagccttcagagtcaatgattggacacataattgagatggaggtatgtttttattagttttatgcgacataaacatattttgaattgtttgactgcatgcctgttgggtgcatgctaatggtacatatatatataaattaagcattaaatttggattcttttgaaaagggaaggtaaaatataatccttgttggccttctaatggcaattgtatcatttactaactcctactatttcagacaggattggtcatctttcatttttattatggggttgcttgtattatgtctaccatactgcaagacctttgtcatagtccatctttatagttgcagctgctatagtatcttagttattggtttctagtaacttaaaactttgttgtttttagtgaaaaaaacctgtttttgtgactgcaataaatttttcacctgtataagtatgggattttgagaatattatatttaaaatctactgcaaatgttttagtgaatagtgtcaattagtttatatggctttccttatgttttgtacagtctttggcttgacctgacctttttgttatgattgaattgtgtgttcgttttgcaattagtttgttatgatcttctttcagtttttcttatgggttattagcttcacaattatagtattaaaagagttacatttgtgatattagtcaaccttctttgtaagggatctgatgctatcccctagatactcttaaagttttgatattaatgctgtttgatgttgtacggcttttagaaaatttatgcattccattctcatccataccgctaaaaatttggctgttgatgctattagtaactaatttgcagatggactacataaatacttcacatccaaactttattggtgggagtaaggccgttgaggttgcctcacaacaagtcaagtcctctcgggtaacactgcctgttggtaggccgaaggtatatgcatcccgtattcatagtagttatgagcaatttgtgtttgcatgtacagttttttagagtttttctacctcttcatgcatttttcatcaatcaggatggtgtggaacctgataaggcaccggcatctgaaagaactctgaaatctcgagcaattcttgccagacaagcaaacgggattgtgtctgatcaggtagttttttctgttggtagacagaattgtagtatctctctccccaattagcatgatacatatctcaagttggttatcagattaatttgctattagtctcccctaagtcttatttatgttttattctatttggatggcctaacagggtgttcgaccagcacctgatagtgaaaaagttgcagccggtaagattttacattatgatttggtattttttttttttaaatgtatgtatattatcctttacacagttgaagtagagaagtatatgattttagtttctttttgggttaatatatggatagtctattttttgataattacaaaaatatttctttgattcgaatgagtatgaaatgaaaagtttagaaacaaattttaggaaatattaaaattttgttaaaagtaacttgaaacggtgtcttttgttgttcttatcaaaggtctttctttgagacacttattttcattagaagagttttgcatataaatcactttttaaaataagtcacttaaaacttaaaagtaacttttaggcgggaatgttaaatgctctacattgtgtcaagcagcagtatagtgtcaacaattgttgtacaaaagaatttctctaaatttcttttttattttttatcaacgatttaccgaagatgtagtattatatgttgataaatgtcaaatgggatattttttagtggctgttactttgtttacctgacatgtttctgtaattagaatatattaaaacagtgttggtagtcttgtaatggatatttatccttgctctctatggatttcttttttggggttttttctttaatctatatttttttatgttttatttacagttttactacctaaattttttatttatagttttacgaagctaatttttcaaaattacaaaaatacgactttctcagcaaaaaataaaaagcgtaagaaaacaactaaaaaaacgagaaatcaactcacaactataaataaactataaaataaccaaaaaagaatatcgaacagtttattgtttttactgaagaatgtatttttgtaaataaaaaagttctaaccgtaaaaataaaaatttgtccgtgttaacgtatttttgtgattttttaatctttggtgtattatgtaaaaatttctttcttttttattgtataggcagttttgtctcatctttcgtttttgcataaattgtacatcagtgacactgggatcgtagtagactagtagtatctgatgtttctattgatatttcaggaaatgctagcagttcaacttggggtatttcatccatttttggtggaggtgaaagccgtagtgcacttgttagagagaacacaacaaataaaccattcaatgagcctattcacaacattgagcaagctgtatcaatgatccacctaagagaggtattgtcattagctttcaatttgtctacactaatgttcttttataatttttttttctttctttctctattaacgttaatttcatcttctttttccctgttaagcccccaaccgtcttgaggccttcagaaacccattctgagcaggagagtatagaaataacagtcacgaaactgctgttgaggtcgtactatgacatcgttaggaagaatgttgaagactttgtacctaaagcaatcatgcatttcctggtaacattatatttttatgcattttcgcaatgcgtctagatagagctatttgatttccttttttgtcaatcatatgacttggattccaatcagcttttaatgtgtagaagtttttgccatgtatcttgatagtgatatttgttttgcttaaatccttcaagcattcttatgcaaccttgtgcttcttgctgtatccataattttagatccatgcttgcatatgcattggattcgagtaattattgactttaaaaaatgctgtttgtatcaaactattttggacattgtagtttcatttcttgaatattttcaacatatttatgttgcattttttatgtgtataattcacgacttattttattctatcgtgtgggtgtgtgttgtagtctcaacaactgtcttcacaatggttgcatacaataaagttgcctgaattccatacatccctaatattgactttcttgatttttatatctctaggtaaaccatacaaagcgtgagctgcacaatgtcttcattaggaagctttacaggtaccattttacatttaaaataagaaagcaatatttcaaatcttactatattttaaagaaactactcttaacacgtctttaacgttaatttgtgctgttttcgacttttaattgttttttatcctgaacagagagaatctgtttgaagagatgttgcgggaacctgatgaagtagcatcgaagagaaagcgcaccagggatacactccgggctcttcagcaagcatttcgggtagttttctgatctaattatatctacagttccagtgtattaggaatttaattacaatatctatttatatactgctttgcatctatcatcaactctttgatcacagctaccttgaatgttctatattcaatctgtggcatgccatattttatctaccttttttgtctatttttttctcaactattttcaatgtttctacagctttttaactgtttctttttctttagcatttttgttttggccagaattctgacttggtctgtacactgatgttctgtctcactgaattcccatcatagcatgatattaacgttttacgtttttgggcagacattggatgagttgcctttggaagcggaaacagttgagaagggttacagcttgggtggtggtgatacaacaggtttgccaaggagtggactgcccacatcatcaatgttttctgctgctagcagttctaatgattcttatacagcatctcctaaacacacaaagtctagaaaatcatcacactctggggagcttcactctcccttttatggtgttgcagattccaacggtggtggacactctaccatgcaaggtctctacccaactgttgagccatgattgtttagttggaactagaagcttacatggaaatcattatgcattacatttattcaattgctgtttgcagcttagaaggcaattggggtcccgccattcccagtgttttgttggggtattcaaattttcttccaactagatttgtgcgacccatttatttgggtggtttattttttgatccttttcttttacgctattattattattttcatataatataggcttatttatatttttcactaggctccgagaagaataacagagcagatcccccaattgcgcttttttttttttacctcttccaattgggcatctcaaaaatctttttcggatatattttcttcacatttttttggggtcgccccttgattgtggaggggtctccacggatggtgcttgggctttgccataatgcaggctgcaaagtacacaagtgtatctttattgattatattcagcagccaagtgttatcttcaaaatacaccttgtgtcataagactttacgattgataaaacaaccacgaaggccatatttggtggtgagttagttgttttatttcattctgaaaggtccgttgtttttcggatttggttgttacattatttatgaatttacaacttcatttagattgtgttgtgtttggaaagtttccctataattgaaattggagtaacattggaagtgagtatattttcggagtgtaattattgagtttaatatgtttgtttggttatgtaatagcaaaataattatgtaattggatctatcaaaaaaaaaaaataaaattatgtagttggatgtaactgaaatgtctcaatactcttacttttttgtgacccctgagaatgagtattactaagtactgtaattattgaatgtagtaaacttctttcaaagtaaaattagagctagtaattatacaatttagattatattatattttaaaatacaggtgatgattagtaaaattctcccaacaatacttgttgttcacaagattgattgcacgaccctcttcccaactcagtcattccagatgagaaacttgttgaatttaggctttttattctcgaatatcgatctagaaaatttgtccaacaaggtccgacgttttcttaaagtgagattgatttagttgactctgaaagtgtgttagtatttgacaatctttgtgaagcagttagctcggacggcac

SEQ ID NO: 15885 - DNA, 4036 bp, Cannabis sativa
  modified_base (321)..(324): a, c, t, g, unknown or other
tgtatacaattttttgataagaagagtgtatacaatttaagagatgaaaaaaatgatgaggtaacaaaaaagcttataggtggttgttttaattgatcatgatgacaagttagggctatattaggtttaggggtcccccagagaaaaggatgggctattaaggagggaccagagaagaaaagagaaggggctctttattgagagttagcttactcactcatacttggttgggaccgatcaacataaaagaaatgtacgaagtagttgttggacaatcagtctcaagccacaggctccattattattgttattattattatnnnnattattattattattattcttattgaaatactaagaggaacttggacaggtgtaattaaatattgtattttatataatttaatgtaataatttaaagtatggttagccaattattaaatgatacattaagaatgtactaaatattattagtaccaatactaatattattattattattttattaggaatatgattttgtctctttcacggattgtaatccgtgatgtacgggagccgtcagatgagggagttatttgattagacgactgagattgatctatgtgtaattaaggttaaaaagtagaaatgtaccctgatactcatttaatgtactctaaaacccatctaatgtaccacgaaatacatttcgtgaaagtatatcacggcacaaaatcatatccgtattttttattattattattattcgttgaatagtgatatatctgacaacattcactgccttaagtgaattattgttctgttttacacaatattaactcatgcactttttttactccaatcctcaaagttcaaccccctttgtcctatacagatacaaatacaaataccataactaatgattaatggattacttttagtctctttaagatgaaagatcactcttaagtataaaagagtgtaaaaattctttgatataaattctaaattagtaataaaataaataaaggacataatttgtcaataaaaaaaaattactgcatatattattttttttaattttttttttataaatttacgatttgagtttttaaagtagtttctccagtagtttctatgtgactatacgattttttgttgcgattttaattgcagcgttagttgcaatagatgtttctacgtagaattctgtaaaaatataaaaaaaaattattttaaaatataaaaatgaaaaaactaaaaaaaaaaaatagtatcgatatagaaaataaaatattttaaaataaattaagcatacatcaatatattaatttagaaaaaatgaggcaatgagatagaaaaataaaaggtaaatactgtttagatctcaagaaacactatacttattctcctcttgtctccttttttttttttccttattcgaatcttgacaatgagagagatagaaagagagtgggggcaatcatactaagttctggtaaaaattttgtagtgtctttcttttctctctcaattttcctacatatgtttgttatttcaatgaaatttttattattaaggaaaaatcatactagttacctagttttacaaatgagactactttgaaaccaagtgaatatttcaaaagggtacagactttattttaatcaaattccatcaagtctacaattttttagagtataatacaaacaacaaatatgctctattgtataattttagaataattaataattttgcctttgaacttttaataatattgattttgtcttttaaaatatacggcttgttaagaattctgttgaacttttacatttatagaaatttagttcttcagttaagttccattttattattctgtttaaatactgacgtgtttttgtaaattaacaactttgtccctaaactttgacaactattgtacacctaaaaataaaaataagaacgattcaacattattattaataaattttaaaaaattaatttagatcttaataaaaatcatttttaataattaagaaaataaaaaaaataaataattaaacgatttaaaacattatttattttctattaaaaaaaatatttacatattaaaaatttaatttttgttaaaactatattttacgtgaacaaacttgagttcattttattttttctcaaaaactatagattttttaagtaaacataatattttttaatttcttttctaacttttttttttcaaaattaattttatatttttattaaattcttaattatttttctttatttgttaaaagacgtgtttataaataaaataaaatttgaaaatattttttttaagaataatttatattttttaagtaaaattaatattttttatttaatttaatatttttatcaggtctttatatattttttactattttttttcagaattaataaaatagtataatttttaaaattatttttttttaataaaatgggttaaaattttgtattggtcaaagtttaaggggtaactaatttttaacgataaaagaaatggaacctaaccgaaggggcaaaaatatgtaactgttatattttagggagaattttttacaagtcatatattttaagagccaaaatcagatagtgccgaaagttcagggagcaaaaatattaattattcataattttattcctctctgaattccatgcgaaagtagcattgatggaacttaataagaagtgaacctgagtcagattgatcactaatgtttactgatgtttaattcattaccaaccatcagtgatgaattcaaagtactccaagtcttcttgcccatttgtcagtcttaactctaatccaaataattaagggagaaaaaatgggtcaaactcagtcaagtcagatagatgttagaatttgtagtgaccaaatgagttaagactaatagaaagtaaactataaaaatttcaattggtgagcagtaacacacatttcattttcaccaaagagaattgagtgacaaagacaagagtattaaattaaacaaactgaaaaagcaaattacagatggaaacttgatactgaaactattgctttttttgtttttttttttccttccttgcaaagaacatacccaacaaagattcaaatccccaaaaaacaagtgtactcattgatttccttttcacttttagataccattcaagatgtgttaagtcacttttgtcccctggtttgttttaccacatcgttcaaatccccacaaatctcagacaagccaacccactttttccgtttttgctcaattgtgcaaccaagattcctcttttttatttttttttaggttttagctacatacatgaagtattcccactcattaagcatgctctctctcattaaataaatattatataatatataataaaataacaatataaaattttcaacggctaaaaagaaaaagtgaaagtgttcaatgtgtcttctcaaacaatccatcaattcctccataggggatttcaaccattcttgcaagactatatacaatgattaaaagattaaagaacaagatttctatattcataaattgtattgtatctatatctgattttcactaaaggaatgtacattttttttctccctgtatataattgaatatcaaacagctaatgctatggtgctttaaaacttgcatgcctgcttcaaaattgtgtgatgacgtctatcgatgaatctttgcatagttaggaaatctcctcctgtgctcgcatcatgctgtaatcataaatgtacaattgtttgagataaaaaattatgtattcatcaagtcacagagttgatatgtgaaattgataagattacttggaggaaaaaagcaaggcatgtaattcaagtaatctactatgattcatgattcatcaatagtaggaattaaatgggtcaatcgtccatacctttagtaatcttgatctgtataagctctcttatgagttgacgacagatggggcatttattcgatcgaactgtcaatgcttgcgcacattcactgcacatgcactgtaa

SEQ ID NO: 15886 - DNA, 2266 bp, Cannabis sativa
taaaaaataattttatgtataaataaataaattatggcatatcatgtcatgatagattttcaatataaattttgatgatgtatagtattttcctaaataaatttatgtataggtgcgacccatatgatccatcaggattcaaggaatgggcaatgagaggggggtgtccagcagttcctggtatgctttcattgtttaacgaactcttaaacatgggattcaagatattccttataacaggcagagatgaagaaactctcgcccacccaaccattcataatttgcacaatcaaggattttacaattatcaaaagctaatcatgaggtaattaataaccatataattaataaattaatttaatgtatagttttttccattttcataatcatcacaagtaaatattatatgagtcacacatttacttatcattaacattgactcacattacacttatataataaaatttcttcatctttttccaaaatttccgctttctttattgaaatatgtcggaataaaatatatgacgattaactttatctcatatgttgctatcagctgatggtggactttacaattaacccaaaatatgttatgtgacaacgtttattataaggtttgttggtgcgacgaagttgtcgtgtttgttatgatggtttaattgactaaaacaacctatacatgctcttcttcaatatgacgatcgactttttctttttgttcatgtcatttctaaatacaaaataagtgcgtataaacataatattttttcgcatatataggtgtctcttcgtaatttaaagccatgatcgaggatagttagtatgaaaaatttacatagaaatacaagtatgtatacgataattaatataattaatgagaaaatcaagtcccaaaatggtgccagatataagagaggaagtgcgtatagattcgcctacacgcatcgcaaacccaattaagttgttctatataaatactgctagacctgcgacctgtcctagtcaacatccatgcaaagggaatttgtattttttttaattcattttactaagtgggtttggtaggagagggcaagaggcgctgaaattttaagctgagtggaaaaaccaccaatattcttaccaaattaatattttaaagttacaaggaaaatataggaaagtgacctctcaataaccatgtcattccaacataaataaatactgaatttttgggtaaaactttttaaactctaattttgttttggtctctacattttggtgatccattttagtctattaagtatgatcaagtatcaaggtggactgcaactgtgtataaaagtagacacgtagcaaatttttattaattcacttaatattaataatttaaatataaaaacataattacgtttccttttcctcttcttctccttttctgcttctgctttcgcttcttcaattctgcgttaccaccaccaccactgcaaataccacaaatcacaaaccacaattgatttcgaaactaaacccctaaacaaaaataaaaacccacaatcgattttgatctgaaatcacaagtaccacaaacccaaatatgaaattaatctagaaaaagaaaaacaaataaacacccggctcggcgtcaggattcgtgaggggggaggaaccttcgaattacgtgagctctcaggttgtctacctgagatggtagtggttgatgatgtgataacgagagaacttagaaggagaaaaggaagttgggtttcgggttcagggttttcgagattttgggtttcaagaaaaggactagaggtcaatctgagttgataggggagggtcgataagttccttcctagtcagttgccaacaccacaagcggcggcgggggggcgggaggtgttaggcttttgaggaagaagaaacaaaaaaaaaaaaagtaaaagaaaaagaaaaaggatgaagaaaaaagagaaaagagaaaaaacaattattttttaaattgtaaaattttttaaattattttttataatatttaaattattaatattagatagactaaaatatatatttgtcatgtacacttatgacagttcacttagcacttaatagactaaagtggatgaaaaagtagagataaaaatgaaagcaaagtttaaggagttttacccctaaacattcaagaatgggggttgatcgtaccaaactcaaaagtttaaaaaatttagctgtaaattacccttatattataggagaggagtggtatccaacaccactatatttt

SEQ ID NO: 15887 - DNA, 3847 bp, Cannabis sativa
  modified_base (689)..(690): a, c, t, g, unknown or other
  modified_base (1873)..(1880): a, c, t, g, unknown or other
gacaaaatcgtgtccctatatttacattatatttgacccactaattataatttatgttccaagatgtaaataaaaaataaaaaataaaataattaattatatagaatatacaaaaattattacatttttttattatttaaataatgttaatatagtaaataaaaaattgtataatttactaatttagtaaaagtcaataagttttaataattagtattattatagtaagtaaaaaaaatattatttattgtgggttaaatttgatacaataatatgtagggtaaattgcgacataaatacctaatgtttcaaattttatacactttaaatacctaatgtttatttttggaggcaaaaaaaacctaatgttacaatttttttacaccgttactattgtttctgttatctcataaatatagacacgtggagggttcagatgcattacatttattttattttattttaaaacttaatattcttaatatcagaaactaaatgatacttgctccaaaaaaaaaaaaaaaccagttctcaatttttacatgatattggaactttaattcgataatcatgttccatatactgcactggttaactcagctatggtaatttagtattgtatgtctttttttttttaaacaagaagtatttagtttttgatattcagaatattaaattttaaaataaannaaataaatgtaatgcatttgagtcattcacgtgtttatatttatgataagtcaacggaagtggtagtaacggtgtaagataattgtaatattaggtatgtttgcctccaaaaataaacattaagtatttaagtgtataaaatctgaaacattaagtatttataccgtaatttaccctattatgtattatattaaatttgtcacaatttttcaatttgacataactttttaacatgtatattaaatttaagacaacttttaattactattgaagtagtattttttcatgctaaaatataatgatatataccatcttcttaacatcattggagatgctctaataatgtttgccattccagtcaactttagatctcagtccaaattaataatgtagagtatagaaagagatagtggactagtattgatataatgtagcttaaattaatttccattatttttttaagtattggcaaagaaaaaataataatagtcgcgtggtactcgaacgaccaacatacaactgattattttatcaatgccgttgctaaaatgtagagaataattttagtcaacgagatagttaattttaattttgaccaaatataatattaattttttattttaattatgtaatctattattttatttaagaaatttatcatattacgatattaatgagttttaattgtgaatttttttaatatttgtttaatttcgatttactttttttttaatggaaatagaacatattatgaaagaaaattgtctatcagatctaaacatagtaagaataatacttaaaaactcaacgtggaaacgaaccggaatagttattaaattattaataagtctataattttactttatactactaaaaaataactttttacttccgttgtaaaatgatacataaatattttgtgacggttgtcactataatattttttttcttttagtcacaaccagaaccggccttgaaattcagtgagctaaaattatttttgggcccttatttagaaaaaaaatggtatttttcaaaatcagcaaaaaaattgtgtaattttaaaaggagaatttattttttgggccctggactaagtgggccataggcacaggcctagccggcctatgcccagggtcggccctggtcacaacaaagcttatgactaaaagtaaaaaagttnnnnnnnnttataaatcatcattcttatgttgtgactaaaaaatttataactaaaagtattaatcacaaaaattatagtttattgtgactaaatgtgtttttagtcacaatagttattgttactaatagtaaattagtaacaacttgtagctaaatactatgttttagtcacaaaaaatttatgttgtgactagaaaattattactaaaagtagctatttttcgtagtgtgtctaaatcgacgtaataacggcagacgcaaatagtcaagttatttgcttcatttctaaaccgacgcaaactgttttttacttcggttgagaactgaaacaaaaagtatgatctattagcgccagttcttaaatgaagcaagaaacttagcttcgaattgtaaccgaagctaatttgattattgtaaactttttaaggtaaaatagaaggaatactcatgggcataatatgttgaatcaatatatgatgatcatgagacttcaacccgcctaaaataaattttttttgtatctaccaaagccaagacatttgaggaatacccttcaggtactttcacttgagatgaactacagaaagatcatttttcttccttagttagggcataccaggccagaggtataaaagttcgttcaccacccacttttggatgtaaattttctctaatccccaacttttttagatctagacaggatttaattccattcttactccgaccaagaatactgaacaatgtattaatcaagttatcagagtcatttctctcaatatgcatcacatctaagttatgacgtaaaaccaaatgctcccaatactcaagctcaaaaaatattgacttattcttccacgtcccatgaggttcatttgttacatctttacttcctccttttcgttactttgagtttgtttttttttttactttccaagcttgaactaaactttattcaatttttctaccaattgttccccacttagaggtgggggagacatttcaaattcttacttaccattaaatacctttttccaagtccaaaatatattttttggtggcaaaaactttcagtgcccatgtaaaaaaaacttctagagtgatttaaatactgagaacatgttttctatcttcacagataggacatgccttatatcctttcacactatattcataaatattcacgaaagtaggaaaattattaatagtccacaataatatggctctaagattgaatgaactattcctatgagcatgatatgcatcaacaccgtcataccatagtttacttagatcatcaataagaggatctaagtatagatcaatatcaataccaggctctgaagggcctgatatcaacagtgtcaacattgtgaacttcctcttcatcaccagccaaggcagcaaattatacatcacaagtaaaactagccagcaactatacttactgctaagggaagtatgtggattgataccgtctgccaaagaccaagatggatatttctaggttcattggcaaagtcgagccatctcgcatcaatagatttccatgcgggtgagtcagtaggatgtctcatcttgccatctttcactctatcgctggcatgccagattaaattttcggcatgatccgtatttcaaaagaaccgaaccaaacgaggtatgggcggtaggtaccacaatacttttgctggaatacccttctttacctcattagaaatttttcttcttttgccacatagactcaccgcatgttggacaagatcgaggtccacaaatttctttcgatataggatacaatcattaggacatgcatgcatattctcacactgcaagcctaacgaacacaatatcttttttgcctcatagaaagacaaaggcacctcattaccttcaggcaataattttcctaagaaagctagtaaatttgtcaaactcttatcactccatccgtgttttggttttaaattgtatagtc

SEQ ID NO: 15888 - DNA, 8065 bp, Cannabis sativa
  modified_base (7323)..(7323): a, c, t, g, unknown or other
cttattgaattataactttcattctctttattcaatttcattttctaactgtgaagatgagtatatgagaactttttatcttaggtaacattaatctagcacaatagttcagataaaaaaaaaataaaaaatataagtaacagtaagtaataattagttatgggaatatttatatagaatcttagtaatatttgtgtatttcatgccaataattaaatttttggtagcttaaagttattataataaactcatacttcaactataactgtgacccaagtgctgagattcaagaacagatttaaaaaataattcacttcattcaatcaaaagagcataagttcagtatatatgcagtgcagatgagcataacaaccatctcaaagtatagttggcaataactaaaagataactaactctaatagaaattctaactaactacaattgtcctaacacctcccctcaaacttagggtagctaataaagctaagctaagttggtctcttagaaaagtaaaatgtgtgcaagagaaagctttagtcaaatatcagctaattgatcacaagcaggggtatgtttaaccaccagttgcttgttcaagaccatttccaaccctcacaaaatacaagtcaagcttaataagcttggtacgagaatgctgaatagggttggtgaacatgagcactgtactccagttgtcacaccagacaattggagtgtactgaagcttgagcccaatcttagaaaggagagcttgaatccaggacaactctacagtggtgtgagctaaacttctatattatgcttttgtacttgacctagagatggtcctttgctttttagatgcccaagaaataagattagatcctaaaaatatgcagaagcctaaagtactcttcctgttatcagaatcagatgcccaatcagcatcatagaaccttgtgagagtaagttgaggagctggtctgataagcaagccataatcaagagtactagtgagatacctcaagattttcttaactattttctaatgatcttgaagaggagaatgcataaattgagataccttattaacaacataagatatctctattctagtgacagtagtatattatagagctcctactgtgctcctgtaaaagtgaggatcttggacaacatcaccctcttcactagacaattttgcaccttctggaattggagtgggaaagggatcatcatcaatcattttaggttttttaagaggatcacccaattatctaatctgacacagatgaagaccttgagtggtgtactgaacttgaatgccaagaaagtatgagagagaccctagatctttaagagcaaacatggcattcagttgttgagtaagatgggaaacagttggagaagaactccatgtgagaaaaatatcatccacatatacaagggcataagtagtatgatcaacaataaccctaagaaataaggaagtatctaactctggacactgtaaaccaaaggacagaagggcacccctgagtttatcaaactaggccttgggagtctatttcaaaccataaatttctttattcagcttgcagaccaagtgtggagaatctttgtgaacaaaccctggtggttgagccataaacacttcgtcttgaggctctccattaaggaaagcatattaacatcaagctgcctaatacactagttatgagtgtgactacaatgctgagaataatcttgatggtttgaggcttcacaacagggctagatgtctatgtaaaatcaaattcatattgttgcaaaaaccctttagcaataagtttagctttatacttagcaatagtaccatcaaaattatatttaaccttgtaaacccacttacaaccaatggttgtcctcccttctggtgatggaacaagcacccaagtcttgtttctgatgagagcatcaatctcatagttcatagcatttaaccatctagcatatttcatatcagctatataggaagtaagttcaattgtggcaagaagaaccatggccttagaaatgtcagccttggccctagttatcatattatgggcattagcaggaataaaaaatggtgcagaatgagctattgttgttgtgatggatgcagaagaaagtgcatcagctgtggatgatgttgcagtaggtgatgctactagtggtgttgcaggagactcatcagcaagcgctggtgatgttgtaggttgtagctgaagcaacagttgcaggtgctgaaggaggctcaacaacagctggggtaaccatggatgatggaacatgcataagaatagcaacagtggaggcttcagtacctgaatcagtgtgattggaaaataaggaagctgaggaagagcttggagaattggtggagggaacatgattgatatctggaacgaaaattggaatgagagaatcggtagtaactaggggtagagaagatttagagatggacatctgagaaaccagatcagtaaagggaaaagaatattcattaaacaaaacatccctagaaatgtaaattctgccaatggatgagaaagacttataacctttgtgtttcaagctataccccgaaaatgtgcacttgagggatctaaacactagtttgtttttattgtagggtttgatattcggtaacaggcacacccaaataccttaagttgtctatagtcaggatccctattgaacaacctttttaaaggtgtttaattgtcaattacagaggagggtagtatattaataatgtaggcaacaattctaactccttcatcccaaaaagacaaaggtaaagaagcatgtgcaagaaaagtaagtgcagtttcaaccaagtgtctatgttttctctcggcaacaccattttattggtgtgttgtgggacaagacagtttgtgattaattctataagataataaatatttttcaaaagcttgatactcaccctccaatcagaatgaattactttaattgaagcttcaaattctttttctacttgaattttaaaattgataaaggtctgaatagcctcagatttagacttaagtacaaatacccaagtctacctagagtaagcatcaataaagtgaatataataattgtatccacttaatgagagagtaggagaaggcccccaacgattagtgtgtatgagttccagggatttggaataaataatattagaattaggaaagcagaatttgtgaattttgcttttacaacatgcctcgcaaaaatcagtatcatttttattataattcgaaatattacacaaacacattaattgtttaactattttggaagacggatgagctaacatgctatgccacaaagaaaatggggaaggtatagtacatgaagtggtttgaacattattgagagaacaaaacaacactaggattaaatgacttgagttgagcttaagagacgtgagtaaaattagactgtaattgagtaggctgaatgacatagatgccacgatcaagatgacctttcatgagagctgctttggagtcctgatccttgacaaaatagtggttaggatagaactcaaaataagcattattatcaaaagagaattatgagacactgatcagtcttttgtaatttgaaggacatgaagtatatggttaagtgtaagagattttaaagtaaactgagtgtaaaatactttcttaccaacactattaataggaagacatgcaccatcacccatataaatatgttcattactaaaatatggttctttgtgagtgaaatttgactcatcagcagtgcattgactagtcgccctagattcaggataccaagaggagttaataattgtatctgttgttgctatattggcaatgagatgatctagatttgtagcaccaaccccagaaaattctatgttgaaacattgatagcaacaagaagccaagtgaccaggtttagaacacagttgacacatgggatgagatccagattcagtcaatggagaattagagggagagccagaaaagcttcctcgaccaacactgggagaatatggagatggagttgaaccacctcgtggaggaatggcataaggattctaagtaccacaaccacgaccaaaaccaaaggacatagcctgtgaattgatacttgatcgagaatcatttgatgaaggatagggtgatttgttgtgaggattgcaattcatagcaatattagctgaatcaagatagcgataataactatccatgcatgtgatgttcttgagatagaaggagagattcatttttagctactgtatacgattgattgtgggaattagcagagatgataaatgtgtcatactcagagggaagaccattgaagatagatgaaatgtgttctttagtagtgacgcagtgaccaatagaaccaagtcgatccacaactatcttgatccaaagaaggtgatcattgatatagagctcttttattgatattttgaaattgattagtgaattgatcgatcttagcagatatttgagtggagaagtataccacaagtttatgccaaacttgagcagatgtgtcactaccaacaacatgagtgagaactccttcagtcatggaggagagaagccaagaatataacaactgatcttattgtccccactgagtaaatagaggattaactaagtttatggtgccatcatgatcagaaagaaattattcaaggggagggacctgatttgagatgtaatcttgaagattgtgacctctaatgggaaagcacttgaggtcgccagatcaaaatattattgttgtcaagcttcatcgagatcttatgagagaagaaaacatgatgaaatataggagcttgagcagtaggagcattcacttacgccatggatgaagaagaacgaagagaagtagaagcaaagaacaatagagaaattatcataaaaaaaaaagctgttctgatacgatgttgagattcaagaacagatttagaaaatgattcacttcattcaatcaaaagagcacaaagctcaatatatatatgcagatgagtataaagacaactcaaaatatagttgacaataatctaaagataaataactctaatagaattgctaactaattacaattgtcctaacaatgaccaagcaaatataattgaatgaagatatttataacaatttgtaaagttcaaagggtatatatttgcaacaaaaatacacttaagaggcaaaattctactagagttatagttcaaaaagaaaaaaaatatattcttttcttaaaattataagagttttttaagaaaatgtaaaatttatacttttcaattaaaaatgggtaacccatgtaatttactcatgtttatcatcaaaagagttgagggtctcaataatattttacattgaattttgtccttgatatataataataatcccttgaagaaaaggagggaagcatgtgagttctgctctgttgtggttatctattgggatagccaaaccccacatgtgcttgttcagttcattgtcctaaaccaaaatcctcatcccaaacaatgaatttggagaatagttcaaaatcaggattatacctatttatttgaaaatgcagagaggcccacatgttgtaaaagtatatagtatcttagtttgacgtactaatcaataatcttagctagtatatataatataagtactgttgatgttgatgactacaaagtattaaggcaattgcttgtacaatgtaccagctgctatgaattttcttgaataaaaagaataccgttaataattaaccgttattgtttaagctaatccaaaattatccatcatatatgattagaccatcttcaaatttaaaaaattagtgaatataatttatatttagtacagttatatatttattattttatgcaaatttaatttatattatattttaatttgtgctaaatttaacacaatttttatcattgaccaaatttgatacacatcttacgttattattaaacaatgtgctgtaatatatgtgtcattgttatggaatgagcaaattgaatttgctaactattttctattatttgcctgagtcaactatagagtccatcatattctatctcatcactaaatggcaactattcatgttatgtatttttttaacaaggaaatgtaaatagtacttataacagtgacaatacctatattccttggtaaatttaatataatcacattatattgagtgaataatgaatgaaattcaaacactacatacaacaagaaaaatagagtttggaatagtactaatttataacaattaatgaaaatagtactatgctattgctagctaattataacgagtacataggagaataagtatagtagacgtacttggtgctagctaaaagagcctcacttaaatatatatatatatatatataaatgtatatatatttgtaattattattctaaggatatgaaggagcacaagctatgcaagcaagcaagagaatggccgatgaaacgccgtcgtcttcaatgttagagcaacttctcttgaacttgactacttttcctttgttacactgcatcaacttctgctgcagctgctgctgatcttgttgagctacttgtctcttcttcatggcttcttctactttagacaccattcttaattatattcttctttagctagctttattaagcttttaaattatgaaagatgactctataagtgatgagagagagaaagagatgaaaaagatgaaataattggaatggatcaatgtttgtgcatggaaaaaaccatacagacacttgctctttttatagccttagaaagggtaccaaaatccccttggtttccctctttttctttaataatttttatatataaaaagttgtgtatgctttataatctatgtgcatgtggggtaatactattaattaactactagctgggcctatgtatgggtcctatatctttttctttatgttttaacatttaatagtttgagtcactcatttaataaatcctccactatctattgcgggttgagggttccttctcattcttcaaacttcaatttgtattgttcatagaaaaatttttcatcaaggatataacaaaatccatatacatactgcattcatatttactactgttcatccaatctaatccatatgattttgcttatagtgcatcctatccacactaagtgtagatttcatattttggatccaatccaatccgcacaatagctcaaattcaatctaatctaatccgcaaaagtgcggattgaatcagttattttggattgattattttttaatattaaattanttaatatttatgaaaaaaaaaatattttttaacataattagcaacaaaatataacaaaattattgttattttatattaaataaataaaataataaataacacattcaaagaaaaaaaaattgtatgtataaaaaaatgtttaattttgttttaaactgtatgtagaaaataaaattatatataagaatggagtatgcatttgacctattaagttttgaaatataattgtattatatgcattagactttgaattactattttctttacattaaaatattaattgtatatataatttttttaatgtttttataaatatatgtggattagattggattggttaattttacatgtcaatcaacgtccagggccagccttgaaatttagtgggccataagaaaaaaattatttttgggcccttatttagaaaaaaagttacggtatttttcaaaattgatcagcaaaaaaattgtgtaattttaaaagatgaagatttttttgggcccctaaattaggtgggcctaggcacaagcctggcccgcctatgcccagggtcgggcctgtcaaaaatgggtcataaatcagttgttaacaacgctaaaagaaaacgcccagttatcgatgatgatgactccaatttcgcttcccccgtggctaaaggtggtcgttgtctagggaagaagaagtcgaaggtgtctttgcctgaaaaaaatttcaacttcgacggctagaagagaaagaagaa

SEQ ID NO: 15889 - DNA, 4483 bp, Cannabis sativa
ttacagtttattttccgcatttcatatcatttgtatatgctatattacatatactatattatagtctaacagtaatcaatcatgacaatacttttccttagattacaatgtatgtgttgagttttatgtattatataaaatctaattttaatttaatttgattataatcaaataaagtagagaaattatatttttactttatcaatcatttggttcatatttatatttacattattatatgtttaatatataaattctattaaattctaacatatagtgatgtcatcatattagaaaataattatgattatatgcttcaaacttatttattcttgagataaatccgtgcatcaaatttacactgacgtgataatcgacgatttggtctacttatactatgacaagtggtatgtcttttccaggatattggtaaatagacttgtatcgaatgtataaatttacattaaactgcaccgatattgaaagtaaaaaaaatattataaacttattgttaaagtcaatatcattggcagtacaaagtcaaggtaatgaagaattcgagaagcttcttgaatcatggcttggccaaatagcatgatgtcgttagtagaaagaatgtgagaaatcactaggccaccctcggaaatacagaaaccttgaattcgtttttctcttttcctcctcaaatatcatccgagaaaagatttctattgctagaatatataaaacaaaagttaagggatcttcttattggttatgtagtactaaatcaagtatgcaacagaaatattttagtaattatcactgtactgcactctagaatccatatgcatatagattaaatcagaaaaacaaaagatgaatggaaaaatatttaccttttgatgatctatcaagtgtcattgctatttttttcataagttgtttctagggaacagtgatgaaactcacacctcgatcttccagattaatcacagaacgtcggactccgtaaggggctgattgtgaccgttaatagtctttcagtctataaggagaaataacagttaagctgtgaaattccacattgtctgaataaattagtgtggtaattttgagactgtgtagatatatgattatacaattgagagggcttaaatcatgaattcttattttttattattattttattttttttaaaatggcattaaaatataggggagcaagtctcgttcttgtataatatttaatttttgaagtataaaaacgtagcttcggagtcgagagttgctctttgggtttagtagcagaggcaagttcaatcaagagtagaccatgctacttcgtcaatttcggaggtccatcgccgccgcccgcagtttctccgcggtcgtatcggcgccaaataaagtctcaaagactggagctgtcacaaaaaccaacaccagcggcggtggccgagacaccttgggtaaaaggcttctgagcctggtcttcccaaaacgcagtgctgtgattgctattagcaaatggaaagaggaaggtaactcagtccgaaaatacgagctcaatcgtgttgttcgcgagcttcgtaagctcaggcgatataaacatgccctcgaggtttcttcttcttctccctactctctttttcctttttcaacaaactggagacgtatattctgcattatgtggttgtcaatgttatctgcgatttcttcttggatgatgtatgaggttgtgcgatagattttcctctaatgtctcgtcagtattgtgtttgacaaaaatcccagctgaaaaacatgaaaatgaatatgtgttagacgattccgttttagagtgagattgtaagtttctcgttaagcatttaactagttagacgctctatacaatgtgtcttactattacctgtatgttgagggaattaagaatttcttgagattgaaatgtggaattttgactcttaggtgtttgtaaaccttcgatctaacatatagaactcaagtttattcagtatttcttgattttgatcatgtttaagcattatggtaatgctgcaagtaaacttgtttggtagattaagttttgtgtttcattggttttgaaccattgcatgaatattgcaaactctgctgatagtcccatgcgtttacagtttcaattttattgtaaaccagatatgtgaatggatgagagaacagaaagatatcaagttgcttgcgggtgattatgctgttcacttggacttgattgcaaaagttcgaggtatagatagtgcagagaaattttttgaggatctgcctgaaggaatgtcagaccactttacctgtacagctcttctccacacatatgtgaagaacaacttgtatgacaaagctgaggctcttatggaaagaatgtcagaatgcggtttactaaataatcctcttccttataaccacatgatgtctctttacatctcaaatgggcaactagagaaggttccaggaataattcaggagctaaaaaggaatactactccagatgttgttactcacaatctgtggcttactgtttgtgcttcacaaaatgatgttgaatctgcagaaaaaactcttcttgagttaaagaaggcaaagttagatcccgactgggtaacatatagtactttaaccaacttgtatatcaaaactgggttcactgaaaaagctgcatctactttgaaagagatggagaaaatggcaacccggaaaaatcgagttgcatattcatctctcctcactctgcatacgaatttgggagataaggagggtgttcaacgaacttggaaaaagatgaaatcattatttcgtaaaatgaatgatgccgagtataattgcatgatatcttctcttctaaaactcgaggagttgaaggaagctgaggatctctataccgagtggcgatcagtttctgggactggtgatgttagaatttcaaatttacttcttgcatcatacatcaacagaaaccaaatgggaatggctgaaacgttccacgatagaatggtcaaggaagggatatctccttgttacacaacttgggagcttctcacatggggttatttgaaaggaaaacacatgggaaaagtactagattactttgaaaaggctgtgactagtgtgaaaaaatgggatcatgatgaaaagttggttagagaagtattcaagatgattgaggaggaaggtaatgttgaaggagccgaacacctattggagattctaagaaacagtcattatgttagttcaggcatatataactcactcctaagaacttatgccaaagctggtaaaatgccactcttagttgaagaaaggatggagaaagacaatgttcagttggatgaagagactcgtaagctgataaagataactagcaaaatgtgtgtgagtgaggtatcgaacacttttcttaaacaataggtgcaatcaagggttttcaatttttataaactctgattttttttttttgaaatttataaactctgatttaagtggatgaatagtaaatttttgcattatacgttttatcaatttcagcacaccactaccagtctttacattatgcatttgtaactatgaacatctaacatctaattgaccattctagcattgataaatttgtcccgtatttgatgtgggatttatttggttaattatttttagagtactatcatcacttaactctattttttctattttacttttctacatatacattacacctacctcatattctttatatttttctatatcagttaatttataaataataatgatatacaaatattaatatgaaagataaataagaaaatatatataaaaaaaaatatatagagaagtttaaaaaacatttgttagagaagtttaaaaaacaactcaagtggccataagagggtgcgtgtgtgttggaggtcttgggttcgagtctcaggttatacattgtaatatataaacgcttaattcaaaagaaaaaaaaaaaaagagaagtctaaaagacatctatagtatctatttagaggatagtttaagtcctttacttatttaattttaacttttagctatttagaggatagtttcagtcatttagtttcagtcctttagttatactgcagctagtgcatatactcatagctttcattataaatgccccctatattatatagattgggagtgatttgagagtgaccgcctcatacttttcctttatatactatatagattgataattaatccttcgattattgaatagctattatctatatgttagactttaaaatagttcttgtttggcggtttagggagttaaaatcatgtttaatcttcatttatttaaaactaggaaacaaattttcaacttttacttattaagtcataaaattgtattaattttgaaaataatatttggctaattaaaatttttaccctttgaactttgacatgtaccaaatcatgccccatgaacttttaaggtcgttgaaaat

SEQ ID NO: 15890 - DNA, 3905 bp, Cannabis sativa
  modified_base (94)..(98): a, c, t, g, unknown or other
tatcatgtgaaaattgttatgatagctggtagctgggttttttttttttttttgaataagtaacattttacttctgatattaagaatattaagnnnnnaaataaaataaaaataaatgtaacgcatctgaaccctccacgtgtctatatttatgaattaacggaaatagtagtaacagtataacaaaattgtaacattaggtatttttgcctccaaaaataaacattaagtatttaagtgtataaaatctaaaacattatgtatttatgctgcaatttatccatcataataataacaaaaagtaaataaatcatagtaaaagagtatatgagggcaggtctttattagcattaatacttcttcaaaatgtctaatttaatgtgatcaagtaaaacatcttcaatcaatgaatttaattaaaataaatttatctttcatactggagaaaaaacccaaatccatatacaggatacaaacctaaaatgattgtttgatttttccccatgatcaaaatataaaactcttttaaaaagagttgcttttactaatgtactttctcaggcctgtaagatagtaaaattaggctttcatcaatgtttgatttgaagcttttaaagtaacctcaggcctgaaaaatggtaaccaatttttgcattctcagtgcacccccagataattaatttctcatatggtactttaaaatgtgaattcaaagctgcataaggtatatgtaatgtcataattagaaagcaaaaaggagctgaatttaataggggcaagccaagtaatgctcaacattcatcaaagaggtatcttggtaccttgtagaaaaattaacaagctattttatatgatatcaaacaaaaaagtgaaaactaatttcataaaattgctacatcctattatagattccaaagaatatcagtatgaacttttacatttgagccctgaagttgctctgaacacaagaaggatcactatgcaattatcaaatttctatgatgtcccttttgatatcatcatctgtatgactggggatttacaatgtagacaacaaatctgtttccatggcatctaatgaccgaaaaaataccagaagcaaaaacatgtatagttgatgattgttttcacacaacttggaaatggggtacaaaaaactaagcttgtaatttttttttcttgcagccatgatcacctgcaagaggaataaaaatgttgtagcagcatgtatggcagagcgcaaaaataaacactcgacttgacaaagaatccaagcatttttaaaagggagcagagaaccccattatttgcatctgattaccaaaagaaaaggcagacagctagaggaatttagaaatccctagagcaaccagtactatctatcagtgaaattttatgtctacaaccgatgcaacttagtcacagataaagaattaaataaaaaaaaaggtaaccaacttattgtgcatgagtttccggaaacaattaaaaagatcatcatttccatcttccaatcagtcaaattttagctcagaaatgaaactgatgtaagatgctgacgtggagggaaatataaggggagtttagagattgttttaggctgtgtggaagttggattttggtgtgcaaagaaaaaggtaaagaaaatgttgggaaaaaaagtgtagagtataaaaaaattagtatggaaaattttgttgaatcaactttttttccaaacaattcctctttccataccaaacatgagaacttttttttcctacatttttcttacctatttttttcctcaccaaaattcaacttccacacatagccttaggggtttcgcaattttgggaaatatgaggaaccaggccctcgaagtcctgtgagaattggttgcacattcttgaaagttgaatctttctattcctcaaagtcttgtgggaattagttgcgtattcttgaatctttgtgttcctcagagtcctgtgggaattggttgtgtattcttgaatctttgtgtcttaattcttgtcaataaagttgccgtactgttctattcctatgtgttctctgctggtgtttgtgtgtgcctatcagaaactcaaaacaactaagaacctgttctgtaaacttaaatataactaataggaatgccgcttgccctgagaacaaaggtaagaatgcaaaaactactaatgttaggcaggttaatttttccaaatgagtattgctataaggtatcttaactccaccttaggggctgtgtttgatatcatttcatgggaataggcttaaacacaggttggacttcatagtccctttcccgagtaaggaaaacggtataccaaacagccccttaaggtgtccaagcccaactccaacagcatcacatgaggtggcatcttaagagagttgagtttaattattataaatatttaaaatgcatttgaaactccctaaacagctgtgttcacttgaactctcaacaaaaactgtgctgaccttacctgaactgaactgaacttctttattagcaacaagagaattccactagaaactttccacaacaggcaaatggaagtcatgagataaccaaataaaacagaataatatttccttcctctccaagcagctaaatgtgcattgccaaaaacattgataacttaaagcactgagttttccctcagattcatatcatttaactgaaacgcaaactaaattgcatatcatttgaatcttacacagaaacttcctcataaaataatttcattcattcaaatcaaaggaaaacatttcagccaaaacttaattcacagttacctccaacgaaccaaatcatatgacaacattcctctggcggaccttagctttctcagcatcaataatggactccatcaacttaaccgcattatccaacttcccttcagcattcacaaccacataatcaaaattcttaacatgcttgatctcctccctagccgtagcaactctcacaagaagtgcttctttagtctcagtcttcctaccaatcaacctctccacgagcttcacttcactctcggccatcacaaacacgaaaaccgcagactgcccaaaaatccccctcaaagtctcagcaccctgaatatcaactctcagcacaatatcataacctttagccatgaactctcttatctgctgtttaggaatacccttataatcaccataaacaagagcatactccaaaagctcatccctttccaccatacccaaaaactcatctttgctaacaaagtagtaatctttcccatgaacctcgccgggtctcatatctcggctcgtcgccgtaaccacaaagtgaagaccttgacgggtttccctcagtttcttgatcacagcgtccttgcccacaccactgggcccgctcacgacgatgatgagagggtttgggttgggccataatgggaaggggctgaaacccgaaccaagagaggtctctaaagcgcgtaaaagctcggtggggtcggctttctcgacttccggaatgggaaccgaaatgggtcttcgggcatcgctcatttgagaggagaaccggcgagtctctgaaaattgcgaaatgggtttgaggctttggattggagaaatgggtttcaatggttttgggcgaaggatttggagttggggatgaagttggagagaattgcagagaactctgcgaaacatttgagagagtgaggaggtgcactatatgcggatgaggtagcgggacatggaatcggaaccctggcctatgtagtatgtatgtactccaaagatttaccctcagctctgttcgcccctaaaataatggaaagttttaaatattttagggtaagtttaaagtacactcggattgttctactttaggtatgtacggaaactttttactctaatttaatttt

SEQ ID NO: 15891 - DNA, 7308 bp, Cannabis sativa
gaactaatttttttatttttttttgttttattcttgaacaatttgatcattttaatgatttacagaaattaaacaattaaacaacaataattattcactgttatttgttttttaaattttttttgaatcaaatgtttcaatcatcaacatgcaatcatgagaagtaatgcaatacctagttatttttgtttggatttgattgggagctccgatcaacaattttcaactcattcttgtatgatctgcaacaatttaaaaataattatatgatttttagtataaatctatgtccgttaatgttgtgtttcattactctattttttcatacctctttttagaataattttggatttagaaggagctgcgatcatcatatttttaactcatttgtagtacgaactgcaacaattatatgttttgttctgcgatattaatgtatttatttcaaattttggggcttttatgtttaatatctgtttcaatttgaatttgaatttgaatttagtatggagctccaatcaacaatgtctcatctatttattgaatgatcttcaacattcaaatgacaatttttgaataaggagtataaatcttactgagttctgtatgagattagaatttcgaattgttgatacctctgtgtaggcagatttgatcaatgagaatttgatgttaatggattcacctttgttgatgtttgttttttgtttctgtcaatctcattattggagtaggtaagtttttttgttgatttttcattgaaatttgttaaatttttgtttcagaaaactttatcgagcatcaatggttgctctgtttttttttcctgggacgctaatggtcaaggtgtcgaagaaggtgacaccatatcatgtgtaaattaaattatagtttccgtatataagttgtttttaccgtgtaactgtatttttgttaagtatttcttaatttcgtgcatttttgaaaatttccctaatctttttatgtaaatcataccatgttcatctcctccaactaaacacaaccactatctcatgaaagcccaaaaaggatttggtaagtgctctttggaattgagctttaatttcaccaaagttacaacctctacataaagtgtacatctcaaaacagagtagtcttgtccataattctttatatgaattttctcttttatacagttcaagacctacactccatacatgagctaacatagtttccattaactagtttccactgtctgctgcctcagtttaatgctctctttatattctttcaactccctcctgtatctctctttgtctttcaaaccaatattctgataaacctacacacatcatcaaacaaacaacactaaataatgataacaaataaggtttttcgaaacatgtaatttatagtaccgtaccgtcctctcttctggggagagattggtccaagactcgccgatcatcttagtaaactcgcgctctctgttcgggaagagggatttgagcttgtaatgcttttcagcaaagaagaagttgtatccactcctattgggttttggataattggggtctcctcttcttttactcttccttttacgacgacgagaatggcgaggtttgccggtgtaaggtactatggcattattgttaggctcagcaacaacagggctaccactagtaccacacccttcttcttctggatgatacaatactccagttaaaacctcagaccccaacttcacactcaccaagtagccacagtcgaattttccatcaatagttcctatacctgaaaaaacaaaaaacccaaaagcttacttttaatgacaatcttttaatcacaacataaatttttttttgattaaatgtgatttttagtcacaacaaaaaattactaacaagatgtcactaatttaattttaatcacaataaatattattattaaaaacacgtttaataataacaaattataatttttgtgactaatacatctagctacagacctttgagtcacaagatagaaataatgatttataattagtcattttttcatttttagtcacagattttgttacagattttgttacgactaaaagtaaaaaaaaaaattgtaatgtagaaacacaagataagtataaattttgatttagttttattgtttcaataaatattatataaaagaaattattgaaaaatatttttcaaaatttttgaatatcattaaagtaaattaagaataatgtaaattatttaattttaaaaataattttttaaaagttattttgaaagaaattacaaattttaccaacttccaaaagaaaatttaaactaaaaaaggacttttctttattctaacacctccagaaggattttttctaattctaaaagttaaaaaagagtatacacaaacacaagctaagactataaaatctgcttgaaaaaattgaaaaataatgtatcatataagaatgaagtgctttgttaccttctatatcctggttcataggaaaatcgttaatggatttgggagaatattcaactatagccaattctggtttgaacgagcgactgcaaactggaaatgtaactgcaaaccaaagaacaataacaagtagaaaatgaaagttggtttttttaaaaaataaaaatgaaaataagagaagttaagaacaaaaacaatacagtgaaaattttaccagaagggctgcacagaggaccttgcatgcgaaagaagtgaacttgttcatagtgataaagaagacttatgtagtgttttcttaacacaaaagaagcacttgttgttgttggagaaaacataaaaatagtaccaacttccctccatttcttctctgcaacaacctacagtacatatacatatacatatacacacatgtttaggacagagacttaattattattattattattaatagtaatagtgaaaagttgggggcacaagacaaccttctcaaaaccacctcttcttgtaacctcaacatataatatatgcaaatccagctctttccctccaatcacaggaaccccttcaaataattgaaaaaaaaaaacccaacattaaaaaaatataaagaatctttgtacaacactatctaagctacatactattattactataatagtgggaaaatcccaaaagtaaaggtaaactaaaaaagaagaagaaaagatgaaaggttttgctcacataaacttggtattcatcagaaaatgaaaacgccttagagtatcccaaaacacaatagggtctttagcaacatcatcatgggaagcaagtggcgtaggatagttcatatcctgcacaccattccagcccttgtttgtatccaccggcgacatgttgtttttaccggagaaagagagattattatattattaagagaaaaatcaaacaaacccaaaagactaaaatgcaatgatattaattataaaaagaattaaagaaggaaaaagaagtacatgtaatatgaatatacgatatgggctagttccaaagataggacagtaattaaagaaggggagtaaattttagtctgaccaaagctgagaacaaaagaaatagggattggacgcgtgggatgtaacggtcaatacataattacctttttctgccaaaacttttaaatctatatactgataaataatcagaagtcgtcttcatagtaattaattatacacccaaacacactctatctctacactctttttttactttggcgtgttacactgacaacttttcttttcttttttgtaatctcttgagttttgagtttggttctcttaataatcactcactcttgtctctttcatcttcattttcttcttcctctaaagaaagtctttctgaaacaaatctttagcgtacatctgcaagtagatatctgattcttctgagacgtggaatcctgtgcatgcgagtgtatggtttagcgtatggtaaacctatcagcattgcctatctgaaccgttgacttagctaaacttattttgtcgtttagttagtgtggatgtgtgggaatggggtcctctttttatccgatgaaaactctcatgacgtgtttcgtccttccatatgtaacccttacttggtggtttaagattgctgacttggaatatcctttttctttctccaatgaaccaaacaaacaaaaattagaaaataaattaaaaaaaaaaaaactaattaagatttttcactctccaacttcaacaagtgagtgtctcatcatgtttttttttttgaacttttaaggttattaaaaatttagaaaacatgatttgatatatggcaaagttcaagtgacataatttgatagatctcaaaatttagaagcatgatttagtacataaacaatcactgaattagtaaaattaaataaaattaaataaaagtccttaaatccaacaatcttaatagttcagcagtaatttttaacgactagaaaactttaagagcataatttagtatatattaaaatttaagtgacaaaaatcataattagtcaaaagaagaagaagaaaaagaagaagaggagtgctcaagagactctattcacactcttttatactctatttttaaatttttaaaaaattatacaatgcattccctaaaaggggtctaccgatacaactctatccatttcagtatttagaaaagaaaaaatttgtttaatttttttatagttgtttgtattgtagttatttaaatattctgcaaaattttgaaaaactcataaaaatttaacacgtcaaaaataaggtttaaacaatttattttacatatatataaaaataaaataaaagaaccttgtgtgcaacagactatttgaactatatttttagcgtgttaaattttttacaatatgtcttaaataactataacgtagacgactataaaaaaaaaattaaatgcattgtaaaaataccctaaatttcatattcaatgtttctatttttgccttgtttcttactattgttattttaatttattattagttttcccctaaaaaaattagttatagcattataactttgtcattcaaattaaattattcaactattttacaaattcattaaaattgtttatagaagaatgaattttttttagtagattttatttacatcagtggcggacttaggatttaaagtgatggagtgtaatttttattttttttttttggtaaatgaggggggcaaaaaagtaaatttaaaaagataaaaaatgtatttaataggattagaacccttgtgtcctctaacctatatgctaagtagcttaacactccaccaaaattaacattatgcatttaaatatcatcttttattacaaatatatgttgtaactaactaaattgcatatatatttttttcccgattttttttccagtggacgactgccccacctcgattatatgtgggtccgcccctggtttacatcctaaaaatatttaaatacacttcattttattatttatattttacataaaatacatacataatttattatactcacttttttcttctcacattgtaaaaaataaggcatatatataaaaaataaaatatattttaaatattaacaaaaaaatcaaacaagaaaatatatgaaataagtaaaaataaaattaaatgtatattatttattaatatatatatacatacatatgaatgtaagattaaaaaataatgtgggagtgtgtttaaaattttcgagtgcaaaaataatcctctttatttttattttagttctttaattttcattgaacaaaactaattacactatatattctttcttatttttgtttgtaaataatttttataagttttttcaataaatattaatttattattacaacactacaattacaataagttcattatttactttccttaaataagttaattatttactttagttaactcagtaaatacaaccgaatataattatgaataaaaaaaatttaattattaaattatttctccattcataaaaaaattattaaaatatttcttatttttaaaaaaaagttttcgtaaattaaaaataataaattgactcacataacaaaataaaaaaaaaataagagtcatcaatcaattgaaattgtaagtggaaaaaataactttgaggataaaaaagtaattatgaaactattaaaaaaaaaaaacaaatatattggtctggcaagtcaataaaaaaaggcaccgttttatttaaagaaaagcataactcaaagaagagaggatccaaagaagagtttgggaaaagacaaaacatgcatataaggagctctgaaagcgggacgaggaaagcacgcagaggagcagatgataattaatccacatgcactaattagaacatgcataaagaaggatacaaatgattctttgcgcctataaatagaagacccacacattcgaaaaatgagataaattcttgatcacactagactagtcgaagctctatcaaaatacatcctcaagagcacatttgagctcgggaagcagtcgacccagatcacattgagtgaatataaagggaaattgtgtaaacagataaagattgtattttgattagatcaaacctggtgtaaggaattcaaagtgataatataattttgttgttgagccaatttttgacatcaacagttggtgtcgtccgtgggaatctctagaacaaaaagttgaagttgaggatacgaactaagatgggttctaagaaagtgtcggagaaggaaacaacgccgagtgaaggagatacgtcaaatccaatcatggatttaactactgcattagtgttagagatgaaagaaatgaatcaaagaatgactacaaaagataaacataatgaggaaatgcagtgtctcatagaagagaaattccagtaagagtggcgtgcgactcaagagaaatgtcagcaggatcaggacgagaacgggaaacatcaagaggatgttaactacaatatgaagaagtttatggggaaatggttgatatgcaggctaagatgaacaaaactcaaatttgttgcgaacttggataaacaagtgggtctgaaccaaagcatgtcattagtaagttgcagccagtaacgatatctcaaaactctgagagagaaatgagaaatcaattgacactagtgctcaaagagaaagaagtgatggaaggagtaagaaaggcagacaaaataagtgaaaatcatgattgttagactttttatttgggcttacattaacttttattggttttattaaaacttgggttgattagatagttctttgctgtgttagcccatattgttggt

SEQ ID NO: 15892 - DNA, 3492 bp, Cannabis sativa
gtccaatctgtaacttttacaaatcacagggtccaaaatggtatttaccctatttaaaataatataaataaaattaattattttatatattttgaacgagcattaatggtaatattcacttttatacttaatttacactttgtgcattagaatacaaatataaaaaatagaccaaatatagttttatggtatattttgaaccaaactaaaacttaattattcactagtgtttatttttcatgtaatttgttcattaactatctttgtatgagtggaactttaagtgattacaaatgctaattgttagtattaataaggacatcatgaaaagtacttataaaatccatgttcactgtaaatagtttttctttccccttactaaagaggataaacttactggtctacaaatagtttccaagacttgtgcacgcacatgttccatcatataattaacatagtggaaaaacgctatagcctaattgattgtcaccaatcatatattatattttataaaatatttacaaacatgcactttaaagatgacaaataattagacaagaaaagttcaatcaatatgtatcaatgtagtttctgtaacttccagcactagctcggctagtaagtgaaggtctcatagtgactattgcagactcattagctccagctttaagagcagcccttcctgcttccaggaacctcttcactgcatcttctgcatacttgttagcttcacctaccgtcattctttcaccgatatttgggtacgtattgaggacgtaatcgccattgagttgagacgcaagctggatcatttcaacttgaaactctgacagctttgcatcttcttttggaccccagggcctcagtgatgtcttcacctcaggaagagtttctgttttcaaattaaatttctttcagttcaattactagaagcaagaaaactaaataatacttcctatccaaacagtaaatgtggtacagtcaagggccttgcatctaaaactttaagatctatagtttaaaatatgtgaccatgctaaagaactacaaaaccaacagaaagatatttgatttgaaaaacaccaagacaattcaatttttgtaaatgctcataagacttagagcaaacctgggcaatcatcgcgtggagtgtcacggatagagaagtatttctcaaatgaaccagcccatgcgtccctttttgttaagaagtttgatttgagtttgaaaagcttctttacagtggcaggtattgaagaatgttcataatgtgaagatggtgttggcccatctggctcgtggatcactgcaccaaacaaacccgagtgttaatcaacaaaaggttcaaacttttcagttagttgagaatgaacaagattattctccagattactcactcatatattcgaactaaattgatgtaaaatgtaaaataacgatgccctcattttctaaggtgtcaaaagggtgcaaaaaatattgtagcgatctcttataagttctgatatcggaagactatgcatcaatcaaaagaattggcggacatagtttcgagttaaaaaattatatcaagacaaagaagtttaaaactagttcatgggagtgtgacattagccactaacaaacatttatcatctagttttacaatccacaaatttaatccagctttacctgtttaggtgagaatctcaggggaagcaagtgtccttcgcagatagcatatataaaatgaagtaacaactatagaagaagatatccaaaagaagaaaaaaaaaaagagaatcctattcataatgatgtaaatccagatgaagtaatataacagccccacaagttaaagcaactttcttgcaaaaaaccttaccaaaaaaaaaagggttaaagcaactataaaacaaaataccaaagcaaaaaaaaaagaagctaagcttaattctaataattgacctaagtaaaatacaaataataccaaaatttcaaccaaaaccatttcacaagcttccagaaaatttgccctatttaattatctatcctattatacttcaaaataagaattaaatcttccaaaatatagtttagagggtggccagttacccaataagtacagaatcaaagttcacaataagaaacaaaccaaatcatagcacatattaacttaaaaatttgaccaacaaaaataaaactaccataaataacatcactaagccaacaaacccagatgcagaaaaactcaccagtggccttatcaatccagggtgaaaccagtattgtcggaacacgaacacccaaccggtcgaaccggaagtaaaacgggtcaggtccaactatcccatcggggcttggtaccccagaagcaggggtgggtacatggtcatagaacccaccatgttcatcgtaggtgatcaacaaggccatctctttccactggggacttttcctcagagtctcgtaaacttccttcacgaacttctgcccaagagacacgtcgtgagaggggtggtcgtcgttggccggtaagagttcaacgtcaaagtaacgctgctcgatgacgacataattgggtagcttaccaagcatggcgtggagcttgaatttcagggcgtaactatgaaaattaacaacgtgtttgagctttctaaggctcttgtagaagagggtcgcggggatattctggtaatatatcccaaaagtgagaccattctcgtccagggaatcgaaaatcgttttctgagggaagccatggatgaggtccttccgtacgttgctcgtggctccatgggaagtcgccgagtggacgtagaatcggttgggctgagtcgacgcgggcaccgacgcgaaccacctgtcgaatatggcgaactcgttggctaactcagtgtaaactggtaacaccccaggtttgaaaccactcatgacggtcttcgacatcccaggggtctggctctccgcttgctgagcgaacccattcatccgaggagggttggcggtggtgtcgtttgacccgaatatctgctcccgaattgcctgaaacgagtgacccgggtccgagtcaacaaacagagcatcgtcagagacgaagactttgggagactccgggtcagtgaccaaaacccggttcgattcttctcccgttaaaccgtcgatatcgggtcgggtcgatttaagccagccgaggacgtggtcgaaagagcggttttccatgaccaaaacgacgacggttttgatgggtcctttgattttgtgccttttgcgaaacttgacatctagggactgagaacacaccaagagatagaagaagaaaatggtgatgatgggtagtcgccgggaacccattgccggtgaccagaacctaaaaggaaaagtcagagccccagaagcaaagaaagaaacttttcctttttttattgtcgtgttagtaaagatggaggtatggtatattccaaataagataacagaaacagatagcacttttttatttattttgaaaaaaaa

SEQ ID NO: 15893 - DNA, 6206 bp, Cannabis sativa
  modified_base (26)..(50): a, c, t, g, unknown or other
actgcatgtgcgggttggtttgaaannnnnnnnnnnnnnnnnnnnnnnnncaccgcgaacacccctactacaaaaccagctgtcagatggtcctgctatattttcgacccttcttgcatgctgagtaagaaaccctaggttggtaaagggtaggcccttacccacatgtgcacctataaataccttcacttttcatgtacaaaggttaaacaattgttacttacaaaacatttgttaaaattcctagagaatttttctctttgggagaaacaaaaggaatacagaaattaccattgtaaacacttgtaatactcaaacattcgcctacaaggataatacaatagactcatagactaaggattattaacacccgaatcacataaaaacttatttatctatcattactattttatattttcctcaagctttaattaatctatttccaaaaatctcggtaaatagaaacggtctaccattttgctaacagtgacccacaaaaacggtcttctatttttcaggcagtttttctgaagtctcaattttagtgttttctcgatatttaggatattgctacgctatttatcgatagggaaacttttagttttgagtttaagacccccaaaaggttttagtaagttatttatgtgttttacgtaaatgtgacataagtcctcctttcagcgagcaaaatttcgatttaggttgaccgacatacacttggatcaggaaacgagataaaagtagtataagatatgtatatgtatgtaatatgcatgttgaattatatgttcaaatactactaacactagtatgattgcggtacagaatttattagtacagtatataatgtcaaggggtattaatataaaaataaataaataaataaactaccattatttaagattgaagattttatgttttcaagaaaacaaaaatttgaagactaatttgctaaaaaataaagtttagggaccaacttaacaaaacatagtttaaggagttacaacacaaataagcctatataattatgtagtatatgcacacgtatccgaaataatagaaagtcaagtttgaattttatgcactacttagacattgaaattcaatgagaagtgaagtaaagtcaaatattggatgctagaagttataaagtcgggtgaaaatgcaatttcacatttcaatgagtatgggcttctcctctgaaattctatggagaaaaattcaacaacaaccactaccaccaccaccattcataattgtgtctctatttcagaaaccgatcaaaatatgtctctttgaatatggttacagggaaacaataatttaatacacgaaaactcgttagaaaaatgccgaaccacaaaagaaaaaggaaaaattaaacttgtaatgtataagaactcttgatgaagtaatcaacaaattcatgatctcatcaccatgggaaatgaacatgaattattaatttgaaggaggagtagcaaagctaaatatcaatgaccagtcccgcggctacttggaccgggatatttagcttccttgaacctcttgaaaggattagtagaagaagaagaagaaagattacgcaagagattggtaaggccatgaccaatgcctcttctacttggaccagaataagctttacttatcttaaacccatacttattgtttccagtatgaacatgaacatgacccataatcccacttttattacttggatcaacaatcttcgactggtcaatcgaaaccttgttgtagtgtaccagaggcctggagctctctacttgcatggacaatagtaataataatgacaacacaagaacaataatggtgtacatcgaaagcgacatgccgtatgtatagccttttggatcttctatgaattactctgcttctcctttgaatatggaaacagttgctataatataaatataattgagtccgagtacgtacttgagagaaagcacccaaatgaaagtgtacgtcttggagatctgttttacatgtatttatgcaaaagaaaatatatatttatatcgagagctttttagttaggagcctacattagcagcatttatgttttttaaacatagaggactcacattacatttacatagcaattattttaaataattaaataattaaactaaaaacacatcatatcagatcacattcccaactatttcttattttaaaacttctttataatttactattcatattctatagaatactttttattgatctaatattatgttaattttttaggttttagtattatattttatatgtgtgtatatatatatattgatgttatatgtttaaaattagtaaaataaattaaaatttgataagttagaattattgaaataaaataaaaaaagaatagagtagagaaattgatacgagtctcttaaaaaaaactatattatattttatatatgtataatatatagggatatgattttttccagttattgtactttcacggattgtaatccgtgatgtacgacagccgtcagatgagggagttatttgatctaacagctgagattgatctaggggtaattaaacttaaaaagtagacacgtaccctgacactcatttaatgtaccctgagacccatctaatataccacagaatacattccgtgaaagtatatcacaagacaaaatcatatccatatatataacaatttatattataataattatagtaggcatccgtatattttgaaaaaaattatagttagttgaacacatatagaatataacaaccacgggtgaaactgaaactcacaattggaatcatatttttggcactttaaattagttagatttttttaaaaaatagacatgatatctactataatgataatatatactataacaagaatttttttataggacctcctaaaaagatattatcggtagaggtgtcttggagttaatattagggtaacacctcattaagtgaaagtaagttttaaaaaggtgtgaaacacgggaacataatcttttctccccattctaaaaaaaactcaatttcttttttccccagagctgacacaaatatatacagttgtgaatatctataacaaaaaaaaatacagttaataaattttaattcacatccggcattcaattgaccgtggatcctcacgtccctttattctctctcgtttttctcaaatttagcttctattgactaataagatgtacgatttcttgaacgaaccagatctcgttcaacatcatcaacgaacaagatctcatttcaattttttttctcaaactaatggaactataatcgtgatttagttgttttttgttctatagaggattatcaatgctcatctcttggctgtagtttcatttttctttttctcacaatcttaagaataaataaataaactagaacgaaaaattacaccccaagaatttcctaacccagaaatcgaacggtgctcctctatttcagttgtagcttcttttttttaatgaaagtttatcttattctcaaaaaaaaaaaaaaaaatctggaacaaaaaattactcaatcccacaaattcctaacccaaaacttgcatggttcgcatctccctaaactcaaaaatctacaaagactcgcccaccattaattgctctcctgaaatcgaatcttaattaaccactatatatcaaatgagtgaactattccattcacttgtgaagcagtaacaacctgcacccatctaacctattataatcttattttttcttctactagattagagtcagcctacaaaatgttcaatatacgactgctcttgtcactccgagaaactcatttaagcaaaatctctagaaaagcaaaatcatccttaatctctccttatgaaaatatttcttttctttgttaaaagtcattaccgctaaaatgggaatacgattaacttcactctaggtttttttattttttatttttttattaaaaaaaaattaaaaagaaaataataatctagcattttgcaggtaacataaaacaattttgacttagtaacatatcaaaacacttttatacatggagtcctttttgacatcctcatagtaaaaaattactattatatgaaggaaaaaaaaattaatttttattattattattattattttctttttctgtaaaggaatgtattatgtatatattataatttaaaaatgcttaggatgataacttttggacttttatggagcttatgtctttttattctgtaataataattactcctaatcttccggcaaactaatattccaaattattatcttaatgaagtattgttaaccaaaattatatgtattattattaataacttagaccgctatctatttattccaaagtatatttcttttcttggttcgttcacaggagagaatattaattatgaattatgactttgtatataaataatataatatgtatgtgtatatatcatatattatttgctgagggcgtatgatttggtagatcaataggagaatttaatttgtagatatttgactataatgcgtactgatcagttgaaaaatacgaatggtgccaaattgagatggctattggcaataggggcaggtgggttgttttatactttttgggggtggggtagcatgtacagtaaaatctaactactaattatatttagagatattagcagtaaaccagttgaaatttaaattttttaacacttaattataaaaattaattttttggggtaaaattatctaaactctcattctattttgctttgtaaccctctgtctaaaaattactgttaaatgccacggtaaactgcccacgtgtacacacttgtacacgtggcaaatttttattggtgcacataatttgattattttaaatattagaaaattaattaaattttaaaaataatttattttttaaaaagaaaaatcatttaaaaaataaaaaaaaaaaatctattttttctttttccttttcttttcttctgtaaccctcaacaactctttctcttcttctaccaataccaccaccagaaatccgcctgtgctccccataaaatcaaaaacttaaattaaaagaacccaaaatcaccccaatcgacccttctgcctttttcaatcgtaagcatcctaactttgaaactcaccaaacgaagagacacgaaccagtgcttcgaatcataaaatcaaaggaggaagaagaagcttcaaatctgacagacaagaaagaagggtagacgaagtagacgaaccaacttcgaaacacaacagatgaatgggggagttttttgtgacaatgcatcttcggcggctttcaggagacgaagtagacgaacagtatagttcttgcgactgagaaagggagaaagtgtcgactgtgtttggttatagtttgctccgtctagttcgccggtgagtgaatgtggttgcaatttgggggtttgagatttgtgggtttttgtttttgggtttggttcatcttcgactcgttttcttttttctaggttagaacgcttcaggaggaggagcacaagtggatttttggtggtggtattagtagaagaagaaaggaaaaagaagaagttgtcgagggttacataagaaaagaaaaaaatagattttttttttttaaaattatttttctttttaagcattttgttagactttatgtagtttgctttcgtatgtgtcgtatttgttggaactggtgttttttggtctgaaatggttgagatctgacagatctggttttcagtcgaaatctgagttttccagatgttatcgatgctttatcgatagaatatcgatgctatgtcgataggctaccaaaaagttagtgatgaccattatcgacattttgtcgacaatttgtcgatagcatgtcgatgaaaaataaattagaacatgcataagttatttgagaagttgtcgacattttgtcgatgcaatgttgatgcagtgtcgacgatatggcgatgcaatgtcgatgtattgtcgattttgaaatcgaaaattaaaaaaaaaactataaaacaataacataaaagttcattcaaacataaaataacataaaacataaagcataaaataacattaaaataaaatataaaagttcataaaaaaacaaacattaaataaaactcaccacaagccataaaataacaaatgattaaaattctttggcttttgggt

SEQ ID NO: 15894 - DNA, 9519 bp, Cannabis sativa
aattgaatggaatccttataaagtcagctaaaatagtatttacaacccaacagttcgaaaagaccatcactacaagttagagaacgattaactcttgctaactctcaatactaatatctacgtgaaaaaaaggaaagaaaaaaagaaaaagagagatcagttgttttagtaatcaaggcaatctagatgggaactggttctgttgataatcacttgggacgaacaccggaagctggccaccgccctgtgatcttccccactgataattagagctgcctctatccaccgcattgctgctgctacttcttgttcctctgttggtttgttgttgttgttgttcattcacaatgggtccaccaaagaaaatggattgtcctgtgtaaagtatttctgccccagacacttgagtagaacctgcttccctggaagaggagacaaaacgtcctgcctcttgatcccaaacaaccgatgacgatgacgacgaggatcgcacatttcctgcagcactggagttgttcttttttgcaggtatttgcgaaggagcttcattcggtttgctttcttctttttctagatgcagcagggattgatccgtcaatgaacgataaatggggttgtgttgatgatctctatttggaaacttctcaacttgcaagggaacaggggcgaagttagaaacctgagggctgcttaaactactgacactatgatgacatgtttcactatcttcccgactagcacgacttggaggatatggactcctagtaggggatagcttggaagtcccagctttggcatttctgttgaaaccatgatcagtactgacaggactgctccttccactgaagctgctattggataaataatcagcatgatatggatggagctgagagctgactggtcgaagcacagatgatgatgctctagctttctcagcagctttaattgcctcgttagagtccagttttgcaagcttccatgcactaatacgtggtacacgctgtgggatccttttccccttgtctggctgtggtaatgcatctgggtccactgtggagggcaaacgccctggttccaaatgtggtattatttcatcctaccaaacagaaatcagaagcaacaaattgaaactcttttttacaagactagatgaagcctatttcaattcaacactgtttagagttaggatatcatgagaaacccataatttatgttagccaagaatctacatgcatgcacatgccgcataattatctacatgcaattgctatgtaggttcccaagaatcactcgaacttcagactttgtggacataccattaccatatgccaaacttagggtagttaggttatgatagtcaatatttggaccataaatgctaatatgctctatattaaaaacaatgactcctacactctatggccatataacacatacagttgggagtacctgatggtccataaatattctgggaggggtacaccaagcacccttatattgcaaactcataccaagagagcttctcccactaattgcagtcacagctgaactagtaggtgatgaaggaagactttgatgatcgtccccatctacagatggtccacgtggttcgctctgtgctctcatggcaacaacatattcatatgtcgtgatgccctggaagatagagcatattaaaattaccttgatctagaaaaacaaggagatagagagaggagtgagaagtccaaggagcatacctttcgaatcaaaattatgtggaaaaagaacaattctcccagaggaacgatagccagaaatgatataatagtacacaagccctagatacattacaaaaatcattgttatttcaccacactatcatctcaccaaataaatttcaaatgaaaaataaatgttaaaaaataggaaagttaattacgcaaatttttttaagaaaatacaaagctaaaaagtcctcaaacctaccaccacaatagcaaaggggatctgtgagaatccaactccaagtttttcagctatctgatgattcataccctttctatcaacaaagcaacgaacaaaaacagcaatgccaaccccacattcgacaataagctgaaagaagatagacaaaggaaagaataaactaaatttaatttcaagcagtaaagaaaagaatgaatagcacaatctaagtgaactgaaacttaaaggttacccaagcaaggcttgctgccatgaggcatacaaatgtaatatagttcttcctccctacacaattatttaaccactgcaccaataaagagtagatgacttagtcattcctggtataattaattaagatggtgttttacagcatcacaatgataaatagagcgaactgcaaatggagactagttaagtgcatcgtcaactagaaagcatagaaagaagacaaaagacaagacatgcttgctatcattgacaatgatgatatacagaatacagtagcagtacttagatgatgccatagtaaaaaggtgaatgtctacaactctttagacttactcgacaatgatgatcaaacccatcaacacatttatcgcaacttctacagtgtttgctgaatttgcgtacctacagaagaaagggttgtagttactgaaggaaaccagattgttccacattggcacaaacattaccactaagatattatacctcagcattgcataatgtgcagaacaatgcatcctctccagattgttgtggaacatcatcttttcggcagtcttctagcacaatacaacaacaaataaaacctccaagtcgtgcacaacatgctgaactatgcctgctatattttcctccattatttagttccattttgctggggtcttcaactgaggaagcattccctatagtaagtaagatatcaccaagttatgcagtgaagttactaaaaattataaatgagtatcattctccatttaatcacagtttcataggaaagaaccaatacgagaataaataaattcagatacagcttcttaagctaccgtagagataactcaggtgtttattttctacaatgcccataagccaataaaattttatgatgcaaaatactgaccaggcgtatccaaatcattgtgagatttatatgcagacatcttgtcgggttcgaccagaataccagtatcggcaggatcaatggctgtacatctaacataaaggatgaacacagccaatgcctgaagattaagaatgcaagtcagagcatatcaaaccaagcagtcaatattatactgagcaggaaagcatgagttaaaagagtataaaactataaatagcataccaagaaagaataaacaccaatagctgcatattggtaaatataatttccaaggaatggagcaaagaaggcataatatgccacagatagcaagaagaaaactgttatagccacaacctgaacacaacaaaaagaagagtgagaatttacatgtcattgtcaaccattaaaaccatagaaccctacagaaattctcaatcctgagcttgttgattcaaatgtcactatgcccacatcttttttccccttatttacgggttatgcatattattaaaaaaatgcatttgttactcccttcgtatccaaaatgccaacaaaaaaaaaactacaatatatgagtttatctcaaaaacataaagaaaacttcttttccccttcagatttccatgtacattaaccgaactggagtgcattttcgctaaatgaaatcacaaattcaaaaaagcaagtacatagatcggaacccaaatgggcaaaaacatactcaaaggactgaaatgaacagaaagaaaccctaaacagcccaacatttaaaaataatactaaacacaaaaacgaaaaaggaaacctggaaagtgtgagcagggagttcccatccatgacgacgagccatgaccgagaacgaagaactctaaactggtcagtggaccacaccatctaacccaaaagaaacctcgttagaaaacccgatgtaaatggagccagaatctctgaaatgaacagcttggtcattaaaatttagattaggagatcccacatcgacagtctctatatctaggttttatatggtaagaattatggtcaacatcaccatcttcagttcaacataagaagaagaagaatgagtttgtgatgtcgttttgaggagagtatatcggtaaacgacataatctgtgtgaaagagttaagagttagttattagtgaatcataatgccggcgaccctgttgattttgctgaacccgaatatatatgttttaaaatttcaaaattataatcttttctgtcaaatcataaccgtcgatcaagacattatctgatctaaagtgataaggtaattttagaaagatttccttttcaatatgtatccgttaaatggtcagagtctatttagctatagctatactatgcacactcacttaatcctaaattaatggtctccaaacaccaattaacataaaaaaatatatttttttaaatgaaaaatatatatatattaattgcattattcatcacaaaaaaaaaaaattactatttatatgtatgaaacataattacattttataatacaataactatacattataaaagttgctctagaacaaaaaaaacactgtgcattttaaaagtattctgttataaaactgttataaatatagatgaagaaaagtaaaaaaaaaaaagagattaagagagaaagagaaagtgagctgagaactttttattagtttattctaggatttgtttgtttggtatagagtttagaaaaactaaaagtttctttttaaaaaggtagtgataaaaaaatgtttagtaagtagttaaaaaacagcccattttaagaatttatagagatgctacagttaaaagctaaagttagtacaatccaacttttaaaaaaaattattttgattaaaaggctttataataaattattttatattaaaatatatttaattatttattatatacttgattattgttacatgcattacacgtatattttattagtgatgaagaaacaaaattctttttattaaaaaataaagtgaaattgaattgttttcattacattgcgaaaaaagaggagtgacatatatatagacacagtaatagactaactaatttaactaactgaaccgactttaactaactgagttttaatagcccccttcaagatgaagtgtataatttttttatattcatcttggatacaatatagtgaaactgattagggaacaaaggtttagtaaagatatcggctaagttggattttgatgggacatggttagtcttgatggtgccattgttgatcttttcccttatgagataacagtctatttcaacatgtttggtacgctcgtggtagactagattctatgcaatgtgaagagcagcattgttgtcacaaaatagagtagatggcagtcgaacattgatgttgaattctgagataatggagtggagctaagtaagtttgcaggaagcattggccatggattctctgcttctgtagaagagcgagatacagtttgctatttcttggatttctaggaaatgagagattttccaaggaaaatgcagtagcctgaaattgatcttcgtgtgtccaagcatgatccccattccgcgtctacaaatgtttgaaaatggagtggtgtaggagctgtttcatagaagaacaggccttgtctaggggtgcctttgaggtattgaaggacacggttggcagctgtgagatgtggagcacgaggtgtttggaggtactggcttaatttgttgacagcaaaggagatatcaagttgatggtgaggtagagtagcttcccaatgagacttcgatattgagtaggattgtcaagtagaggtcatatttcattatttagcttgatattgggatccataagtgttgtgactggtttggatccgaagttccctgtttcttgtagcaattggagagtgaatggtcgttgagtgacagatatgccattgttgtttcgagctattttaagacctagaaagaaatgaaatgaaccgagatctttaagtttgaaatgtgagtcaagattattgatgaattgattgagggtagggatgttatttgtggcaataatgatgtcatcaacgtatattaaaattgctaagaatacattatttgagtttttaatgaagagtgaatggtcattcttggactggatgaatttttgttggagaagagttgtgttgagtttagcaaaccactgtcgtgaggattgttttactccatacactcttctttagtttgcatactgcattgttgggaataaggccttttggtttgtatccttgaggtaatttcatgtatatgtcctcatggagatcactatgtaaaaaagtattattgatgtccatgtggtggagatgccactgtttcattgcagctaaggcaagtagtagctttagtctgttgaattttaccacaggggcataggtttcgaagtaatcaatgccttgctgttgtgtgtaacctttggctactaggcgagctttgcatctttcaacagatccatgtgggttatatttgattctataaatccatttattactaataatgtgttttccaagaggtagtgggataactatccaagtattattggattctagtgcatcaatttttgtgtccatggcttggttccatattttttctttgcatgcttgagcataagaagttggttcaagtagctgatatgtagcaagtactgatgccctaaaagcaggagatagtttatgatatgaaaagtaatttgtaagaggataaagggagctgcttgtgtgtttggtgttattgcagctgaagcctttgagatgagcaggtgtagagatggttctgcctgattttgtggagacttttggagccactggtttttcctggacatgtggcatgttatgtgctagtgtattgagttgattagtaggaaaaaaattgatctatggatgcatttggagtgttgttttggagaggatagatatcctcatagaatatgacatctcttaactaaaatatattatttgcttgtatgtcaaggagtgtataggctttcatgtggtcagggtagtctatgaaaacacaagattttgctcgaggagcaaatttatggttagtgtgaacaggtgaaacataggctaagcatccaaagtttctgagatggttataattgggtggttttttgtgtagcagttcatagggagtattgtcttttagtagaacaaatggtgttctattgatgagatagatagcagttttaaccatataattccaatatgatagagatatattggattggaaagcaagtgctcttgctacattgagtatgtgctggtgttttctttcaacaacaacattttgttgtggtcttgccacacaagagttttgatgtgtggttccttgttttgcatagaagctagtgagatttaactcttttgcattgtctgtcctaacaaatttaatattctgtttgtagtgaacattgacaaaggtgaaaaaattgtgaattattgtaagggcatctgatttagcccgaagtagatatagccatgtgtaccttgaatggtcattcacaatggtgagaaagtatttgtatccttctgtagaaggaatgggatatggcccccagatatcgaaatgtaagagatcaaataattttggtgaaaagttgttattggacacaaaaggtaatttcttttgttttgaaaaatggcaagttggacagttatgtacattagatgcatcaaaaggaaattgcagtctttattcaatttgtttgtaattaatacagaatggtggtcaaggcgtgtgtgccattagtttttattgtgtatattacacgagactacaatgtatgcttggtaatgagaagcttcttgatccagatagtaaagcttgccaattcttctagctgtcccaatcgtcaatgtttgagaatggtcctcaatgtaacaggtgttagacgtaaaatacacattgtatatattgtcatcaatttaatgaggtgatagaaagcaaatttaattggaatttaggtacaaataggacattatgaattgtgattgcagaatttatatgacagtgccaatgagttctatttgaacagtgttaccattagggagtgtgacagatttgtgtgtggttgatttagtgatgtgagaaaaacatctaatgttccagcaaacatggtgagtagcaccactatctataactcaagaaattggaggttgagaattgttaataccagagaaattattaattgtagggccttttgatgttgaagcatcagttgttggttgtagctgttgactgagcatagaaatcagttgttgacattgagctgttatgagttaagaagtggatgagtctccttgtggaagagaaatatgatgagtctgaggtgtagtgcgactggtggaactagtttccggtttctcgctattgttggtggaggtgtcatttgatcttagttttccatagctaggtggaaagccatgtagaaaatagcacttgtcattgtaatggccaggtttttggtagtgagtgtagtgaggtcttggtcttttatttttagaattttgattggcagcagggttgggattaggtactagggaaggattggtgttggtggcagcagtaatgggaggggttgattgattgctaagtgttctttgtctttcttggtgaataaccatagaaaagactttgttgaggggtagacaggggtcgattaacgatatttgttcacgggtatcatgataagtttcattcaatcctttgaggaattgtaaacttgatcatggttgatgtgatcttgagtttgagctacagctgcacaagtacaattaatttttggacgaagctagtttatttcgtcccacatagctgtcaattttgtgaaataggcactcactgaatcgtcaccttgatagagataggtcaaggtttcatttagctcaaagattctttggccattaccttgattgaacctattgctaagaacaatccacatctcggcaacagtgtcgagatacattagacttctcttaatctcaggtgaaacagagtgaaggatccaaaacatgactaattaattacatcttatccaagaattgtaaagagagtcatgagtagggagttgaggtaatgtaccttccaacaatggagtcttgtttcgtgcacctacgaaaatcttgaaatctcttttccatggctgaaagctgtgatcggtgaggatcggggtagcaagaaccaaactagggtgatttgcattgctaaggtaatatggagaacgaatgtcttcatatgatggtccatcgattggattggatcgaaggacaatgacctgttcatgtgaggatcgatcgactagattgggtcaagaaatagggacatgatttgtagtttgaggtaaaacgtcaatatagattcatctagtggtggtggagcgattggagcatcaac

SEQ ID NO: 15895 - DNA, 6948 bp, Cannabis sativa
taattataattaattaattttaaaaaatgaatgtctacctattagtaacctgctattacaggtcaaaggaaaatgtaaccatatggttacagtaaaaatataattattgaatactcgcctatatatatatatatatatatgtggaatgaggaaaaaatagaaagaatggatataaaaaatgacttccatgtcatcaggtaataggttaaaattaaaaaatatctaatttaaaaatttaattaatagttatgaatatcaaccattagatttgatccaatggctaataatacaatacacattcataggtaatacccattaagagcatgcctattttatatatatagtagtatctctatctaagaatacatgaccaaaaaattatattttaattaaaaagttataactaaatagaggtacactagaaaaaatgaatcaaaacactaaaaaataatcaaataaaaataacaataaacaatcgttaatattatatcataacaaaattattttcgagtaaatataatatttatatatgtattataatttagagtaaaattataataatacaacataaataaatgtataagatatatatattttattaagatataattattcttacatagatttatatttttttaatacgagacttaaaaaatgtataactaatttcaatttagaggttattcttatttataagtatcttaaatttgggcttatttgtttatttatttttttataatacattagaagttattcttaaataaaatattcttagatataagttcaattgtgtatatataatagaataataaccttttcctttaaattttcacaaaatatacttaaaaaaaaagaataattagtaatattgccccctgaactttcgatactacctgattctgccctctaactatacacaatgttaaaaatttaccctgaacttttacatttacaatttttttttaaaaaaattacatttataaaaatttagtccttctgttaggttgcattctattattttgtttaaatgttgacgtaactttagcaactttacccataactttaacaattatcaaatagtatctcctgaaaataaaaatgagaaatatttaacatttttttggtaaatcttaaaaaaaaattagttcttaaaaaaatcattttgaataattaagagatcaaaattttaaaactaaataagcaatttaaaaattatatattctttataaaaaatccatttagatataaaaaaaaataagttaaaatgcaattttgtaaaaactaaattttatagaaacaagtttgagtcttcttttcctccaaaattttaaatttgtttaagtaaacgtaatattttttttggaatttctaattattttttttagtgtagagggcaaaatctacaatgatcggaatggaaggatcgcgggcaccgacaacttgtagaacaaaggaaaaaaggaccgttgagaccttgggacactgggatggtgccagccgaagggacttcgacgatcaagtcagcaaacaattcaaataaagaatatctgaatgtaaataaagaagatagaaaatatatatttccactgtagggtgatggagaatgactggtaataataatagtaatgtatttcgtaaatgcttgagtaagtgttcagtaaatgaagatgagatgatccttcaagattcttgggttctccttttatagagcttttgatcgtccaattcatccgttatgaagaacgaatgtgggaagtggtcttccccttttccaagaggaaggatcgattcttttggatccgttatagactcattcctattctttgtatttgattggtcttgtagctactgggctcgcttgggccttgtatcttagctaaagcccaatgcattttggatgagtggattatatttactgacttggttttgaaggattgtaattccgatttgggtcgtaagaggcatttgggcctggtgaaatttttggccactacagtttgtcccttactcttggagtcaagtgtggttgacttgaagagtagttgcatcgacaactggcaaaaaattgaaataaatgcatcgacgataattttaatttttcattgcattgattgagttcaagaatgtataaatattaagtttgcataaggagtagtttaaatgagtagtatgtgtggtaagtaataatggcaataataataacaatagtaaaataataataataataataataataataatttttatttaccactatatacatttatatgttagtataaatatattatatagtgaattttgagtccgattaagagctggtgggccttgacttatggaggatggtctttattgagttaagtgtcaaagaataactaaatgggctttggtctttcaattgtccactaagtagatttgagtaaaatttagggaaatttacaaaattactagaatttgagtgaatttttacaaaaatattgtcacaagaaatttttctcaaaaatactgtgtttttataaaacaccagtaaaacacaaagtagaacaactaaaaaataccagtagaacaccagtgaaactttaaacagtatactgcagtatgaaacttataaaaacacacagtagaaaagtaaaaaattccgtctgacagtatttttataaaaaaaatagcaaaagtttccctaaaatttaactatagtcacacacaatttgactataattttcaaacccatcttcacgtaccaaagcgttttctctggctattctactatagacaggtaccctatttgattcgaaccttcgagctctcattttctccataccttctctactcacaggaacacattttgaagagctttgaagatctcttcacctattccaggttagccttcttgattcatgtttagttttcaatttagttgtggttttattctagcgcatttatttttggatgggtttgtaaatattctatggagttattgatacttgtggggaaatggatatggaggaataaataatctgaaataaatgaaagagaagattttgaaaaatgtttagaatttgtatgaaatttatttttgttgtagaaatattggtaaagtgggtttgataaatatttgaatgacttagaatagcatttttagggttttggtgaagtagaggagcattgttcttgatgtttttgatttttttctataatgatgtataaaatctgaatagtgtatagggactattttataattgatgtaatgcttgagaactagtggtgaaatatagtgtgtattggtgggtatatatatattttgatgaagtttatttttgtgtttagaaaaataacttttttatttataaaacatgataggaaaaagaaaataaaaggtaaaaaaaaattatgtgttttgtgggcttggactaggaattttagattgggcatttggtaaaatgttaaataataggaaaatgtatttttgagtatttgtgtccatccttgaattgttgagtagcaaagaatgtgtttattgtgttcctcatccattttaagattgttgagataggaaagagtgtagaccccaagctatgtattcatctcgaaattacggaattccaaagggggtttatctccatgtagatggatattttctaataatattgttacttacattgagtagtggaaagggggtacccgtcattctttgtccctagtatggttgttagatcagcacattctgatattgatagtggtcgctgacaggttgtggtccttacggacacggatagtgattttgatcgagaggttccggatgcctcgtctctcattcctgtcaccgtcgcagaagagtactatggtcaggatgtagacgaccatgatgcaattgggttagcggtggacgcggaggaagtcccagtaataggttatgccttagcccaattagtgaatgatgatgatggaccgagtctcctaggtaaatcacagagtattttacgcatcaatctcagctctaaattgacagttccactcctagctcaaatcagattggcttatggcattcctcataatataaaaatgaggctacctaggagggaggaacgaataggctgggatgtttctgattggtgtggtatgtatttgtatacctttttttgaggcttcaggtttccttttccaccttttgttttgtcgatctcgcattggtatcagattgctcctagccaactgatgcctatttcttggagattgcttttaagtattgagaggttctctgatgtatttgagataagtgttgacttagtagaatttcgtgctctgtacactgtaaaagaacatgataaagaaaaggggaggtatagttttgtaagtcgaaatgaggaccagtttttaatttggaaaccaaaatctgcggaccgggattggaaagaattttattgtttcttccatggagaagaaatgttcacacctggagctgataggttccctactagttggagggtgctaggtgggtgccacacattaggccactatattttctagcatcttgcattttgtatgtgatccttgtgtttctaattcatttgcatttccctattgtaggtggtgaatcaaggaccgctcctgatttgtcatcatagaataaatgaaaactgcgagagatttttgcaatctctcaggaggataaatggtggaaaaaattgttgaacgagaaagatttggcttcaagttttctttggagcaaagtcgaggggcggacagaaggtaatttccttatttgaccgagtggtcgaatttctgttttcttattgaagcgagctttagagttgactggggccaagttttttattcttgctcatttaacagaggaagaacgattctaacagaccaatacactaagaggatgtctttcataatgccgtcctcttccaatattttggcaagagccaagaaggccacgactcaaaaaattggttccgacgggcaatcatcaattacgggaccttcaagtgcttttgcatctccaaagggtgttgttacttcgaaaacttatgccagggaagatccaaataagagatgtagagttgacttggggagtgacgacgaagagggcactattattccaagaaatatttgtgtgcactcgaatccttctacgattgaaagacatgttgaggctctcttgagtcctctagatgagaggcgtttacatgagcttggatgcgctgcatcttctgatgacttggtctcttcaatatatcgagtaagtatcttttcaaagcttctttcttattgagatttttatttgttctgatgtttgtttgttcttgaaaggctctttccgatgcaatttttattcgtcgagatcgcaaacaacttgacaaggagaacaccgtccttaagaagtctaacaaagtgcttcaggaggaaaacaagaaggtcattgaaaagcttaacactttacagaagaagattgaagagactgataaagagcttgtaaacgaaaaaggagaaatcagctggtttgtatgctcagctagatgacattgcatttaaagctatgtgtaaagctcgcctagagttgttcaccgatttcaaaaaaggtaggtctgctacatggaagggagatgaggagttagaagtttataggaaaatgtttcctgattcagttgcctctggtgacgaggaatctactgcttctgagtttgacactggtgttcctgaggctgaagaagatggcaatcaggttgtcgagttcgacaaaggtaccattgaaattccggttgattctgaggcggctcattagtatcctatttctacttgttgtatgtccattttatttgagcgatgtcgtgtcttatttatgatgggaaccttgtcgttttttggacttttcttttatgtgtaatgctctatgtcgaactcttttggtgtgggtttatgctctttggactgaactttcttgatgtaggactttgctctatgtattgagctttcttgatgtgtattagatctctttgatgcacaactttattctatatgttgagcttgtgtattgttgtttcttgatgtaggattatgagtatcattcactaaattttcattggatgagatgttttattaaaatggagaatttgatttgatttgatttgatttgatttttttacttttgtatctataaggcagtcatgtggcatcctgtactagctacgattcttatatctgtcctagaattgtcacgtagcaaagagtgtcactctaggactttcaatctgtgttggggttcaaacatccttcataggatttaaggatccgtccttgaaatgtcacgtagcaaagagtgtcactctaggattttccatctgtaaaagaattcaagcatccttcataggatttaagtatccgtcctagagatgtcatgtagcaaagagtgccactctaggactttccattcgtaaaagaattcaagcatcattcataggatttaagtatcagtcctagagatgtcatgtagcaaagagtgccactctaggactttccatccgtaaaagaattcaagcatccttcataggatttaagtatccgtcctagagatgtcacgtagcaaagagtgccactctaggactctccatccgtaatggaatccaagcgtccttcataggatttaagtatccgtcctagagatgtcatgtagcaaagagtgccactctaggactttccatccgtaaaagaattcaagcatccttcatagaatttaagtatccgtcctagagatgtcacgtagcaaagagtgccactctaggaacctccatccgtaatgaaattcaagtgtccttcataggatttaagtatccgtcttagagatgtcacgtagtaaaaagtgccactctaggactttccattcgtaaaagaattcaagcatccttcatatgatttaagtatccgtcctagagatgtcacgtagca

SEQ ID NO: 15896 - DNA, 1954 bp, Cannabis sativa
caactctgctcactgctttcttttcttttgcccagtttccattttcaaagttgaaagttctaagcatcatcgttcagatcttcttcaacctcttctttctcacgccaatcatggaaaatgacccaaattcgaaggctccaatcatcgactacagtcaaacccagcgtattgttcttctaatcgatctcaatccattaacattccttaaagacccaactcattttctcaactcaattatctcttcagccaaaactctccttacatttcctccacttctctcttctctctttgctttcaagcttttcttttcttctctctctcctcttctatcttcctctaaagtccaccaattcatatctaactccaagctttctctttctttcgaccaccccatctcttcatttctctctatctcacaggccctcaatgctttacccccttttaataatgataacggaaacccatcactggattcttctcctcgggcttcctgtgttgccgcttcaatgcgccagctcgtccacgactacgcatgggaccccgttatccaggaacctgaatcgggtatgcttttgaattgtgattcagttcgtgtgaggtctaatttggttgttttgctttcacctttttgtagctcagtaaagtcattgtctgagttcttgaatgtgggaattaatgatggatgcttagaaaacttgaatagtttctgtgaaaaattttctggattctttgctaatgtgaatgatgcgcttgttagtagggatattcaatttagttgggttgatgttcgatatggaatgggtgatgatggtgaggttgggattgatgaatcagatttgagatttaagttttttgagagtggggttaggaatttgggatggggtttttgttctactgattccattgttcttggttcagctcttgttccttttggtttgatttatcctaggattgcaatttcacccaacaattttagttgcaatgactgttctaagaagcttcatatgcaattgagtcttgagatattagatgtagctcagaaacccttggaatgcaagtgttgtgatcttgaacttgtcaatttaaaacttttgcctagaaatagatccgataacgatgttctgcatatactggaaattatgaataaaagaaaaggaggtggcgtactaaatgaaaagttgtggaggaatttcggtgatggagtgaacaatctgcaggttaaggctttgtataggttcaacaagtttgagaaattcaaggaccatctatctgatcctatactcgttcgagaattttctttgaaacctgagaaagctaaacaagaaagttgtggtgatttttttgctgacaaggtacttgaattgatggcaactgaattgggtgacatcgtgcccagaaaatctgcacccatttggcagattctctctagttttctctatagggaaggttattgggctttggtatctctttcaaataacagtggacattccttaaagggtatccttaagcctttttctatttcttctgcccttctatttattacaaatgatgagttcttgccacacatggtagtggaagattttgatggagcagatgtgactccatcaagttcaaagacgacagttgagattaagcgttccggtagggatgggaaaaagatgaggagcaaaagaagttttaaattgctccaagaccaaacatggagcagcttttgtgcagcagcattcgaaaactcagggatagaattggaggaggcttatttctccaggggatgtaataactcaaaaaagttgagatttctgaaatgctggatgaagcagattaagaagtccaactgttcttcacctgttatagaggagaagtccaatccgtcccaggaggttcaaataggcatcaatgatagattgactgagttgcatcaagaaagccaacaaccaattttgtctgcttcagc

SEQ ID NO: 15897 - DNA, 13017 bp, Cannabis sativa
  modified_base (12703)..(12704): a, c, t, g, unknown or other
  modified_base (12815)..(12819): a, c, t, g, unknown or other
ttttttaccgattttgaaaaatatcacattttttctaacgtaagggcccaaaaaaaaatttccctatggcccactttgtttcagggtcggccctgagttaagttaacccacgagtgatcaattaatgttgcccaccaactccaagttggacctaatatgataatatacaaactgcttaaactgtttttgatctttttttgaaagaactacttgttcattagttaagaaaattgatgggaatcacagggggattttcttccccttgatacaaaacagccatctcactagaagttctagcggttttagctacaccatccgtaaaggaattaaaattacgactaataaagaaaaagcgaacaacagaaaggtctttcattacattgaaaatacagtaaaataaacttgataacttccaatcaggggccttcttactagcagttagggagtcgactgctatcttcgaatcagacaagatgacaacttctttccagtcattttcaacagcccagttcaaagctaaattgatagctctaaattcagcttcaagagctgagttaaccttaatattctgagctttgacaaaccagcaacccgagagccggttaactgcaattgctgctattccagcagtgccattcacccacgaagcatctgtaaaaagcacaaaattcacctggtcgacaaggggaaacggagacaaggcagaaacgggacctccttgtgacacaagaagctcctggatggcatcagtagcaggagaattcttgttttgaagatcctggaaacacttgtcaattttaaccaaagcagacatgggattgacaggaatgctgtgtataaacaaagcatttctttggtgccatatttcagagaaaaggcagccaatatatgtaagcacctcattcctgcttgcttcaattgacaaaagggatatcacattttccacccagcataacaaattacttcctgggataccttcagttttgatagggaactttccaccaaaccagagggacttcgagtaaatacacttacagaaaagatgcagtctcgattcctcttcgacatcacagaataaacaagttttatcagttaagaaatgaagtctatttttagttgggatagcctcattcaaaactcgccatagcataattgaaactcttgggtggataccagcatcccaaatccatttccaaaggtccttagaagggccaaacttccaaagatcctgcacaagataagttgatttgactgaaaacattccatgtctatcatttttccaaaaaatctgatctttgaagggagaaggaatccttgggatattgaggattcgatttcccaactcaaaaccaaaaatctgtaaaataatctccccattccagcaatgatcaatggaaacatctgccaaggttttgatggtgtaacctctccccccaagaccgaggcagcaactgagatcgagcctctgaggatcgtgtctcttgattggagaatgcttttccattgatacgaatcgttacttttctgtttcacgcaccagaaatcttcaaacttacagtatttcttcagtaagcaggaaacccaaaacttctccttatcagtagcaagactccacgcaagcttagacattagtgctttattcatatcttcacacttccttaaccccagcccacccgaaactttcggttgacaaatctgatcccaagctttaagggctaagaatctattcttctccacatttcccaaccaccaatatttcctcatcagtgcactgtttttgatcagtgcgtgtacactacagtagaactgtctttagtttttatggggtcaaggaccaaaattttataaataggccttttgtttaagaaatgaaaataaatttaaataagttttaaattgtttgaataaaaaaaagtggacgtcgggattaattatttcacaaatacatacaaattataaaaaatatgattgtatgaaattttaaatattttacgatatttacataaatacggtctttttataatctgtatgctattttttgttattgttttgattttattttcatattatttttatatagttctttttttttgtgttgtttttataaaaaaactaaaaaaaaatctttaaaagtaaaaatctaaaaaatttacaaaatataatagtaatttatgtaattatccctatgtcaaaaaatatggtacatgtcaaaaaccctatatgggctttatcattaagcccataagctttccaatgtagcccaataacagcccccatctaaagcccaaaaactataaaattgaagaagaagccgagctcagcgaaatctcggtgagcacatctcaactcggatacggcggagacggcggcgacattttgtagcagacatggtattatttgttcttatatctgtgtacaattttgttttcagttcttatggtgctcgtatctaatcgtatattgtagaaatattgtttgctaaatgttcatatttttttggtttgaattcccttttggcttagctttggatcgagtgaattcaattagtaattgtttcctatcctaagttgattacgagtttaacaataggagtgatattaaatatagtaatttaaaatattttgtgtaattagattttgtatgaagttcatgttgtgaatttagtgttcttaaacttgaatctggatgaattttgtgtgattcaattgtttcagttgttagaaacgtaatttcaatttggggatatgttgttatgtagtacattcaaaagaagactatgttccaaaaaaaggaaaaatgaagaagaagaagaatcttgactggtttggttttgatatttgtgaagttagaaatggaagaaggaaacagtcagaatcagatacagaggtcagatattggagaagaaaacacccaaactttggaatcaaatagaattacagaccaacatctgttacagtttctagattcaactgacgactatttaacccaaatggattcattgtctatgatgctacgccaggtgattattccctaacttgatactctgagctaattgattgttcattttttgtttttttggtaagattgaattcactttcaagaatatgaagatgacagtatttatgacagggatggtttgaactagccagtgcacgatattccatgggtgcgtcgcgtgtgagcagcgcaatgttggacttaaattctcattctgctgctacttcagtgcaagtttcagaagatggtaaaacttgtgttacagctctcttatatctttatctatctgcatctttgatgtatagagttgtctaataatatattttacagttgattcgggtgttcggaaagctcggtttgcattgtgcaaatggggttcctctgataatgtaaaacaaggatttggagaggcaaaacttggggatgacagcttgcagctacgacatcggagctcttctcctttttctggtataattgtctttttcctctactcatttttgtgcatttcatcattcaaatgaaaagggaaaaatcacaatatcactttcacattatatcagtataaagttatattgatcctgagaaggaatttgctaaaattactgtaaattctccctattgatcatttcccattttcattgtgaaaaatgggtgaactccaaatttcatatgtggctcatacatagagtgccagaacccatagtaccttgtgtcctctaattttttgttgttttgtttatgttttgttttgagtgaagaatcaacagagaaagcctcaccacaaaatggagctccacttatagttgatgatcaagtaagtaatacagtcttttactttagtatgaatcatgctgtccttatatagagcatatatttgcttagactatggtaatactttatagtatttgaattaggctacatatacgggtgtcaatgtcatactgtgcactgatgctgcaatggttgttttcctattgttccttagattcagaaggagcgatcgaaatcattgtctgtgtttggcactttggtttctccaaagcttcgaactgcccaactttcatttgaaacaggttaattgaatgagtactgtagtttcgcagggttgttttcgaaatctctatttcttcattcaattgattgattgtttttgcttgttattcttatgtagcactggagaagcttgtagagattgccaatgcacgctcaactatgctatctactttcgatcaagtgaacaaaaaactggaagagacttaatacttaccccatctcaactttatgagctcaaacaaagaagagaggtgttttttaagtgcatacggcctcttattttctaagattgagatattaaagttatgaaaaaccatttggataataatagcatttggtgtaattttggatgaaccaagtgggggatagctgaaataatcaaatatgttgtttaagttcttcacagacacaataataattaataattattataattttttggtccaggagatatgagaatgaatgaagggtatcatgatttcttttagttgattacctggtttgaagttttttcatgggattagaagagattcaatgcctttccatcattttattttaactaataactttttactttagttcgagaaattatttaatctaagtgatttaatgaattcaacgattaaaatttgaaaacaataggggaagagaaagctcaaacatttaaatgaaagataaagtttaaaaagcaaaatgcttaagattgacaaaagttttaacaaacaaaatggatgtttaacatgacaacatatatataactctatttcaaaatatccataaaaacaaaaatgacatagtaacacaaacttaaaacagacaagttccctttccctacttgtctccacctatctcaatcagtaaatatggaagaaaacaacaatcagtaaagattaaagtaaattcattaatcactaaagtgtgtgagaagaatcaatgaataattatgctcactcaacacattctttatcatttctcttctccacccaatatagcatttctctatagcatcataggacataaacttctaatagtattaagttattaacaatgtaaagcgtcaattgaagcacattcctgtactataattattttcaataacaaaattcaagagtatataacaagaaatttttataaagacattttcttattctttgatatagatgacttttgagagcatacaatagttaatatatacttgtgtgtatttgattgaaaacttttggactttattttttatttaatttatttgatcaaatcttaaaaaaaaattatttcacgtgataaaattccatcaacatataaaccaaacacagttgaattgaattgtataaagtaaataaaaattgtattgtattaaaaactttccaatttcactggaaaaaaaaaaaaagttgtaccattttgaatgataatgcctttcttaaaaaaaaaaaaaaagaaagataatatcaatccaacaaaactaagtttaatcctatctataattaaggtacaaataaaattaataatttctatctttcaaaaatttcaaaagcacaaaaaaaaaaaaacaaacttattctcttttttaaatttctttatcttattttttttatctctgattttcactttcattttctcaagaaccaaacaaaaaaaaaaacaattttcttttctttcaatttctataattttagtggtgagagttaccgtgatgttgtgtatacttttttattgagaggtagtttcctttgttgatacagagattgtttctacttttgaacgaaataaaaataattttttttacaattgttataatgatgaagtcatgttcaatggagttctttctaacttcatagtcttcactttttttttaaaaatgcttgtgtggaaaataaatcaattaaataaaaaatgtcaccaatcataaaatttaagtagttttgctttcaatatccctattttttataccacccctatatacatgtatttcttcttcggatgtaataaaaatgtaaaaataaggtgtatttataatttttttcttaagttgcaaataaaactcctatttattaaggtacaatttaacattgtgaaacttcacataagctttgaaacttcaactttgatgacaataaaagtttgtctttataatttattcttgtccacacaaccaaacagcaccagtggtctagtggtagaatagtaccctgccacggtacagacccgggttcgattcccggctggtgcacttatttttaattacttttttttttcatttttaagcaaaataaatgccagaagttccaacaataatagataaattatcttgtgtaagttgttggagaataaaattcagatacaataaagtatcgacattttgttaattggatgctttagtaaaattaaaagatgtaaggaattggttacctaaatttataaaaagatttagcaaaagaaatagaaaagaacactttgaatatatatatattgaacctgaattaaagtttagaatatttctattaaaaaacatttattataaagaaacaacagagagtatgatctgctctgtctgtttacaaaagccatttccccattattactaaaccataatcccaccagaaagaaaaaacagtctaaatagctttcaactgcctttggttcatctgatcaatggaattttaaacctgcaaatgcttgatggctgtgtgaacatccttatcgcctcggccactgcaattcagtacaactttggttccatcagggagagttgggcacaacttttccaagtaagcaagtgcatgagaagtctccaaagctgggataatgccctctagtcgagataaccttttgaaagctgcacaatcaaaaaggcatcattatagtatcggaacaaggattccaaatgtgtaattgaaaagcaaactagggacacaatgagcatcgatgataatgtttcgtatgtccataccttccaatgcttcagcatcagtaacactgtggtattcagcgcggctagcatccttaagaaaactgtgctcaggtccaacaccaggataatccaagctgaatgcaacaaacagaagaatttagttaaatcagaaatgtcttaagtcaccgaaaaaaccaggtaaatcaataataataccctgcactgatagaatgaggctcaattatctgtccatcatcatcttgaagtaggtagctcatagcaccatgcaacacaccaatttcacctttggtcaatgttgcagcatgcttaccactgtccaatccaaaaccagcagcctcaacacctatcaaccgaacttccttgtcttcaacaaactcatggaatagtcccattgcatttgaacctccaccaacacatgccaccagcacatctggttttccaccccatttctctagtgcttgttttcttgtttcaataccaatcactttatggaactccctgaccatcatcggatatggatgaggcccggcaacagaacccaaaatgtagtgggttgtctccacattagtcacccaatcccttatagcttccgatgtagcatcctttaatgtcgctgtcccagaatgaacggccctcacctatgtaaagtgaagtttagttttcaaattatgctcaataatcatagataaataaagaatcaaacaaatcatcgattcattaaaaagtgagttgccccttaaatttaagttcatcttcaccaaaaacaaagactgaaaatctgaaaatgagaaaattgcttatgaagattaatatcccattacctcggccccaagaagcctcattctgaaaacattaagtgattgtctttccatgtcttgtgcacccatatagatgatgcactccaagccaaaccgagcacatacagtagcagtggcgactccatgctgacctgcacctgtctcagcaatgatacgtttctttcccagacgcttcgcaagcaaagcttgggcaacggcattgttgattttatgagctccagtgtgattgagatcttccctcttcaggtaaatttgaggtcctttcccatcagcacgtttgtaatgctcagtcaaccgctctgcaaagtagagaggactctccctaccaacatagtccttcaaaatcccattcagctctttctacaacataaaagaaaagacattaatccagaaatttgatcagattcaaagacaaagtcaaaacaaggattgaaacatatgaaatggaatagggaaaaagtgaaacaacaatatgattaatctattctaaatgattaaaccgatacaattttaacgaagggtattataaagttcaaggtttcattgcaagcctcatcttaaacccaatagtattaacatttcctaacaagttaaagcaaaccgatactattgaaaattgaaatgaatggaaaatgtgaaactacatttccaaggattgaaacaaatatgattaatctaaatgctcaaaccgatacaattcatcttcaagccaaaagtatagcattttctagcaagttaaagcaaattacatcatcttcattcttcttcttctttctcaaaaaacatgtcaatcacaaccttaaaaattacagaaaaacccatttatttcaccaacttaatctccattcctcatagatagtataaaaaacaaaagcaaagaagggattctgaattaaaaaaagaaaaaaaaaacctcaaagtcttcatcaccagcgagagcatgaaaagcggtttcgagctcggtgagcgcatacatgagagtttcagggacatacttgccaccatacctaccgaaacggccaaaagagtcgggtcggggcagatctaaggtcggaggcgggtcctgcattactgggtcgcgaatgagggtgcaagagatagaggtacgagaagtagttttacggaacttgaatggcaaatgggaaacagagttcgatgaagaagaagaagaagaagacaaagacgagagtttgggaaggtttaggttattgcaagtggtggaagaagcagctgccattgttttctgcaaattaacaaaggaaaaaagggaaaaagactccaactttaaaacccccaaatatgaaaaataaaataataaacccaaaataaataaataaatagaaaaattcagtggatagtatagaagtaacgtcgattatatattttcattcaatgcatagaataggaccccccaatttgtcttaaatgttggatttttctgtgtttctcaaaatgttaaatgtaaaaagaaagaaaacaaattccatttttgactcaaaacataaaacattcccaaaaaaaaaagttgagatttttgtgtaccacatatagcaccaaaccaacttggtttcataatcttcaaaatagtagagttataatatatatttcgtcttataacagtgttgaaaacaattgaaagcttcaatcagacatttgatcgaacagtttacaggtgtacccgaagaaaagaaaaagagcttatataagggttaacaaaataagattaaagtaatcacttgatgctagctcaagtggccataggtgggtgtgtgttaggttttgggttcaaatcccaagaaaaatatggttataatatataaacgcttaaattaaaaaaaaaaaaaaacaaaataagattaaagatttaccttggcggttgagaacggagaaggactgtaaagacaaaagatagaagaagtactcaatggttgtaggcctaatctgcatatttctaagagtaaatactattttggatcttgtgtgttgtaaaaattattgattggatcttctattttgttaaatgacaaaatggaccttgtattttctaaaatggtaaaattaagatcattaactgattttttatcaaaataaaatttaataataatctgatctaaaaatattatgacaaaattatttacattttctttatttgttcatattttcaagttggttatattaaaaaaaaaattgtcaacatttgtaccattttaaaaaatacaaggtctattttatcatttaacaaaacagagtgtctaattagtaacttttgcaaaacataagatctaaactagtatttatcatatttccaataacaaatataaatcaaaaccaaaccaaaccgataatcctattcattgtatttaggctaactcaagtggtcataagagggtgcgtgtgttggaggtcctagatttgagtcccaagttatgtattataatgcataaacacttgattcaaaatatatatatagcaagtatgaacaaacacggggcgaagaattagtgaggagtgttctcctcgtctctatctccattacggattttaatccctattcttatttatttttcatcggggatggggcgagaaatcttctaatagggcaaaaatgggatgtggaattccctactaaaaaattaaagtttatattaaaaattaaaatgtataaaaatattaaattacataaaagttaaaatattacacattaattattattcaaaaaactaattattatctacaacttaacttaaaattcataaaaagatactaatatactaaaaaaaataaaatatcaattaaaaattataaaatactaaatgggtccccgtcagaggggagagtatgatccccgtcgtcatcccatttaatattcaggaacaaaaaataatctctgtccctgccccgttccctatttaggcgaggaattcccacccgaataggggcgagtccctgcggtaccccatctttatgagagaaatgtgcatccctaatagcaagaaagaacccaagggctctatttatatagcaaaaggataaccagatggccaagatgaagttcccatagtaatttaggggtagtgaactgggttttgacacggtacatgaacacgacacgaaatttatgggttaaggtcagaaaaattagatgtgagttgaaaacaaatcgacacaacttgatacgaaataaaaacaagtcaaacacgacacgacatgcttaatataaatttgacaatttaatatgatttttttaaataaataaaataaaaaattaataataataataaaattatgtaaaaatatatatttagtaattcaatctttaaattaaaaaaatttaagtttaattttctttaaaaaaaattgaaaatatttaaaacattttaatttttattatatatgcaaatatatatgagttttttaatgaaacctaactctattattttttctacaattccaactttagtaatagtaaaacgagttaaagtgggtcaacacaacatgattttttacgggtcgagttagggttgagaaaataaaatacgagtcaaaacgggtagatacgctgacacgaaatataaaagcaaatcacataaaatatgatataataaacacgacacgatgacatattttatcactcctaatatcatggcagttgagaagaaggatgacttctaatttgggttgaattatatttttggaaacaaaagaggttgcaaatgctttttaatttaatttagactaatttgtgccttaaatacttaagtttaattttttttttctagttgtagataagtatttaaatttaatttttaacgttaataatagctaagctttatttttggaacttacacaagtatctggttgttaagtgttaagtcaatggtcacatgacatggtcacatgacaatcttcaattggtacatgtcattaaatttttatttttattgagtactttgcagtgaaaatacctaagtttaactatcgattgcagataaatagttaagtttaatttttttgcgataataattcccaagttatatttttagaaattttataggtatctagtcgttatgtgtgtaaatggccacgtggcagattttgattggtctaagttaataaaatatttatttttatttaaaaattattttaaatattttaataaaaaactgatatgtgaataataacttataaagataaaaataattaaaattaattatgatatatattatttagatttaagttttttttaatggaatttaattacttaattttttttttttttgaatggaaaagttaatcttattaaccatcaaattcagttaccaacgtaggtagcaaatctaccggaacatcctccaggtgaaaaatacggtcaggatagaataaggatgattttgcaaaaacatgatattttttgatattgaagtatgatattttttgcaaaataagtaaaatattttctttttacaaattaagtaaaatagctggtgagactttaatatatgtattttatggaaaaaaaacgtttaaaatggtatgtttatttttggcttcaaaaatggtatatctattgaaactgaaaaaatgagacctatgtattattgtattgtttttatagaattatcttcttcttcttttttactcttttttttttttctatttttaaggactaaagaattgtagttatgtttatcttgataaaaataaggctaattaaaatttttgccgcttaactttaacatgtactaaatcatgctctctgaatttttctacccgttaaaaatttcccctgaactattgagattgttagatttaaggacttttgtctaatctcattcaattttactatttcagtgattgtttatgtactaaaccatgttttttagactttgatatctaccaaatnntgcccctcgaactttgatatgtactaaatcatgccctctaaaatttcatccatgttagacgttttttactaaaattatacaaaattcttaaggtggcgtttggttgggagnnnnnaaaatatagaaatatgaatgggaatgagaataggaataggaatggaatggaataaaatttaaaaaaaattctcttattacattggatggtctttccttcctttttaaaatgaaatagtcattccaccaaaatggagagggaaatttgaaattctatgcttaaaatgccattttattttttccctaaatgtatagttat

SEQ ID NO: 15898 - DNA, 1480 bp, Cannabis sativa
ttgacaaagaaaatgcaacaccaatcctgtttagttaatccactcaaataagcaaaaagacacaaataatacttacaaaagccttctttcttaatatagaatcacatgcctgatgcatggtttggaaacagatataaccagcattaatcacgccattagacctagcaaatccagagagagcaaaccaaggaactgcaattttgttgttcccagatactaagtgatacaatcctccaattgaaaataaagcatacaaactctcagtatatctgcagaccaagtaaaacattagctttgttgctttttacatacatcaatataacatggaaacgttagaactattacatggaggaataaaatattgatgctggattgaagcaaaacaagagagaagctctaagtgctgcatcgcgatccttcaaaacaataactgaaagcctattaggagtgacaagttgaaacaaaaactatcagaacaagcaaacaaagctgcgtatgactaccgaattacatacttcaaagtcaaactaaaaaaatgtttctattgtgatatgatttgaacttcattaatgctaagtagctcaccaatatagatacatcgctgcaaacacaaaggcaatgttattgatcacatagcctgttaaacccaaaacagctctttcacccataactggaaccaatggagcaaacactgaaacagaaaatccaacatttaaacataatgacaaaacttcaaataacctgaagaaactgatgcaataggctaaatgaactaaattgctaacctacaataagtaactaagttagattacttataattttgaagataaatgttgaaaatccaaactggatataatcaagactcatatatcttcggccagacctgtcctcgacaaggcggagatgcaaatgggaaggaggggaaagaaggcgtatgattgctcgtactcatagccacactgggcgatgcggacgaagtagacgccgtcccagacaatgctggattcgattgcagacgctatggaaggccaaagaagatggtccctttgagcatgatgggttgaggtgacgtttgataagcaatttggatttagaggcgcggaggtatcgtaggggctgagaaggcttcgccataagatgattaaggtgagaaggatgagccttgaggctattgcagatttgagaagtcgagcttggtgggtttgggttttctgagagttttccgtgtgcgacatggcggagctttagttgcagagtcttggtaagttgggatgatcgggtcccgactcccaaatcaccaaacgacaaaacgaatgctatttttattttaggatggcaattatagccgcgggtttaggtacatgcgagtacctgtctttaatggagtgagggcggtaggggtgttcatcaaactgcttaaaccgctcaaaccacccgcactgcaccacatcgcaaaaaaaaaaatacagtttgaattttt

SEQ ID NO: 15899 - DNA, 8481 bp, Cannabis sativa
aatttagagtaccctcacattggtttttgattctattaattctagtgtactatatatctctaacattgctaaatcgttctttatatcatcttcattcggtttatctaatatcataaaaatcaacatttcacatatttaaatttaaataaaaataacgctattaaattatatcaatataaatacatgaaaatgttaacacaccctaagacatattcgagcaatactgtaaaaatataatagctagtgggacacctatagttaaaaaacctcttcaaatatttcaaaaagaaaatcttcttcttcttattattataactatatttttgggtggatttttttaaaaaaaaaaaccctaataaatatccctttttgttttctagccagtgatgccaagttctttaaatgccacgtggcggcggctaactcatatacgacattatactatgcccaattttcattcattgatttatatatatttatattttatgtttcgagtaatactagaaagaaatacttgtctataacaacagcaacaacaacaacaaaccatacaaacaccaacttcacaagatgatttcacaacacacaataatatttactccaagtcaaacaatgattaaaatatttatgctgttataatcatatgacataattgtcaaaatattaaatttgatatgaaaacaagggggaagttaactaagtatgatacactaatttccaatattttaattacactttacatcaaattaattgggtagtttttcacaatatcaaatataaatttggttttaccaaatataataataaaaaaaattgtattaattgaagtgcaaaacttgcttaattcactacaagaaaaactacttttgccgacgcataagctcgctggcaaaagtacgtggcgacataatttttcttaactaaataattagtgtgtatatgttgtactaattaattaaggatacacatgtatccacacactaaaaaaatgtttctttagtaacaactttttagttacaatataaattttttgtgattaaatgtaacttttagttataataaaaaattacttgttactaaaacatagtataaaaattgtcactaatttagttttagtcacaactaaaaacacatttagtcacaacaaattgtatatttgtaactaatacctgtaactacagactttttaatcacggcataagaattattatttataattactcacaatttttttacttttaatcataagttttattgtgataaaaataaaaaaatttgttgtcactacaatgtgtccttgtttattagccacacaattaaaatgtaaatgtcccacaaaaatataaaattatgtggctataaatagtgacacatgcatcataatgtgaataattttaagatgattgggaatgtcccaactattactctatatgacatttttttttttttgaactcactctatatgagatttcaattatgccattttcaactcaaatttaatgtgattaaaagtattaattttaagtttttttataaaaaaaaaattattaatatctaggtcatcataaaatcttagtaattgtgactatagtaatttttttttataatgcatgcatgcatgtcatgagttagagaaagaaaatactagtactaaagacactaataaaagagaataatattctatatggacagatctaatcaaatatataatccatatatttatatatatctataggcacataaattaaatatgtagttaataagaagccattgcagtcaccaatgtattatatgcacactttaagatatgctatgtacattttaagctagctaagacatatgagggtctaccacacctttcatatactccctatttaatacatatatataatatagatataaaaatctaagtactagtacactatatatatagtaactctgaaatgaggtaaatcttttaagttcatttactaattaacaaaccgagactcttaaatacataagactaaactacccaacccttgtttataaataatatcttcatttatgcctggtgtgtgttttgtttgaaaagtactattttcatttattcttttgttatataatatgaattttatttactctataaaaaatttcaataatatattgttgttatatttatctttagttttatgttatgagttgtatggactgtgcattatgtatcagaaaatttaatgccatatgggttcataagttaatagaccatatcatgaaccaatgacatgacaccatgtgatatatatattatccaaataataataatatatgggccaccaaatttgttgcttcaaaataagtatccaataatgtacgtacctgccaacaaagaaaacaaataccagaaaaacactccatcagtaagtatatatatcaacattccatgcctataaataatataaaagtagaaagacaaaagtatatatttatagtattgtaatcaatttatgcatatatatgtaactattttcaaaaggtttaggtaactttcatagtcgaagtcgaattgttatcatcatcagtaatagtaaacttttctcatcacttatatcaatcgcttctatcgataaagtgtacacctaagctagttataaaaaaaataaaagcaaatctatagtactcaccccagtagaaacaccaattaaacacggttctatattccacatccacaaatgaggtaatgccatgaacacactcactaatatatatatatatctatgttttttttcttgttcacaagctaacaagtacaaaattaagaaaaaaatgtgccaataagcaagtgtttaattataattactgttaattagtatttcattatatatatatacctgaatttcgttctcattgtagataaaacttaagagatggaagatctttatcattaaaagatattataaaagatcaacggcccaaagtgagggcagcttcaacgtcgagcctccatgcaaatcctccaccgtccattctccacaaatcacaaggaactattactcgtgagtacttgttcttctcattctcataataataataataatgcagcttaacgtgtctagtcagactcgaataaaaggacggtaacttctccttaattaccaaaactacccttatctccggtaacagcccgtcattattattattctcaccttcttccctcacaaccatccttttaaaagctgcgttcacccacaacacgctgtttgaaccgtccgatataaaaccaggacacgtgtccttctccagattcctcttcacactctccatgtccgtaccactataactgctcccaaaatcacgattatcgtcgaccatgcatgtgcctgtcacgcactcaaccgtcacccaagtgtgaaccaccaaaccattagtacccctgcttcgatctgactcaccgtagctttgatctgatcttttccacatgggtaggtcctcatgattctccacaaaataactactactgttattattactgatgagatctgaacggttcagatcaatcttctctggcaaaagttgcagcgtcatcaccgtacgatcatcatcaacatcaaacctaccgttgttgttgttgttgttgttctcgttattttcacgagatatcgaggctggctttttctttctcgtgtaaccactatttctacgaaccctaacgtattttctcttctttctaatcattccattagaataaagggagctgctcttactattattattctgatcagatcccaaaccagtgccgtccgatcccgaacccgaaggtttcggtgcaatcggccggaatctaagcattattctgttcatcactgacttatcgtgcgcaccaccagcgcatcttatcatgctccacccctctggtccaccgttcatcctatcgtgcgccaccaaccctagggcaaatatacctagaaagctctattagctctcatacctgtttttttttttttttccttttctctctttctctctcattcagagtctttttctttgagatggagcgttttgacgataatctaagtgagtgggaagttagagagggacacgtggctacccgactatagcccgggaacagcgacttgacccgattggtcagtattattaaaaagaaaaagaaaaagaaattagatgataataggagagagtggggtggaatccggcgtaattgaactcagggtatggtcccacctatcaaccaatcagaagcgagaaggtgtccagcactgccgaaagaaggtgtacacgtgttctgacctcggacgtagcgtagtggaaagagcctttggaaaggttcgagatataataacacgtggttttattctattagcagagaacaactaaatcagtttcaaaacaaatgaggtaaaaaaccatcatcttctaagaaggagcgcgtgaaagacacggataaaggtagagatggccagcgttgggaattaacagagagtgagacacacgcgtagaagagtggaaaggaaatggctttattctttgaaattcctttatgtgattggtgggtgtgaaatgaggacgcgtggttggcctgtgactatgtggatcttggtctagatttttgatgtcatctgtgtgaaagtgacctttttttttgtttggagcacaatgagtaatcctttaatcactgccacgtagcaatgttatccaatttttgttactgttgctaaatacctgaggatattagcgattagagtaaaaattatttaaacgtgctcacactaattttttttatctcatacatttatattagaattttaaaaaaaatctatttttttattattagagagagaaaaaaacctgctacttttaccactcgaaatatataactatgcagtagcttaattacgatgtatgagttttatatcctacattctttaaatttttttcatgtttttctttttttttttttcaatttattctttgtgaaatgatcgatatttcggactcattccatattctttctaatgtggaaaaccaaagaattggaattaatttgactattgtacgattaaatattaatttgggtaatattattcattgtgattgtgatgatgtgtgtgtaaagtaaatatgacacgcaaacgttaacatgtatatacagaattgaagattgagacaaaatgctttcactttcagacaacctatcgtacttagagagagaaaataaagcaaacatttttcatccttggttaaatatttttttgtttaattcatacgaaaaacattgacatagactttagttgactttgctattactgtgtctgtatgatgctttatttcgagagtgtgatgagtcgaaaaccataacttatttaaacaaaccatgtatatataaaagatttatataaagtccaataaaagagttttaatttgtgaaacattaatacatggtggcccacatcaattacaagtacctatctcagcctatttataattttgtttgattatttattttcatatataagatataaaaacatgactcaacatacaatgtatacacaaatatacatttatatatgtaataagtaagtgaactgagtttggctcattacaactcaagaatccgccaaattcaaggcacctataatttatcacatatatcaaatatttttctactttgttttttcttgaaacataatataatctagttaagatacgaattagatacacctttataattaagaattgacatatggggtctattatcatttatatataaagaataatcttggccattatgcactaacacatatatacggatacaattatacaagtcctgtactgttatcattcacacacacaagaccttataatttttaccaagctgcatttatatttacaaaccaatttttattctcttctataccttttatttatttgtttttctttttgggacctatgccaaaaatagaaaaacaaatgagtcatatcgtttgtgtgagagctataaataccctctttaaccttcaaatcatcatcatttgtgtttagtgagaacaattattctggttttcacaagagtattataacatatatatctaatacctacttacacatatattcatttcataccatatatataaattaatatttatagaaaattaaaaaaaaaattatgtatacctgaaaataaagtcgagagctacatagctcctttattctttaattttggtaaatcatcatcaaagtcccaaacccaaactgagagcagctttaacgtcgagcctccatgcaaaaccaccacaatccattctataaacatcacacggcattatcttagaacaaacctctttataattacaattatttgctctcttaaactgaaccctaactcgacacgtgaacgccgggcccattaggcccaattccgtcctactgatactgatactgttacgattattatcattattattttttatatatttattattattattattatttggtgctacgaccagccaaaccaccacctccggccaccacatctccgcctcctcctcttcctcaacaaccatctttttaaaagcaccgtttacccactccaccctgctaaagtgactgtccgttacaaaaccgggacacgtgtccttctccaaattctttattctctccacgtccgtacaacctaaccctcgtacatccatgcacgtgtcggtcacgctctccaccgtcacccacgactccaccgccgccgcacccctccgatccaaaacctcatcgtcaccggcggcctttctagggttatagttattatcattcatcatcagcttattattatcgttattatcctgtacggccgtacagtacatccaagatccaggagcaccataaccagtacccccgtttaaatctcgaccgtccgatttctccggcaacagctggagcgtgacggtggtggtggtctcttcttcttgtagtccagaagatccgttattattcgtaaccgttgatctcctagggtttttatcttttttattattaatatctcttcgaaccctaacgtactttcttttcacgcgtttactcggtcggagaatcgatgaagtgttgttttccgccgtgtaagatcctccggtaaccggtttgggagcgatcggtcggaatctgagcataactgggttgattatcgtcttatttgaagtagtagtagcctgaaaactggccacgtgccatccatcacgaccttccatctcttgaccttgcgatcttcttctttctcttctttctctttcttctttctcttcttttctttcttctttctctctctgatctttctttctgatctccctgtctgagagcgataatcatagctttggcgcggtggctaggtgagctatcaacacgtgtctagggctacactttcgacagtgttccattttgattggtccaaaatttaaaataatttaatattttgagtgtgtgagtgggacccaccataaaaaaagtgtttttttgcgtatcctgatttatgaatcgaggtctgttaattggttcttactttggaccaatcagagaaaagtacgtgtccactaatccgaaaaaagagggacacgtgggctttgtagcaggacgaagcataatttccctccaaccgaagtggaagaaaaggaagttcgagaatatggacacgtgggaattttctatttgttaagaacatctatattaggttggagacggattggatgtactgttactaaaacacgcgctgtttactgcgcgtgttttcacttggaggatatttttgcttctagtgcttttcattgattggtttagttgagtggatcccacttatttaaatgaaggaatttttaattttttgtttaattttcttaaatggaaaaaaaattaaaaaaacaaactattatttagttgaataaaggacacgtggtggctgggcctggaggacattgacagaggaactgaattgaattagctttattgctttttctttggttttggtctaaaagattataatgactttttttttgaaaataagattataatgagtttagttaattaattaatcaaccagttatatagtgatgtacacatacatatatgtttatacatatacatgagaagttagaataatgattaatttaaaacattttcgtaaattgcttttataaaaagctaattggtaagtaaactatgtataatttgtacaaagaaaagcatggacgatgtactttttgagataaaacaattactcagcttgaaaactctaagctaattgattatttttaggtgaggttttggttggaaaaaaataaaatgaaatgaaatacaaagaaaataacttttattttataattttatttgattttattttaaagtattagaatgttattcttattttaagtatgtttctattctttccaatcaaacttcacttaatgaggtattttgatatttgagtttgagttggaaaga

SEQ ID NO: 15900 - DNA, 6296 bp, Cannabis sativa
  modified_base (48)..(56): a, c, t, g, unknown or other
  modified_base (1217)..(1217): a, c, t, g, unknown or other
ttacattgttttagaaattcataattaggatgttaaataacatacatnnnnnnnnntctagatcctggtaaaataattccgacaatgtgatcctatggtaagctcttaccctagtatttctttgattatagtatgttttagttagctttgacatgcaatttattgatgtagtagttttaggttggatgaactttagtataaatttttgaggtcaacttgaagttgtctatgcttatttgatgtaaatttgatgtttgattgtggtgttgaccaagtttgagttatggtgatttttgaattactgtgttttttggagattttattgcttagaaataattcattatgacatgtataggtgttctggagcttattgaaagttttagggtagttttggttcgatttgggggtcttttgtttttctacagtgaaaaacggcaagctaccgtttttcctagtgcaagacccaaaaagacggcctaccgttttttaggcaggtttcccatttcgtagtttttctcgtgtttcctcgatgcttaagacttcgtcttgctagatatcaatggggaaacatttacttttgagtttaaagtccctgaaaagtaatttagagtatcacttatcagttttacgaatattgtgactttggggcctgtaaatcatcgagtagcagttccactcaagtttaccggcacatttgaatttggaatcgaggtaagactagtataatgatatgcatatgtgaatacatgtttagtgtgcatgttaatatttgtccgctagattacattgaaatagcaatatcagtatatttagagttatatggatatcaatgaatgtatgtttggcttaagtactgattaacgctatcacatcggtacgactagggtaccaagtataggttgatattatggtcaatagtactatcatacgaacgttctagactcagtttcgcgtgggatgcagggatatggttatgattgggtgtatggacgcttaattgtaatttggtttatatttatgttatgattatgcttttcttactgagtaaagactcacagttactgattgcatgtgtaggtaaggacaaagctaaggctgaacagcagtgagtgcgagcgaatgaagattgtacatatcggatggttagacatggagtgttcgatcttcgggacagcggcctgcattttgaacgatttgggatcctcattttggccaancagctgtggaagcttttactcgagggggtgctcttggcctaatgaatatcgcctattcgggtatttatcagtggtggtatacaatattatcttatacattatattatacatataatagtattatataagatagtactattacacctatattatacttagacacatatttcactatttctagcatttttgtcatgcaattttgaatacttgaacggtcaattctttattcttttgttttcgtattagctcttatcttcattattatgtaattaatatgtattaatattcaattattctattaagaaaattataatttaatcagctggctgaaagtaaagggaccgagaagaattttggttgatgttttttatgtttgttctagtaggtgccatttatggcattgggctaaatcagaacttgtgtatatttgagaaaaaatatatagctccaatttatatagatagaatcatcaagagaatctcaaagttagattgagtcttgtttaagggaaaaaattatcaagttataatagattgatccttaaaaatataatggaactttaagtgaatttggtggagtttattggccaattgattgtaaatgtttagtttgattaatctttattgataaaaaaaaattaaataaaaattaacataaatatctttatttaagaatggaaacttaatgttaccaaaaaaattgtttgaagttcaattaaaaaaaaaaaataaataaaaattgagagagtacctttccaaaatttatatattttagagattattttacaaaaaaaaaaaaaaattatattagaggactaacctatcaaaacctatatttgttgaaagagctgctgtataaataacccaaatatgaattaatttgatgggaaaagttatctgagccaaatcaattaagagggttgcatcatttcctttttccgctcctactttttctcgaaaggcacaaagcaatgaatcggaaatttgaatcctggcctggtgcttctcgcccgttatgagcttcgtttttgttttatatactgaaaaacatttgcataaaagctatgttctttttcttttttcctaagacatgaaagctaatttttcttttttgaaagctaagttcgaaagtcccttttacgaattggaaaaaaaaaaaaaacaagagcgttattaaacatgtagttttctatgaaaaaaattaaaaaaaaaaaaataaacctaaacacgaaacctaaacacgtagttgtaggtagctttcaaaaaaaaaaaaaaaaaaacctaaactagttgtagttttataataataataatgacctttctgtgcttttatggcgtcttgaataataaagtttttcagcaataataataaattaaaaacatattggaatatgaaagagtaatacagcagacagagagacagataggcccaataaatataatcccctgatttcttcaactttgttggattgcgttatatgtgacaatggacagtccaatttatttaaaataaaacttggaatataataatgtggaaagaaagaccacttgttgttgtaccattgcttttcttcttctggcgaagagaagttgtagttgtcaaagaagagacgagtatggaagaagaggcgaagaaggagcttcgtatgctggaagaacaatatcccaaccgctatgagtgccttaagcttgaactcaaccacttcatctctctccttcactcctcacatcaagcaacttctcagtttattcctactactactactgccactactcgaggttaactaatttaatccacttctacataatataaatatattatatgtgtactgattactgatgggttttgtttggttttgtgaaaataataaagaatcaacgagcagaaggaagaagaagaagaatactacaaccgaaaattacaggagcagatacttggtggaatcaattgcagaagaccaaacagggcaagagttagatgatgagaagcagaagataagtaagaaaagggatagagttgaagtagttcttgagagagctcatgcttgtctcagaaagattaaaaacttcaaagcatccttattatcatgactctatcaaagcgtgtagcatgagcatgacatcaccatccattatccagtatacttcaatatcaatcagtaaattgttctatggtccatgtctttacaaagaaaaatatatgttacacacaattaacattgcaaatggatggcataccttcaatttctgtcaatatataaattacaaagactttacaaatggaagaaatattgccttcaatttcaataaagtacagcagtattttggacagatatcattactctaaaagcagttccaaagcatttacttaaaaaactccaagaaagattaatacataagttatacatccaaatcactttcccactctctcagttcttcatgacgagcaaaccagacagcagttatgtacatgttattcttcaaccctcaacacacctcatttacttaagaaaacaaaataagaagacactaaatggctggtcaggtacttctttaccgttaatgtgtccactcatttctgtagttcgacagatatgagagatcagctaaaagtgcaatcttcttctgttcttactatccaaaatcttatttggaaataactctttctgaactattatccaacatctccttaagtgtcgttttcttgtgctagttgcaataagaactgcataaatcactaactagtgcaacacctaaggagttagcaaataatatgaaacctgaggaaacatgatactgcaatgcatagagctttagggagcatccagtatagggttagtggaatgggaatgtccaattgaacctatattaggtaaattaatttgtgatggcttgagggtttgtgtttccaaatggaaaccaccttttagctttatttgatgtaatcttgaatccctccaacacttaacacttgaatttcatattctcttagccatcactgtcactgatctcaaaaactgaccatttagtcaaaggagcatcaaaccctaacacttttttatctttagatctgctgaaataaattgcagacttttttttgcttgcggaagatccaagattatttgacgccatttggagacgcctcccaacttcggctccacgtatttctgagggactccattcagcaaacttgggaaaggattcaactcgatcatctaatttggtcttcgagtatttcttcctccgctttcgaattttagaagtagcatcagaacttgcaggactcgagaaattgttaatctcgtttgagtgaggaaagtatctcttaatgaggctagtaacagatttggcttttgaaaatatttcacttgggacttctgtcattgatgtagaagcctgaggatatggaggttcaacttctttaaccaatgtagagtgatcagaaatcttgctagcatttacaactgcagtttttgtgtcagaactagtgcacttgatcccattttcattagcattgtaatctaaaaaccattctttcctttctctcttcgtcttcttgtttgatacaccatcacacctactcccctcaagtgtagatttatgactctgtacttcaatgtcctgatatttctttctctcaccttttgtactgctcttgtctgcgcttgcaaaggaattttcaacagctaaaccaagtaaacacgtaccaaaacatttggctgaagttttggcttcaacatgaagaaaccaggtgcccctcactccctggaaagcatacttcataggaattgagtcaggcaggtaatagaagcgtgactttttcttaacctagcatacaatggagtgctacattagtattgcaaaaggaaggggaaaaagaggtgaatcatgaccagcaaaatagaaaatatacaatgaaataaacaatcaaatatgcaccattaacccacaaacttctatctctcctgatcctgcaaagtatttacagtgcactctctcaaatttccctgaaaaagagaagtaacagatattaactttctgaagggaatgaaaacattacaacaagaagaatgaaagtgcagaaccaattatattataaagatagtagactgggtattctttaaagccatgctacatctacttacacatatagagggtaaaattttgacaagttccacttccacatgtctcaacccaatgcttaatttactctcgtttatgtttaaattgttgccagttaagatatttctcattacagattggtaaagatgcgattgtgtgaacaatatgtcatactcaaataatatctttatctttctttccattcgaccaacacagcacaactgatagggtttaacttgtgtgtttgtcccacgttcatgattaatttatgggatttatattagattcatagctaccaaactataacctctcggattaatgctaagtgtgtgattgaaatctgaaaaaagaaatagcgtagacagggaaaatcacttgcagaaaaaatgcagccattgaaacaaaatgacacactcaatcagtacttccgatggggaaatcatacgaaagagaaattccaagaaagtaaaagtaaacaacaaaaacatgcataagaaaccactgaaatgagcgatagaaaagacacaatgagataaatgcccaccaatcacaagggtagaacatgcataagaaatgagcacataaattgacatacatgaaccaaaaacatagtcaccacccaaccaataaacaacaaaattggtaactatgaacacaaaatgccgctagtaactcaaattaaaaggccaaaataaatagataaaaattactaatgtagtgaaaatttatgtttgtgcggtggcatactcttaaaatctactgcagtgatctctggagggacggccatagctatgcgagtgcctaagttggtgtctgcgaaaattgagactttaatatttgatgtcattgccattgtcgagccctcgaacccattctcagactgatacagatggtaaaaccataactaaaaggcgcctcacccatcacaggacccacaagttttttctttttttttttt

SEQ ID NO: 15901 - DNA, 3640 bp, Cannabis sativa
  modified_base (2366)..(2375): a, c, t, g, unknown or other
agttgcagcgctaattgcaagagggattttaatgtagaatttcgtaaaaatacgaaagaaaaaaaaaaaaactgtttagaagtgtaaaattgaaaaagtcccaaaaaattatcccttttttttttttgagagaaaatggaagaaaaagaaatctcactgtaaattataattaaaaatgtgtaaataaaattgtaaatttcatataagaatggctcttgattttttcccttataccaaacatagtataaggatagagcccgccctggctcttaacattttcctaaaagtaagccatacctaacaaaagaggttgcccaagacatgttacatactctatacaataagtatgatattgatattatatataaataaaaaatatatttcttttacaaattacaatgtcaaaaatggaaagacataggaaaacatgacattttgtataagtatattagccttttaatctaaactctctgctatatcttaattttgttgagttgggaaaacaatgcttactataatcaaagttcagaatacaaccggaccaaacacagggaatcaaagggtgtctccaaacgccattctctttgttttttattgagtggtctccctttacctgttttctctctatttattctcacatctgctatgccccatgtgcaacactttgtctccatatcaaatgaaacaagcctaaaaacaccatcactttctgaggatgacgaaccagatggagatggagttatctcactcgcatagtacttcacgtacatagctcgatctttgaaccggtcaaggtcttgtggaatccgaactaccctttcaacacccggcgatgacaccttgaacagaaccattttattcaaatatcagctataaagaaagtgattcattgcaatgctagctagcatctgttaaggaaacactgagataaaagtgaactgaccacttcccatgtcatttcggccaaggttttattcaaactagtcaatatatttaaaagcacaaacacaacatttttggcttagacaacgcctaaactagataaaacaaccaccaacatgagcatttgggctttgattgaagaattttatggctaatctggacaaagtgtacactgcaatgctatatgtttatccttaacctcagcatgaattcgatcgagtgtgtcagtcttccaaagtatgtatttctctatcatagagtgctaaactagaaataaaaaaaaatacaaagaaaatgaaacataacatagaataattagaaacgaggaaattacctctaaagacacattctcaggtattgatttagccagctctgcttcatctaaccgtgctcgatatgttgtggtaaaagcttctatgtcttccatagtgggggaaccagatctgtgacatatgattatggctcaataggaataaataaatttgtatggacacccaataaaaattaactagtaaccaaagagaaatgtcaagaacaaagtaatatcaaaataatttggataaaaatacctacaaggaataaataagttaaaaaaaagaagtatgttttgaattattgaatacaccatcacaacattgcaacaggattaacttgtaattgtgagaatggttgacaccatgcaacgtttgttgcttgcagtatcaatatatgccatgctactatcattatcatgaaaaaagtacataaaatataagttttctctctgttcacttaaaaatatataatcttcaataccattatccattaatagtttcaaatgatgcttacttatttgcaagtgtctcaatgcgcactcgaatggtagaatttaacaatgtcttgaaggcatatattttcagttcaccatcgaaggaaagagaaacttcttcagcaatctctaatgcctttttatcccaccatgttcctgcaagagaaattccaccccctgcacctccatctccaacctagacaaaacaaaacaaaaaaattgacagcgtacagtcaatcttcgatttcttaattcaaatttaaagcgaggtcagctcatgaatatcttcatcatggaacttacataggtttcagcatcatccgactcatactcatcttcaccataatcctcatcatcatctataatatcttctacaaatgattgagagtttcattcagacatgaagcactcaaaagcttttcgttaaatgctcagaaatttggaaattaaaaatagttggtacccaattgctaaaatttattgacaaacacaaatcatattcgtcattcaaagtgccttaaacaactactacttgtaatggttaatcttgccactgactttcacctcctagattactcagtcctctccctctctatctaaatatatatatatatannnnnnnnnntgtgtgtgtgtgtgtgtttatagttgatgaactatttatatctcttttcttttgtcaaaatttcaacttctttttttctcttcatcccattttaacaaataatcctttcatatgctacccaattcaactcactaaactatattttattcactcaagcattcaacacatgaaaaggtaaaattagaagtttgatgttaaaaagaatcacttatcattgatgctacaattgttttcgaatgtacattcatctaaattctatgctaacaacttctacacaactctttaccaaactagttccttgtccaaaactctttgtaatacacaacctagccaataatgtgtgtttagagataacaacttctctcactagtaactttattgaattaagcattgtatcaaacactaagaagtcttcctccaataatatgtacaaagtacaacccaggccaaatgttcacagcaaccaaacaaaagaagaaaagaaaagaaaagaattgagtgctgaccattttcgaaatcgtcaaagagaaggtcttcttcatcatcgtccagtgaaacttcttcgactatagttgggctgagcaccggttctggttgcgggggctccgagcgttttttgcgggcatggtggacatggaagttgttttggagtatacgaggaaaagggtatccccagaatgagaaagaagagctgcccagtgagagagaaggtggtctcctagtcctcgagtgggaagaggaagttgtggttatgattggtgaaaatgaaaccaaagaagctctcatgctacaatctacgcgcatattcatttcttctctgggaattcagagagagagagatgaaccttgctctgaatgagagctgtcaacctgtggagttcagaagagaggatacacgaaacgacgtcgtctttggggtgttctactatgggagaagagaagtttcttttttagcataaatgtcctctttagttttattctgtgcaattcagccatcgagaatatttttttacattataaaatgttaaataccattttaaattttatattttgcacaaattattgattgaatcctttgtttgttcaataaaaaattagaccttgtattttctaaagtggtatcataagctttattttcgtcatttttttttaaaaacaaaatcaatttgaaagtagtttctagcacgaacaaatgtaaaaaatgtaaccattcttgtcatatatttctaagttagggatggcaattatacccgcaggttcgggta

SEQ ID NO: 15902 - DNA, 3112 bp, Cannabis sativa
aaaaaaaaaactgtaaaaatataaacaaaaaagtacaatttgaagtagtttgtgtaaaaatttatttctaataataccaattttaatataaataatgaagcatattaattgatattattattggtacaaattaatattaatttttttaaaaaaataatataaaaaattagagaaatgctaaagggtatcaatgtggctagccccctcctgtgtgtcgctagccaatcgtaacgcgacatgtcgagaatgtgctaggcactactagtgccttataacaatgctcaaaaaactacttacaatcagaatgcgccacgtcgtagcaatgctaattattaatgatcagacttgagatctctttgaaacttgttctattaaaagaaagaaaatacttacacgatctggtgactgttccaaaggactgaataagtatggaactcctcagtgggatcaaaccaaagctcgtgcctcatttctcggttcccagttccatttttgtaaatatttgtttggatgagatatggttgcccagttctgttccccaaaaactcaaaatctacttcatctctctctggccctgctccattctctgtacacatctgtaaatttaacaaaatatcataaacacaatttccatatatacttaatagtaatcaagattttgaaggctaacttcttacataataagctgtaactacaccagcagagtcacctcccactaactttagcttcatactgaaccatccgaatctgtacttttgttttgtttggaacccacaacctattccataccaaaaatattaccaatcatacaaggcctttgatctaattaataagattaataatattttgtttgagtgtgatatgatatgtatgtatacctgtttcattgtctagtgatagatgccagatctgcccatctgttgatgttgtgaaatgatcctctgaccacattatatcaaaattgtcttcgaaagaggcttttgggtctgctgcggctttagacacataactagaagcagccattagagctgcaatgagaagaagaataggcattgaagagacccttttggccatttttagtgaaatggctgaaaaagcagggaatggaggagctttctctgcttgactcccggagtggaaatgagttgagttgtgcattaaatgatcaacccatttgaaagtgagatttatattattattcttacaaagggtattattggaaactatgtacttgacttttttttcatttgaattgtagttattaataatggatgtacagttttgcccattagttttgacaatctggtttattgattggcggtactgttttatttttatatcatatgcatctgacataatcgggaaggatatcattctattattgaatatgtatgaaagatcataacagttttaactttaatggttactagtttaattagagaattgcttctctacacaattttgtgttattaaaaacagtcacaaaatagcattattaattaatgtctttatccgttcctggagggatccagtgcagagcttacttgacaagtaataagtaataaaatgagaatatgggttgtcgagagaagcagagactgatggtgccaacaccaagccgacatgggtaatttagtaatttacattagagcttatgaaagtatagatgtcacagatgaattttaattaattgattaaaaaaaatgagaggaaggaaggaaggaagagatcgaagccaggctgccctccaataaggtttgacagaatagaaaatggtgagtggggtccatatgttgcatggtataacgtgactgattcggcggtcgggagagccaaagccaaagccaaacccacaaaataacctatcgttgagcctttattgatataaaagaatgttacacaagttaataacaattacttttagtcaaatccacacctatggctatgcctctctcttttctttattaataatccttctttatcaacactaatattaaggcccgtaacattaggtctaaaagataataaaataattaattagttaaaacaaaagttttgtagactaatgctcaccaaaagaagtgaaataccaaggtaattatttactagtctctttgtaaaaaacaatgtcgaccaacatgcgaatcacctcacaataaccaagaaagaggataattatacaaaacacaatgtatattgttctctctatataggattaggagctatagagtgtgaataaatattattcttgatcttgaggccaagaccgtgcacgtggacaactagctatatctcatggcccttataatacttgagaacagacaactgagatttaattctatcaaccatctatagttaagtcaaattatgcattatggatatataatatgtacatgtgctaaagaattgtaaaaaaatataatggaaccgttattaagtgattttttttttttaatcttataagtttatttaagctatctctttgtataaagatagctcaccccaattatttcaaatgaatttctcttcatatgccaggtaatttcattgtgtatttatctacattaaaaagtgatagtggtaccgagatttttctgccttattaaaaaacacttttgtactgtaaaaatgttttggttttcacataaggatatcaataattgaattgaagaaaagggaaaatgatgttaaagttgtagataattttaattttgggtttgatttggtgactttagttagccatataagattaacatgcacaaccacacctgtcactcgtcagaatggcccccctatcttgttcaaatatattatataatctaataagtaataactatatacctaatcattccagatctagctagatagtgtcattgtcattttttattatcactttttaattagtttttatatctaaaaataaatgaattttttttaaaatgttcattataattataatattatttttataaatttttaaaattttttgatcacgcacgctaattagaatattaaaaattttatttttattatagtaaattataagaattttttaaaaaatttataaaaataatattataagtgtaacaaatatctctatactatacagcaa

SEQ ID NO: 15903 - DNA, 6043 bp, Cannabis sativa
  modified_base (2719)..(2720): a, c, t, g, unknown or other
acatattacaaatattgattccgattatttttcatttattccgttacatttctccattaatttatttcgattctgattactgtatagtaaacgtgccattagagcatacagcaaatacttccgccatctccaatagtaaaatttaaattttttattaaattaataccaaaaagttactattttagcactaattttttttttaattccaattacaacactaaaaattacaccaaattttatattctttattattctattattttatcaatataataagaatattttaaagctaaatatttattaaatctaataaattatattagtaaatattatttaatcattaaaaactaaaaaagaaaaaatacatgctccactattaatagtgtaacagtgtatatccccttgaaaatagagtgacaattgcagtggagtaaaaaaaaaaaaatttcacactttatataggaaaatgccgttgggttagaccttatatagcaaaagttggtggggtcaaacagaattagaggaaacttacaatgagatgtcagatgtgtatatcatggttggtcaatagaggaaatttcctaattttttttttaaacagaaatttccttgattatttcaatgaaacgttttattggtcaaaaaatactcaaaatatcctatatcacagtagtatatgaccaaatttcaaaaaaaaaaaaaaaacagttgtatatgaccatgtcatccttattgggctttaggtatgggccaagtgtgaagtttgtatttgggtgtatatactcttgttaggaataggatggagtaaaggcaccgattgggccaatagtaaattgaatcaaatttgaaggatcatcgatcatgcatggccttgttgattgcatcccttgactcgttgtggttgtgtgcatatgcttccccaaccaaagaaaaaagagagagaaaaatgaaaataaatgatcagcaaacacgaaatcatcatccagaatccaaatgtcacataaagaaataagctgtttttacttattaaaaaacgtacgactgaaaaccaaaaaacccacttgcctatgtcttaggaaccccattccaaacaaccagataaataattagtgctaacattatattggaggatgccggtgtctgagtcgacccagtgaatggctccctgatcagtggtcaccttactgatgatagatagacccaactgataataggacttgtctccatcggtgtcggttcgaacccacaaaccaaacaggcccccacccaattccctttggtattactctagccctgactaagaaggcttttaggcatttagcccaccagccatatccacatcattccaaccaagaggtgggccatttcaaagctggtcctagcttttagccagtgtgtctataagatgagggtggtgacctcaataaggacactgtccggaacttcaggggttcatagactaaaacaggacccctcctccacaaccccatttcattttataggttaagactttagaggagtactaaaacagaggaagccaaacagaggctttcactgtcggtgggtggtcggactggaatttgggcttagggggcccaatacaagggccctaataatctcaagccctttgccatttcttcatatcttttcataacttggcttctattgcaattattctcaatgggctctcatcgcattctttcttctggtggaatggctattcttgacataactatcatccttgttgtttttcacaactgacccattatgttttctttattattaagatttatttttggctttctttggtatttccatttcttgttgttgtgtatctcaattttgtataaaccccaaaataagagtggactgaaccatatgagttattatcttcagatgctaattattatgattctagttagcatatgtcacctttcgtcacatgttttgaacttgtattatttattatgaaattaaaagaaagacaaaataaaaacatttattgattataacaattcatgatcacattcacatatgtaactattatatttatacttcctcataagccacggtcacagatttattttgaatagctaccatacacaccaacatttaattaaatatcaaggttttgaacttgtccaaacaaaaaaacaaccacctttgcaacggttttgcacatgtttgtgtcgatccaaagtatgtttatcaaaagtagtgagattccaaggatttgatttcaaaacaaagaaaaggaaatcatgaaagaaatagaagctgaagaagaggagggaaacagtagttattgaagattgtgacttatcgtgacaatcccattatgttatgaagatacaaaattcatatttatataaatgtgcacaatatgataatacatgatggtcatggtagggtaaaatgatgatgagagaaccaaaaaaaaaaaaaggaaaggtacatacactacatgattttgaaaattaaaagttggttcatgttaggagggaaaactatatatatttatataaaaaaaatgaaaacaggacatgttctggaaagataacatgtgcttaggcataaacggagagtggcataaatagagaagataggaagcaactgtcattgtctttgccatatggcatgtattcctcattgctagttattataggggaacctgaatttattgaccctagttaggtctttctttctctctctctctctnnctctctctctctctctccacttcatcttagttgtgatgatctggattctccagcttgatgatcagtactttgaattttcatttgtcacttgaacagcccttctacaccatatatggtccccattaagtttttgggggcttactcttttttcgctactcacctatttaatttagtacagatatattaactgacaacaaaattggcaagatgacaatactgtgtttattatagttcttccatgtgttatactctctcttttatttgttcattccttacaaagtttcttctcttattaaaaataagaagattttgccagttaaagtatcttggctggggctttgatgttgcataataagcataggactatctacctaattattttaaggcaattttgtaataatggagaaaatgggtgttcagtaaaacttaaaaaattacttgcctaacttaagcatacatgttgtacagatagacagatatagaagaatgaaaaatatatactaaacttttacaattgtcacactcatgaaagttaaaattactttattaagggatatatgtgctaatatacaataagtataaaaataatttagccaatcatatcttgaaatgacattctattgaggtgtgggcaacattctgtaaaaagttagtacttagttgtgcttcctatttgtgatgagaaattacaaaactaatcatattatatatttgttatttcatgttttgcaagccaaaaaaataaaaataaaaaataaattgtactcaaggtttttatttattcttagatagttaaaaagaacagctctgtttcattgagttgtacataaattctattactgtgagtgacttattagttgagttcttatgatatcttgttttttaattcttttaactgtgtactacatttggactaacatattgtatggctctgaccctctctaatttagaaaatagttcatatgatcagtaggaacaattaattacatgcattttcccctaaaaactaaagagtaaggaaggaggaagaggatagataagaagggcaaatgaggaaaacagaatccatgtcacatagtttcaaccttttatttttttttaaccttagtagacatagtcattggaaagagacaaaaatgggacaagcatagtattatagggacaaaacatgtggcatgacttgtagtaccttgtgtttagcttcccacgaatacagcaaaactattgaatacataatattttgtttgtactttgtagtagaaaaaaaaaacttaaaagagtaaaatactttataacgtcgtgtcatatgtaaataagtaaacatgtagaaataataactagatctagcaacaagaagagagctttacactatttttggttgagtagagtgatagatggattgataaattcttttgtttcgttggagtaagggaggaatttaatatagatctccaaatacataaatttcaattcgaaattaaaaaaattcaagaaaagacaaataagacgaacccatgtagtgctcaaaaattggactaaaacgcaccctaagatttaaaaatatattaatataaaattgttacttatttatattgttaagatgctttgaatttatatgaaaaatcatgtttcgaatccctttgctcaaattaaattaaacgtatgaccactagagtatgagagcgttgataaactatcattcgagataaatttaatttattcttttgaattatatttaatatattctaagcccacatttgaggataatcttataatgttgtacttatttttactcatttatatttttgaaaaatgaaaagagagagaaagcactctgtggttaataacttgtggatctttttaacatgtaggctcatgtgaaatgtgaaatttgataaatattaataattttgaaatatgttggtataaattgttggtaaaaatggaggtaaatattggagaaaaaggaagtaggggtcacccccatgagggaagtgtaaaatgaaaaggaaagaaaggtgtgttttattgagcctgataaagtgaaaatcactgtccctcgattcacgaggggatgtgggtcgaaaaagtacggattttgcctttgcctctgatttttatatgtattaatattactgccagagtttgttatctttgtactgagaaatcatatctgactagtgactactgaccttttcttttctttttttttttttttcttttcatttttttccccaaaacacaaaatttacttaccactgtttcaaaagcatgtgactatttcctctgttttttctaaattgccattcggaactttgtatttgtttttgtgttgtgttgctctctgttcaatcaatgatcaacattcaacactcaactcaccaccaaagcaaagcaaagcttataaatcattttaagtccccacttttgatacctctttacagtggtcagttgaccatatctttctttctctcttcgaaattccattgacctattcatgattagttttgttgttgtgaggaacctttttcacatttactagtttgcatatgtaatcaatgagaattagtcattggttagatttcttgacttttctctttctccctctcttttgcataaacagttttattttatcatatcttattatctttattgatcaaagatttgattgaattccaaagttgatatctaacttgatactttggtaataagtacaaaatcaaagatcgattaatttattgctctctacggttaaaggcttaaataatggaaatgattaagttattgtcaaaaaaatccgataaagattcaaacatataatgctacctatcaacctatttttatcatttttttttcttcagaaaaataaccttaaagaacacctaaaaagatacacatcaccaagtaatactaacataatcttttatgacatacttgttcctatggggaaagcatatcaatgttacattttttttaaatgagaatttttatttcatttagtagtaaaccatttagagcacatttggtaataattatttaaataatttttattttttttaattagaaaaatgaaaatattaaggaaggcatattttttaaacaatctttaggaaaactgtttcattttttaattttaaaataagcaccataaaattttttaaaataaaaatgagttatcttcaaaatttaatttaaacaatttttctttatataaaagtcttttttatattatctcttagggcatctccaatggagaaatccaaatatagtgttaaatcaacaccaaaaaattactatttcaacactatttttttttttttcaa

SEQ ID NO: 15904 - DNA, 5347 bp, Cannabis sativa
  modified_base (3168)..(3169): a, c, t, g, unknown or other
ctatggtgtttctaagcaatttgacttggaattattctcatagtgacaaataagctacctttgcatgcaatgtggagcaatgttgtgttgttgttgattggatagataatttgtagttgcttaaaattttattcggcattttaatagaagcataaaaggcaatgcttattgaattaatttctaagtaatgacctgttccgagaagtttgaaccaaacatgtttttagcattttattttttgaaaactgtttatagaaacattagccaaataccattttgtgaacaaaattattttctattctcatttctgagagcagaaaacattgcatgcctaattcattttcactcgtgtgtgttaaagatttttgtctcagtcctatggatccatcgattctcaatagcgaagctgctgcccccagaaaggtttgtgtgataccctgaccacctttgtctcatttcaattcttcctatgatcattggtgtactgaaaatctgctttgattgctgcagaggagattcataccaaaagcaccccctcgccgggtaccaaaacctgaagttaaaacgtaattgtctcatgtgctgaagtatctacatgctacccatgtatagctaacgttttattatatcttgtctctaccttattgtctaactgcagcgaagtagtcgaggactctgatgctgaccaggctagggatttgttgagacgtttcaatgtactactaattacttgatctctcattccgaattcttttgaatgttcgaatgtgagttacggttctcttgctctacactgtttatgttagcattatgatgtttcttcctcctttgcatctcttgcaggaaaattcaaccagggcaaggcctaaagttgaaaagaaaggtagttgttcttacctatcatgcttgtcatctccctccttttttcaaattttattgacaaagttttacttctttaatttacagtgacagcttcgcgaattgcatttggttatggtggtgcatcaactaccattaaatcatatggtgctcctaggggtggtagtaatagtcatcaaggttcagcttccagtggtgtgcaattcattgttgcagcttttcttatttgcagtgtatgtgattttttctgatgtctaacgctgaaaatcatttttaaacaggtggggcatttccgccgggtaatatagaggagaaagagtacaaagagccatgggtatgtatatcaccattgatagtttgtagttttctgttctgaactatctgtatctctcatctttttatgagaattttgacagtggtttctttggatgctattgcaggactactacagctattaccctgcaactcttcctttgaggaggccgtattctggaaatcccggtaggttctagtattgcagttttcttagttattgagttgaaatcattgtcctattatgctcaggcttttttttttctttttccctctactgtatttagcggtatctaacttcttggtattactttagaatttcttgatgaggaggaatttggggaagatcctgaaactattcactatgaagaaagattagaaagatcagcaatggaacttggtctaatggttggtggtgataccttgacattgatcaaatgttccgtgtaaaatagtcagatttacttttgatgttttctttataggaggagaatccagaaactagtatgctctttcttcagttgccaccaactatgcctctgatgaaacaattagttaccaatgatggccaaccagtaaacgaaagctcacgggcacctatggctgcgaacactgtcaagaagtcttgtgcattgaacgagatacctgcaggcttggtgggtaaattgcttgtatacagaagtggtgccatcaagctaaagattggtgatactctttatgatgtgagtagagttttcaactaaatccaatcaaccaaaaccacaaggattatatacgcatcatcattattgttatctgcttaacttaaattttttaagctaatctaaggtaaatatgaatttttttaattattaaatgcaggtctcctcaggtatggattgtgtgttttctcaggatgttgtggctatcaatcacgcggagaagcactgctgcattgttggggagctcaacaagcgagccgttgtaacccctgacataaaatccattttagatagtatagaagatttgtgattgttgttgatcatttccaacacaattttgatttatagatgatttattcataagttttcttttaaatgaaaaatataggaattcaaataacttgagctttcatttcgtttgaaagagagaatatagatgagagattccaatgtaaagcccaaatggttttcattcaaaatgtatttgctggtcaaatttattccattatttatgtcctttttagtaaatttcaaaatttttagcaaaattttaatacttgattgcatatcattctctactatcatgctttggcaatttcacatacgcatttgtgattcacaaacctcactatttccattattaattaagccttgcaaactgactacaaacttagagctagtgtaacttaaaatgggctccttgttgtggttgaagagtcataatagtataatgagcatgaggatatgagcagaatcatagccactgcaatttttgctgctaacatagcaaaatgttgtccattgtaggtctttggccccttccaaacggaaagaatgctacatggtggtctttacccgccttagaaattcctccagagaattttttaggattgaattcttctgcatcatcagtccagatcataatggaagagaaacgtatgtaggtttagatccaccctaccccgacaggaatggtgatgtcccctatttttgttttcttgtaagcatgtccatattgagcagcaatcactggtggtttttatcttaatacttcactcactgtcattctttttttttcttcttcttttttttttgcgcattgtgaactgattaaaatgcctcgtatatatagctttcgaaatttaaaaagaaaacaatgctgagttgaatactcataattttgaggtggcttgtagccagagccggtcctgagttgaaatgggccataggtaaaaaaaatcggaaacttacaaaaatactacttttttaccaaatnntttcaaaaatactgggacacggcaaactttacatttttactggtcaagcccatttttatttcttttatactacctaggcctaatatatttacttttatactgtaaacagtaacaaaacacaagcggcacctctccttcgtggttggagacagacaaatcaacaccagaatcatagaaacaccaggaaaaaactataaaatctggcaaaaaaaaaattactaaatcaataacaaattactgttttgtagtgttattccaattccctgtcattttcttcataaacacctttcgattaaaggacttggcagtgtgtaatttagcaaccaaaaagaattgggtagggaggttttcagactcagtggtggctgttggtgtagtttcatggacggtctgaacagtgtttttcagtatctgtgaaattaagagctacaaataaagatgtggttaaatcatccatgagagtgtacttgtgtgtgcacaagaagagaaagtaagaacagcgagctattgtagtaatcgtacataaaaggaaggtttcctttttagtaaagtcaccaaatatcccaataaatgaatttctaagtagttgcatatcacatctcaccaaaataagaacacagaaacaaaaaacccaaaatacagaactaacttatgcgcatagaaaataacaacaaatgtaaacattttcataaaattattttaagattgtcaggaataattgaaatggtactcggtatttatttaatgttttaaggtttaacttctcctgaaaataataataataacaatgaagaagaaataaaaaaaaaaaaaaatcaatggaagagaatataaaaaaaataataaaaaaaaagtgagatttattgtgcaaaacttgtacaataagttccaccatgaaaactaactactaccactactaaaccttcagcaactcacgaacttgaacttgtatgtaaacaaatttatatatacagcttaaaaaaagacgccagaaagaggtttacaagctcttgccaccatagccaagatactaataatgaacttgtcaaagatgtatttacgtcttataaacctccaactttttccacttctatacctgcacgcgaaatctaaatccggcagcactcctattccctatttgcaaactttaactgggcagctttgtcgaacatagctagctatgactaaaatcttcgaatttttccaacatgggttcttttcagactcatcattattagaaaccacttcagcacactgactagcttcgtccatcttctctgagccttgccattggcgagagtcgaacggggaaagcgaaagccatctactgcactctgtaaatcagctggtgattccaaactcatactctgagtctgaagatcagtatcaaaaaactgtagatgatcctcgtcgcagaaagcttgagtgattcgttccgagtcacagatcagggaggtactgacttgacttggaaaatttaaagcctgatcaaatctaagatccatgctgtcaattgtgtgcaacgcgtaatcttccaagctacttgttccgccaacagaatatatggatgacatgatatccggtgaagaggcagatgatggtggtatataatcaaaggcaccaatcttatgtgaagccaaaaacttgctcccagcagaaccctctatcttgggtgagcttgaggtgtaaagcacattcgtcaagagggctgagccagcagtaagcgaggcctcatcgtcaaaagatacaacctcctcccagtgttcaaatgcagaaattaacatattatgtgcatcagcctgatcaagaagttagattgtaagaaattagactacacaaagtaaaagaaagaaatgtctaaatctggtaaaatcaataccttctcggtttcagatagcttatcaatgggaacatattggccatctgaaagttgtcccagtaattgacccacaatattgaagacaaccccagttttatgctgtgaattggatggaatgtacaagaacatactcttctcaagtacacatgtccgagcatgctccacagttacttcccacatcttagcagacatacctgtgccaaggatctgtatttttccaaatgaaccaccatttaacagctagcttgtgaaatttcaagtgctaattttacttcatgattcactaattgcttgtttga

SEQ ID NO: 15905 - DNA, 4047 bp, Cannabis sativa
ttttgctcatgctattttgtaaaatagtattcttttgaaaattataaatttaacattcccatcagggtatactagtgtggacaaaaagacaagtatcaactatcatatatgtcaaccttgtaaaaaaagaattgctaaaaaatattattggtgcctagtattctcttaaatgatatcacttttagtctaattaaatatattttatataacttaaaatataacttttaaagaatattactaactaattgtaggacgtcacctataaaaaaatattgaacactagtacccaataacaatgctcttatagaaaagatatcaaaacttcaaaagaaggccaacccaacttcttaattttcctttttccaaacaccccctataaaaatgaagttaatggttttaaatcaattgaaacactgtaataataaaaggaacattacaaacaaaattgatagttttcaaaacaatcaaaaccttcattacttttcttaccaagttattactcacctcaccaagaaaccaaatgaaattaagttgaaagagtgtgacattttgttgcaaaaaagaaagagaagccaacttaatcaaagcaattattacttattagagttattaatggaataaattaaagaaagaaaaaaagataaaacaaattaatttctcatttagatgcatttgcattcccgcagtgctgctatggagctcagtctgaaggagcaagtttacatattttatcaaatgaagaaaagggaatacggattttcatccatttgcaatggaagaaccattgaagcactaaatgaaaacaagaaaatcaatgataagaatcaaaagaaatcaatctcaaaataattaccagaaggctttacatcaacacccggatctttcccatttgtgggaattttggggacctcatttctaggaacatccatcgtgtatggtttcgggacatcgggtggacttgtacagcggatcagtgcccaattcacactctgaaagaaaggatgttgcttgatttctgttgcaccacgcctataagcgaggcgatgctgtggctctttcactagtaaacctctgatcaagtcccttgcagcgaagctcacactcggtgactctggaaatctcaagggctggccaacaacattgaacaatgtagccctgttccctgctcctttaaatggagttttcccgaacaaaagctcgtagagaaagataccaaatgtccaccaatctacagcactgccatggccttcgcctttgatgatctctggtgctaagtactcgtgtgtcccaacaaaggacatggatcgagcacttgttggttcagcgatgagctcagggagagggctcacttggtgatgtacttcggtttttggtttggtcttcttatctttcttgggcttacgtgataagaagcgtggagcaaaacacgcgggttggatgcaatcaggctgcataacacaagttggctcgatacatgaaggctgagcacaataacccgagctctttgactccatggtcgagtttgaagattttacaagggtaggggatacggcacaccttaaagagaggtcaaaatctgaaagcataatatgtccatcttctctgactaaaacattttcgggtttaaggtctctgtaaatgattccaagcatatgcaaatactctaaggcaagaagaacttctgcaacataaaacctgaggaaaaatgatacagataaatgaaaatgagagaagtaaagatgcccacatccagatcacaaaagtttctacaactaaagcctccaccaaagaatgcaatacatgttttcctaatctattcactatgggctgcagagacttatatgacataatggtagatcaatttataatttgcataacaaagaagtagaaaaataaggaaaggataattcctaacctggcagcatgctcagaaaagaatttcccaggttgcctttgcctgagattatgtagatctccaccagggcagaactccatcaccaagcaagagaatttttctgtctcgaaatgcgtatacagtgtggggaggaatggatgatccaaagattgcaatatctctctttctgtttgagcccttggaagctttttccggcttcccagatcagttttatccataactttcattgcgaaaaacgttctagtaccactcagctcagataaataaacactgccaatatctccgcaaccaagtttcctatgcaacttgaaatgattcaaacccaacatcccatgacgagatcgaatagcttgaattgcatcccatcttgtatcatttgccatatggggtttgaacatggaggtgctcaaactactagtgctgctctcatcactaacatcactccctgtgctgcctctacagatgctagtcttcctgctttcattaaattcacaggaattcttcatttcacagccctcaccaattttctcaatactgcttgtacattcactggcttcagtattggtgaaactttctttagcttctgaatacacagtggctgagtacaagctactttggggacttgcataagaagtaacagttggttggggtgttgattggcagttcatttgcccaacactttctttacatggaatcaaaccaaaagtttctgattccaccaaacagcttgaatcacaattttcttcaccagttagatgcttagtgcagcatttgtcttccaccttagaaacattcttctgagtagaaggtcctgctgatttatcaatccccttattcgcagcagccccgtgttttaccataacgggtgtctcttgatgcttcaaattgtcctgcattgctttatatgaatcactttgaataaccacagaaccattaggacagtacatcggttttttgccatagctttgagctggtgaatagtatattgatgaagctccaccatcacttgataagctcggtgatggaatccgagaaggatgatgatgatgagtaccacttgtggtaggcagattgttgcctagtgataatgaatgaaccccatcaacaagaactgaatccatggaacagttttcaggcgaaggcaccaccaccttgacaccaaatttcaactaggcaaagtgattgattgtagagatacagatgttgattgtaacaatatggccaaaaccatggtttttacataatctcccactttaatgcctacctaaaaatgtttaaaaagccagtaagaagtattagaaacttggctcaacgactagtctggttgcaataaaagacattaattagatggattacagaatcggcagagacccatatgcagataataataataataatcataagaaggaactcacacaactaacaaatcccataaattaaatgggataaattagatgaaaacgtaattcaataccagcctttaagaacaatctaatgtgtcagaaaagtcttaattatttcattaatcaaatcatacccgttaagtaaatggcattgctttacaaattcaaagccgccaaaagataagtttcttcaaaacccagaaacccaattgtcaccgagaaaatgtacaacatcaacaacaaaaagaagaaaagaagaagaatttattcatatatgaattgttgtttaaaacccaagaaactgaaaacttccacgcatagagaacccaatacaagtaacctgaaaccccaaaattcgactttggattctttacaaaccaagctgaaagaaataaaagaaagaagtaaaagggtttatatatagttaccttctagtggcagaagaagaaaaagcagcaaactttcatggctgacgatatgggtacaaataaaagaactcagaaagtttgacagaggaaaaaaaaaaaaaagtggagtgactttggaagaaagaacgtaaatgagtcttttggttccacttgggtgagtttcagatccgatccccaacaagaaagcaaagaaatgagaagactttaaccacaaaaaacgaaaattaattaaaaaaaaaaaacaatcttttttttttaaataaacaaaaaagaaaaggtttttctttttttttcttttttt

SEQ ID NO: 15906 - DNA, 4315 bp, Cannabis sativa
taatacaatacattgcttaatccaaacatagtgttattttttatttaatacaatacgacccttatacggcgtaccaaacgagccctaaataaaatcaaatttattaaacaaatattaatcctctaaatcactaaaagacaaaagctaactaaaggcaaaagactattttgtccttgcttcaccaaaaagttactttgccatctaagggcatatcggtcaaatctaaaactacaatattctcgacattctcaatgtttatctaaattgccaaactatttttaaaatactaaactataagaaaagtgactctactggccaaacatcgcgttccactgttaccgggcataaaatacgaaaaacataaaatttcacatataacataaatagcacacctagaattcaaatatatctccataattacgtaaatcataattaaaagtttaattttgaattaaatctttattatctgctaattctcatactaaaatttaagtggtcattacaattaggcttgcgtgacatcatcaatctgtgtgatcgatcaactagggcaaagtggaaataagtttgggggtcccaatttcaaataatttttgagttggttataaaacttagctgactcaaattattttcccaacattcaccatcaagctatataaagatgaaaatgagtgagaagaaaggtcaattccccctctaattcaaattctttgttttccttctttctctaataaacctttttaacttgcgcatcagagttttctgtaggaaaaccctccgcactcccaacaatctaaacagagaagaagatttaaagattcaagggaatcataaaagattcgaaggatataagtatccactaatcaaatttttgaattaattatgtcaatttaaaggtataatattatgatggtagatctcatgggtggacaatactgtaaatacgctagctcccataagttttatattttacaataagagtgtatattggatcacatctaatagatttggacccaaccgatctaattcaattatttattagatattggattttttcatctgatcctattcaatcgaattgagtcatctgatccgatgtgatccaatagatatattaaattggatcgtttccaaccattggatgcattaagttttctattggattggattggattggatccatccattttattttagctgccatttaagttaatttaattaaaaagaaatatatatataaaacgtaatttaaaatttaataatccaacatacataataaatattagtatagtacaacttaattcttaggatcccattataaaactgccaaaaaataaaacttattcaatcgacattaataattttattagcatttacgaatatgagaattaacatttgatatctaaagttttttttttaatctcctatgttaaatatatattaaatcaattaacatatttttttaaaataaaatatattaaatatataaaattataaatgcattttaaaaatatataaatataattagatgaccattggatgataatttgatcggtttggttatcaattagatcggatgtcccatctaacaaccgatccgatccgattggattttcaaactttacatccgatccgatccaattatgattggatatccgattctattaggtcggttgagacatgatcgatcaattataattgaattggatgattttctgtacactcctatttgcactttattataagagtaaatactattttggatcccgaattttacaaaagttactaattggatcctttattttgttaaatgtcaaattgaaccttgtattttctaaaatgttactaaatagtaccctaaattgattttttttttttttgtaaaattaaatttcataataacccaatatatatagaggtattatgataaaactagtcacgttttctacatctgttcgtactaaaaattatcttcaagttgaatatattaaaaaaaacattgacaaaaattgaagtgagtgtcatatttgcactattttagaaaatatattgtctattttgtcatttaataaaattaaatgtccaatcaataatttttgcaaaacacagagttcaaaataatattaacccttatttttgtaaggttattttaatattaattatttttaggtaattaatgagaagaaaaatcaaaaataatattatataaaaatagtcagatgagaataaattataaatttcttatagaaatagaaaacttataaaagtgataaaagatctttcctagaagctacatatatattctcaatataaatatatatatatatatatttatatcatgtatatatgtagtttgtgactctaacaaaaaaaaaagaaaaaattaaaaattaaaaaaaagtgtataatagtagtaatgaagagtcactattatgcaataatgtccattctttttggaggactttcataaagttgatcaaattaattgagattttcttcttcttcttcttcatcttattatttctttttcattctatatagtttgatttgaatgacttttttgtaacattattctggtgatatcaggcttcaagggggcatgtatatagaccattcaaacctatcaatttcaatttatttaattgtgataataatgattttaaatggctttggattatttaagatagtgatgtttaagtaagtactactatactattacccaactcacactataataataaatacaatattattccaccaataaacctcacaatatagtaaaatattatttaataagtaataatagtgtgcagtactagaataatattttaggtgacaagttttcacatgaatctagttatttgtatatatataaatccaaataaatagagacgtaaagaaaatgcaattgataatgaaactccaattgaattcctacttatctatgtaagaatactctactaaaaaatagtctttaatttattataataaaattaagtctcggtaattataaataaattttaattaaaaaaagtatatactttcatataaaaataattatatatctaaataatataatttataaatttatttatgtaaccctaaaccctaaaattaaacaattttattcttatatcacaggtataaaaattaaatttaattactcaaaaaaaatttattataaaatataaaatgtaacaacaatagtcggccctaattctaaccctaactataactatatatacataaattgtctttttttatatatatatatattttaaaactattttttttttttgtatttttactgaaatccaagtaactaacaaagcaacttaaattgcaactaaaatccataaaacaacccacatgaaaactaccgcagcaacccaaactgtaaattaaaaaaaaaatagtatatgagataattttcactaatatatagggaattatcccatatattatgttaaattttttttaaaaaaatttacagtttgagttgttccggtaatttttatgtagattgttgtgtgtaatttaggttactctattaatttctatatgagtttctatgtaaatatttgaaaaaattaaaaaaaaaaaaagtttattttaagtgtaaaaatataaaaacccattaataaatattggtgtatataaataattatttatgcatggctcagatttgctgagttaattagggtttaatataagccatacatacatataattaattataattatatgtgtcgacagagaggaattgtatgctgtgtattatagccaatttagattaaagattggtccttattgtccattgagacagagacattttgttccaaagctagatgcctaaggcttagaccatgtttgattaatacattacatatatgtgtatatattcactataacacgtgcaaattacttataattatttttttaattaagtttcattaagtaatattaagtgtaatatatatatatatgtttaaattattttaagttaggtaatatatttcttttaatttttaaaataagattcgagattttaatctttaaagatttttttaagtattgcggctatattggtataccatttgaatatgattatacatatatacatattttatatgtacaacaaacctaagtaagatattgtagtgaatcattgtgtgcttgattgaacataattgtctcttattttaattcaaagttaaatcaacaaatataaaaatatctacaatattttaagtatttcaaattaaaattcaaatttctttatataaaatatttacataatttttatttttaaata

SEQ ID NO: 15907 - DNA, 2371 bp, Cannabis sativa
  modified_base (2325)..(2341): a, c, t, g, unknown or other
ttttttatatatatatatagcatagttgcagcagcagaagtttggcagtatcttacacgcctccaccagctttcaataaattttacactttcattcattcataggatagatggatatagtagatacattaatatttatatataatgcatataaatgaatgtgtatatataacgtgtctgtaaatgtttatttcttgcacctcaactaatccctactatgctactaccattattactactctactaagactagatcacaataatgtgaaatccaatcacaaatattgggtggcactaattagtttgagtacaaattcagtggcaaaaagctaaacaacttttctatatatatgaaaggaacaagaaatatcagcaacttaagcccctaactaaaaaagtatgcttgtacgtagttgttgtagatgtttaaaataaataagagtgatttatgagtatatataagtaggtagcacaatttttcctctataatatatctacttaatttgttggggaccacatgtaattaactcaataaatacttatatttcaaaatatttatgcaaaaatcatgctgcacaaataactataattaaaaaaaaaaatactaaagtttgccaaactaattatttccaatcctttggtttcaaatatttatgcaaagatattttatgttaaacattatgacaaatcttaaacactgagtcaaagtttaatgaatgtgtattttatgaatttaattactcttaattatccttactttaggtacttatttttcttaaatttttggttggacttaatatattttctctaaatgtgtagatttgtacttaaatacgattttatgatagagtgagatctttgaactaacttttgattatgttctcatcaatttctggaagagatctttgaactaacttttgtatttggagtcaagatgtggaaattatacatgttttactgaacgagaacaaaacaatcaaaacaatctaaagtgaccatgcatcgcctacagagtggcgacacatcaccagttttcgtacaaaaaaacataattttaagatttaaacgtgttttttaacctaattcaatgacatgtgtcaattttggacctatttaaagcctaaaaacgatcctaaggagaactggagacgactaaagagactgagaaatacaattttaaaggagaaaaacaattttgaaagatgcaagaagcaatttgaagctgcattcaagagttttcattcattctttttatttttatttctcaattattattcagattttaaataatattttaaaatgataaaccacactatgtgcaactagttttcagatggatctctaattatgattttgattttataatttaatgcaaagtttagtttcatttgatattctttatgtgatgctaccttgtttaattgttgctattattatgatttatgtattgttttgcttgatgtaattataattacgctattatttagattgtgaatttattactcaagagaggaactcttaaataatcaggcatcgagtagatcaatttaaatggttcgagagataaacattgtgaaatagagtgaaacctaatgaaggtatggtttaatgttggtatagaaatatacactattatatattcactaacacattctatatatgcaacactcaagaaagggtatacacatacaaatacagtaatgttgtaggttgttgaaaatattagaataaactaactagtcacattaataattaaaattataattatatttgggtaaaatcgaacaattatctttatcggattattgtcaatttaatttttttatttttcaactttcctatctattttattccttgaaaccattaacatgcttaaataaaattatgttttaatatttgttataattaattattttaactacttttaatcttacgatattggtccttgcacctcaacctcttactatactacaacgttactaatctactaacattagatcagacatccaatcacaaatatgggtggcactaattagtttgaatacaaattcagtggcaaaaagcaaaacaacctttctatatatatgaaagtctaggaacaagaactatcatcagcaacttaagaccctaactaaaaaagcatgcttatagttgtagatgtttaaaataaattaagagtaagatttatgagaatctataagtaggtatcacagtttttcctctttctatgtataaatatatctactcaatttgttggggaccacataataattcactcaataaatacttatatttcgtggtatatttttgagtaaatactattttnnnnnnnnnnnnnnnnnaaagttaccaattggaccctgtgttttgtt

SEQ ID NO: 15908 - DNA, 8222 bp, Cannabis sativa
aaaaaaaaagaaaagaaaaaccataacgcacggtcctcacacccagttagtttccactactattactgttgctactgcttttctccatctctatcttttaaagccctagaaacttcaatcccatctcttatctgctccagattttcataacgctccgtcttctgtttctctcttagctctctatctagttctgatagagaagttttattttttgagcggtttgattttgatctccgtcttcagccgaaactccgacaagtttctttgtcgaatttcggtttgtcatttctgtaagtgtcacttcttatcttctaatcttttaaggtatctctagaaaagtttctaatttagggttttttaaattagttacagttgatccgtttccattctcactctctgtttttctttttcttttttcgtctgggatcagtaggaattatctaatatttgatcatggaaatttgtaaataaaagaagtgttttttcccccttttattgcctttttgtactgacggattttagtttactgttcttttttcttcttttaattatatttctaattttggagattctgtagatttttagatagaaaaaaagtgtaagaagaaaagagtgtcatttatttcttatattttgatttaggctttaccttttgatcgaaggtatttagtttgcttattgattaacttacaactacttttctaaagtactgacccttgattaattgatataatgttttggtctggcagctgaagatatttttgttaccgttaactcagaaagatatagttctagtcttctctcctaagaggggtgttgcacattggttttttcttgtctctgttaaaatattcaaccataaagatgacagtcaggactcctggaacaccctcttccaaaattgatagggcccctggaacaccctcttccaaaattgataggaccccagtttcaaccccaggtgggccaagggccaaggaagagaagattgtggttactgtaaggttgaggcccttaagtaagagagagcaattagccaaagaccaagtagcatgggaatgtattgatgataacaccattgtttataagccaacatttcaggaccgttcagctcaaccagccacatttacatttggtacaaagtccaatctgtatttgttactttttcaatagaatgggttgtgttttgttttctattaatgagattctaccttataatttattctttcttgttaatgcagataaagtttttggtccctctagtttaacagaaactgtatatgatggagtcaaaaatgttgcattgtctgcattaatgggcatcaatggtagtacagagccttgaagccattcatttatctttgtatttcttttaaagtatggctggctctaaattttgatttgtatcaaatattgcagctactatatttgcttatggacaaactagcagtggtaagacatacacaatgagaggagtaactgagaaagctgttaatgacatctacaaccatatactaaatgtaaaaaagaacacttctgcttccatgttgatattaatttcccagtttcttgtgaacgcattataaattcttgatcttaccttttaccagccttttgtaatatttttaacagaaatcatgatataaaagctaatcttgatttctgtcttcatttgcagactccagaaagagatttcaacattaaaatatctggacttgaaatatataatgaaaatgtcagagatctgctaaatacagattctggtcgaaatctgaagcttctggatgatccagaggtaattttttattctttagtaaattattgtgtgaagtaagccatttaatgtaattcttattattgttttctacttggtgcagaaaggtactgtggtggagaaattggtagaggaaactgcaaaagatgatcagcatttgagacatttgatcaatatttgtgagggtaagaagagtacaattaagaattgtcattttgaattaattctttatttctggaagctttacttaacaatgtacattttgcatcttttgtagctcaaagacaagttggagaaactgctttaaatgataccagctcacgctcccaccagataattagattggtaattagacatgaaacgatttcttttgatgcgcaatgctgctgattttttctctgagaaactaacaagttgcttatttttacttgtttatttttctttacacagaccatagaaagcacagtccgcgaaaattcaggttgtgtaaggtcttttgttgcaagtctggtaagctttaaatcgagagtagacattttttttaatatatatacatatatgttagtagttatttatatttatgtggatgattgcagaactttgtagatttagctggaagtgaaagggcttcacagacacatgcagatggtgcgaggctcagggaaggttgccatattaatctcagcctgatgaccctcacaactgtaatcagaaagctgaggttagaatctaataatgagaactgatataagagtgataataagaaccgagagaattacaccatatctatgcgcaataacctgatttactgatctgaaacattgactaactatactgtcatagattggtgcatatatgtgtaaaagtcatccaaaccaccctagctaactcttttattaataataattagctttcaataataatacatatcataagttcccaaaaccgaaagaataataatcataatatacaaagacggatgttttttttttgtctgatggaacaacagttcaagtcagaaattgtttaaagaatggaatttcctaaatatggtttttggttggaggtaatgaaattgaatggaatgaaaaagaaataatttttatttcattcatttgtttagttgcattttaaagcattggaatatcatttcaatccaatagaatgactattccattttgaaataaaaggaaaaatcattctaatgcaagataagaaaaaaatttaataatggtattatcaatattttttatgcattttcaattttattttattcctattctcattttcattcttattcttttgttttcattccttccaaccaatcgctccattcacccacacttgtcaagtcgattcttatgtgtgaaatcctagtccattcacccacacttgtcaagtcgacaagtctgtctagctttagtattaagtgcctcatcttataacattaatgttggtttattatgaaacctaattttctatgtacaaggaaaataaattcatctcttcacattggttaattattttggtgtgcagtgtaggaaaaagaagtggtcacgtaccctacagagactcaaagcttactcgcatattgcaacattcacttggtggaaatgcacgcactgccattatttgcacattgagtccagcactgacccatgttgaacaatctcgaaacactctcttgtttgcctcccgtgcaaaggaagtaactaataatgcccaagtcaacatggtatggtatccattagtttttccctctttttctttaggagacttttgtttatacaaattaattatttcttatatctatgtttgttatttttaggttgtctcagacaaacaactagtaagacatctacagaaggaagttgcaagactagaagcagagttgcgaacacctgatccagcaagagagaaagatatgaaaatccaacaggcacaattccagatactctctctctttcttgatttgtttttttattattggtatggactctagattttactaatattaattatgtgattgattattttattcatagatggaaatggaaattgaagaactgagacgtcaaagagatcttgctcaatcacaagtagatgaactgcggaaaaaactcgatgacgaccagcaggtttctctctcattctctcacacacgctcacattcatgtagcttatatatatatatcatcaacaaggccaatcatgttataacattcttacttcagggctcaactctaattgaatcacctcccacctccgtgaagaagtgtctttcctactctgaggcattctcaagaaaatctgattccaaggttctaggccgtgttgataaagcaagaagtacaatgttaaggcagtctgtgaggcaatcgtccgctgctcctttcacactaatgcatgagattcgcaaacttgaacatcttcaagaagcacttggagaagaggcaaatcgagctttggaagtactacagaaggaggttgcttgtcataggcttggaaatcaagatgcagctgaaacgattgcgaagcttcaagccgaaattcgtgaaatgcgttctgttcgatcagccccaagagaagttgatgttggaaatgttattgctactaacaagagtgtaagtgctaatctcaaggatgaaatcactagacttcattcacagggaagcactattgcggaccttgaggagcagcttgaaaatgttcagaagtctattgacaaattggtgatgtctctacctaataattttcagcagcctaactttgatccgtccccaaagactaataaggagtttaaaaagaaaaagttacttcctttgtcttctagtaatgctgttaaccgtcaaaccttcataagatccccctgctcgcctctatcgaccactgagcaagtttttgagcctgagattgaaaacagatatcctgaaaatgatgataatctgtccattgatactcttccagagtccgagaaggaaactcccacaaagagtgaaggaggagatatttcatcaaaagaaaacactccaggcgggtatcgacgttctagttctgttaacatgaagaagatgcagaagatgttccaaaatgccgcagaagagaatgtaagaagtattagagcgtatgtaactgaactgaaagaaagagtagccaagttgcaataccaaaagcagctacttgtttgccaggtacatttagagaatgaccgaattatttttcatcaaattctgagatccctcccttttgcttattttcatcttgaaatgcccataggttttggagctggaagcaaatgaggcagctggttacagcatagaggatgatgagaacgaatgtgagccagggatgcctcaggtttcctggcaaattacattcaaggagcaaaggcaacagattattgagctctgggacatgtgttttgtctccattattcatagaacacagttttatttgcttttcaagggagacccagctgatcaaatctacatggaagtagagcttagacgcttaacatggctacaacagcacctgacacagatgggaaatgcaagccctgctcctggccctgggggagaagacgccacagtctccttttcatcaaggttctatattcatcccatttcctttatcatccataatcataataatgtgccataaataactatactattaatcataggagttttcaaatcaagattattgaaaagatttgtgtgttgtttgttgtgtgtgtgtgtgtgtgtgtgcagcattagagcaatacgacgtgaaagagagttccttgcaaaaaggttgacttcacgcttgaccgcggaggagagagacatgctgtacatgaaatgggatgtacctcttgaaggaaagcagaggaaaattcaatttgttaataaactttggacagatcctcatgatgctaagcacgttcaggagagtgctgaaatagttgcaaagcttgttggtttttgtgaaggaggcaatctctctagggagatgtttcaactcaattttgctcttcctggtgataagaggccttggcttatggggtggaaccaactttccaatcttcttcatttgtagtctctttctattttattcattttttgttgtaattaatttcgttatttatttatctattctatgtaaatggtgaattttggagtttcctccaaaatctcatctccatagtgtatgtgattgataactggggatgcttttgtaattgataaaccaattcaattagttgaattccaactgccaccttgaataactgcggatgcttttgtgattgctaaatgtgttcttctcgtttgacattgttaagttgatttataacttatagatatgtcacatttccacttcacgaagtactttctctctaagaaaatgttgatttgtaacttttagatacgtcacatttctacttcatcttgaagtctcaaaaaatgatattccacttccacatgctacgcaatgacgatggcactaagcagtttagttgattggttgttgtaaatattttaacaaatgtgtcaataatgttcacagcaccatgaaattgttcttgttccaatcttcttctacttattcccttagatttcttatttgtttttagcgcatgagattttcctttcaaagaaatccaaagatacttgaataggtcattcataattgtcaccgtgtagcattccacttattgaagattgaatgacttatccaaagacaattataacatctgaaaatcttttgtttatttgtccaattattcttatcatgattcttttcagcttccctgattgagagctttaatgttgttgtttatatgacttctcaatactttcggtcgcttgggcctcttttttgttttgttgctgaagagtacttgattcactttttagtgaaactcttgtcatatgcttagataaagattctcgatcaaccagtaagttgtcaaactcgacgtgagaaaggttatgttgggcgaccttgtactgcaccaacaaaacttatttattttattcttatttctagcattttagaaataggctccaaaatagaattctcacgacaatgagattttactttgtgaaaaatattattcgattgagtaattgaaatagtatcacaagtttttcacttcaacgtagcttttttttttcctccttatctcttcaacattattggtcttaaatttcccttctgcattattggtcttaagtttccctttttgcatgaaattaaatgaatggtgtattaaaaaagagtggttgatttgttatttattttattattattattattaagggaattatcttatatattatttttttaatttttttttacctttacggtttgggtttctaaagtggttgcagcgctaattgtaatagagatttttgtatgattttttgttgcaatttaagttgcagcgctagttgtaatatgagtttttatgtagaatttcgtaaaaatgcaaaaaaaactgttttgaagtataaaaataaaaaaatcccttattattattatagatagatagataataatcttgactatgttgtattttaaacattcagttaaatagaaaaagaaaatttacatctagatacttttaattataaataattattaatatatgatgtatagtttaatgtactcaaatttttcaattaaataacttaataatcaatatttaaaatttaattactattttattgtacccatttatttgttaatatgttgtataattacttctcattttatacattaaatttattttcatatttatatttttgttcttcaacgtaatagcatttaaatctttatctttttttaggatgataattacttatatatattaagtggtatggtacctaaatatctattttgttttgaattttaatttataatcttaatggtagataaatgtattttttttatttaatttctatacttttattacagaaagtatacccattggtaacctacttacaaatatagtataaattaattaatctaaagtaaaattaatactttttggcatccaattaaaataaaaatgataccatatgatttctatataaaaattattaatttatacttaatagtatctaaattaaaataataacttgtgtaaaaaaaattaaaataataacttttaacgactatttaaacgcttaggtaacctactaattggtatctaaatatatacacataaaataattagtatccactttggattaaatactagttagtagtaaaggtatatatagtatatgtatattatgcttaaaaaaatatatgtaagcaattaaaattaaaaattagttgtatataatgtaataattgagtgaaaaaaagtattaaatttcaataaaatattataaaaataaaagtatgattaatgttaaaaaaaattatgaaataatatctcaaatcattatttttctcg

SEQ ID NO: 15909 - DNA, 6632 bp, Cannabis sativa
  modified_base (4979)..(4999): a, c, t, g, unknown or other
tggtttaaaaaaatggttaaaaactgcaccacccgcaccgcgaacacccctagttcaaagaaaagaaaaagaaaagaaaaggtatattgtgaattgaccattctatcctatccaacatccactatcaccctaatcaaagtggtctggaaagccaatttcccggtctactataaataccctaaccagaccggtggaaataaaataaaagcacgcaggcatttttgggtgggtcttccggttgggtcaccagctcaacttgaaattggaaccctagcgagggagccacttctctccgtcagggatcaacataaccgacatacctccggtgaacaaagcttccagattgcccgtcgattttcattccgtacaccgtatttggacgccatgtccggcctccgccgctcttccagtgttccacttaagaacggcttaccgccaaaggaactccttgatgatctctgcaggtcctttctgtatattatatataattttcttatttctgtgtgtttggttcccaagaaagtggaagaaaactgattgttaagaatttgggtgtttttattttcacttcgtgcaagttgaaattgagattggcagcatctttgcggtgtaaatggggtttagtagagtatgtagattttgctacatttcgttgtaattcgaagttatggctgaatcgttaacccgtggttttttgatttgtatatgtttgtcttagttttgacgctgaagttaaaataagtgattgttcttttttttttttttcaatatgatctctgaagcgtcttcgtgcattaattatgtgcagtcgatttgttttgaatgtgccacaagaagatctacaatcgtttgagagaatcttatttcttgtggagaatgcacattggttttatgaggacaattcagtggagagcaatccgtctctaaagtcactgaacttgaaggagttcacttctttaagtatccttttcagacttttcttaagacaattattattattattattattattttctattcttgaaactggaaatgatagtttatatttgatctttattatgcatcgaaactggaaagaatttggcttttgtaattgttgtttgcaacccataaattgaatcatattgtgctctcttcactgtttggattttctttcgtgcatatacatactatattctggattatttttgtacacttgaagtttattttcatgatagccagattattttgtgcacgaagtgcattgtcctataacatgtgtatatcttttgtcactaagtaataccgctttctatttttgacagagcaacaacaagatctgccatggccttttgcgttgttgtgattatcgtacaaagtttttatgtcagagatatagttgatagatgttaatgtgcaatttaaatgttggctttggttttcttagatcatgattacttgttgcttttcactctcatatatagttcaatatatgctgtattttcttttgtatgtcctttttccttaacatatatgcagtgtttaatagttgtgatgttctgaagccgtatgtagctcacctggatgatatatttaaagacttcacttcctacaaagttcgcgttccagtgactggggcaattattttagatgaaacctatgaacgggtgaggatcattgcggagaaagttagaatattagattttacccttcttggcaaaattatccattcccccgtaattatgatttgctagaatttggcaatcctaaactacttgtgtgtcatatcctgtatttggttatcctaaaccagtgtcaagattccatgagttatctttttcatatgttttgcgtgtcactttgtatttggcagagtatagaataaattatatttgacctactgaagcattttgataataaaattgtaccattgtatttttcacttttgatacttcgtttttcatcatgctctgcttaagtgagaaataaagaaagaagcaatttaaatataagttgtatctatttggggatatgataggatgataggaagatcaagatcaaactgtgatagacgtgtattggtttatattaaattgtaatgcatatgatatgtgtagaactacctaattatagaaacatctggaaatagtagaaaaattattattttggacacacattgatcatgaaactattggtcacagttcaacgatctactttgtttttcaaagaaccatgttttcttctctaaaaatcttaatatgttctgacttatttattttgttgtagtgcgtactggtgaagggatggaaaggatcgagttggagttttccacgtggtaaaaagaacaaagacgaagaggaccatgcatgcgccatcagagaagtaagattaattcttatgaaattgttgacaggatgcaagctgtcgatagtaactttatttgtgtctcaatctcttctgtattgctcttaatctgtttgttcttgcttactgcaggtcctggaagaaacagggtttgatattacagcacttattaacaaagatcaatacattgaacttatttttggacagcagagagtgcgactttatatagttgctggtgtgaaggatgatactgcttttgcaccactcacgaaaaaagagatcagcgtatgtaatatttgtttcttatctttgataaattcattggtctaattcttgtctaaagttgttactgtataaaataatagagatcattattatttgtcgaacagtctttttaaaaggatgcccagaaactttatactatgacaagggaaaaaggaaaattagcttttcactcttcataagcaactgaaacattcatattcttctttcaacataaagataacatatgtatcgtgttctcactttttagtaatcatgagaagcgctatttttattggtttcccaaaatattgtatgcatcaaccaagctatgcttttcaatttgcatcacataacgagtcaaaagaatgttaatggaataccctgcattacatgcctaatcaattttcttttttctttattatctctacattagaattttcttggctgatttagccatatcatgcagcattggttccagtgttgagagcaagtttttattatggttttgcaggaaattgcatggcagcggcttgatgatctcttgccagcaagtggtgatgttatttctcgtggcaactctggcctaaaactatatatggtggccccttttcttgcgtaagtactttccctatgtaattttgattaatatttttgaatggttccttgtggatggtcaatatctgaaataattatggatcattatgcagatcgcttaaatcttggattttagtacaccagccaccaatagctccaaagtttgacatgcctcttaaaggtatgctgaatgattaccaatcataagaagaatatagaggattagtagtagctttaactagcttcatatattacaaaacaaattttttgcatctctacctaacttatgttgcatattacctatatgatttataattttaacattaatcaatgtttataagagagttaaccttttgattgttgagtaatattccaaatgtagtatttcgatctcagaatagcccaattctgacaagttttgttctgattctcattctcttagcaatctctgtgtggaaagcaaaacacaactcaatagggagtagcacaatagttacggagactcgatcaacaaaaactgaacctgataaaccccctcccgacttaggaccaggcaagagcttcagaaacttcaggtttgatacttcgtcaatcttacaagcaatggaaactggtttctctgcatgaattctaacactgctgctctgtaaagttgtttcacttgttttactactcaccaattagttcttcccgcaatgtttgacggtggcccccctgtatagcggttcaagaattccagtttcgggttttaagtaaattctgtacagaaacccttgcttacttactatataggcgcatgcttctccttgttcattctttgttatcgggtgagatggatcggagaaagaactagtgtatgttttaagtttcagtgtaggagcgtttagatagctctagtgtatttgatgaactagtgctcaaacctttttatattctacaagttatttatttatgtatttttttcttctcaagcatatttgtggtcatgtttcctaggacccaactctaaacgtggaattcctttctccaattcttccttcagtgaaggttaaaaaaaatggttgtacaggaaggaaaaccgaaacccgattggctgattttgtctatggggaaaataatttaaagaattattactaattttgtccaaaaaactagagtgtgtttagtttcataattgaaaatttgtttttaatttttaaaaatggaaagcaattttaaaaattaatagggggtgtttggttaaatttttaaaaatatgttctgaaaattgagcttaaaaaaaaattaaaaaaatcagaaaatatcaaaatatatatatttttttttatttttaaaaataatattttatttttttatctaacatatttttttatatatattttctctcacgtaaacgtgtttggatctagggtcagggtatgagttggggtttggagttggggtcgggtatggtttgggtttttatatgggtcggggtttggagttggagttgggtatggtttgggtttaggtcttgagattagggttcgggtcatggggtcaaggtctaggttttgaggttaggctccaagtcctgaggccagggttgatgtccagagtttgtattgaggtaggggcgggattgggttaatgttgtaatgtggtgtagaatattggagtgtttttcttagtgaaaaaaattaaaaaaaaatagtattttagaaaatattagttatactattaaatttttaaaataataaaaacctgtaagttaatatcgctattggttcaactaagtnnnnnnnnnnnnnnnnnnnnntataatagcttttagggagtatcgctagctaatcgcaacgcgacatgtcgagaaggtgctagcctaatagcaatgctcttaaataaaatatcttaatgtaaaaaaaaaaaaaaaaactttacaaatataaaaaattacgaaacccaataaagtcacaataatttatgtctctaaaattttaattattgataacaagttaagaaatataaaattaaatactcttgtatttttttattcttattttatttaatgttattgaaagacttatatatggaaatttcactaaaaagtcattacttatgtttttagtattattttgaaataatttaatttatttattattacgtaagaaatattttttttaacatccataaacaatattcttccaatggaatatgatttttttctccaatttttcttttcataattaatttgttgtaactaaaatgtaaattttttacttaaaaaagaaaatttccaaaaagaatcatttggttaattatttaaataaattatttttcctaattatgtctttttttttacataattatgtatttttttcttgtaaaaaaaaaaactacaaaaaaaaattaaaaagcaaaaaacggtgatatacataattttttcaaattaaacataaatattgtaaaagataattatttgaaaaaaaaatgtagtatctacatatttttattttattttttagtttttaataactcaaaacaagcatataataagtatcatcaaattttatatcaaatataacatataaattaaataactaattttaagtctcaactaactatataaaatattttttaattaaaaagaaaaaagaaaaaaaaactaaattaggagaaaaaattgcctaaagtaaaaaaaaaaataaagaaaataataagtattaaaatattattaaaattttaagagattatgtaaccatgtagtaaagtccatattcactatcatactccttatattcttctcaccattggattaatcaatgtgtaataaagtgtctctatatatagagacaaaagagacatccttactatacaagtgtcctataaatatatatatacacactcctccttaacaaataaccatttttttcactctttttccttaaattctctctatctttttttcattaacatataaactttttattttattttttgttaagttcttcttctttatcttctttttattttttttttaatttagtttctgaagttttcattcacgtttttggaacaaataagagtatagtttttttattataattttttagaacttgcttgtaaatatagtcttcattgcatccagtattaaggttgtacaaaagattattagttttttttcaagtattttttcttttgttttttatttgttttagtgttgttttacagttgtttgccatgatttatttatttgacgttgatttcacttttcttgcttcatctcgctggaattaatgattattttctgagtgttctcgtattgctattgtggttctgtccgtaggtatggaagatagaggctataaatacatttattttttgttctctttggctattttgtgtttttttttttttttttttctcctataaatacatttgatgagctcact

SEQ ID NO: 15910 - DNA, 12517 bp, Cannabis sativa
  modified_base (12465)..(12492): a, c, t, g, unknown or other
aacctagaacagagagagattaaacctggaaagaatgtatattttcccaaacagatgtttcatcttgactaggcaaattctgtaatatgaattttccagcattccataatttgtttgtgaatgccttgttggaggttaacctctcagtggataaattgaggtcctggaaaaaggaaactggattaactgacagtgatttgaaataaatgctagtacaaattgaagatctacccacacgtaaatgggcactcatatacgtttcctccattacaaattctgacttgtagcattggtacttaacaaaattaacaggaaaacaaacctgaccagcagttcccaaagcaagtgtgaatcgtaaagcatctgtgccaaattcctttatcgtatctaacggatctattacatttcccaatgttttagacatttttctcccctgaataatatggtacagcacttacacagtcatgcatcaaaatctagaacagttaaaaggataaacatagaagaataatttgaaaaaaaaaaaaaaaaagtatggaaccataaaggagggataacatttgtgatcgacagcaattagttcatctccccatcaaatagaaaatagttataatgttttactccagactaaattttactagactaatttatagagcgtttatctgaggaattcagtgaaatgaataaaacaaaatgtcagaatagttggaacttttgaagggagaattaaatcccctctaaacaattaaataaaaataatgaaagagagtgaaaactccaagacagatagaattaaatggactaaaatcataaaaaaaaaaaaataaaaaaaaaaaaaaaaaaaaaatcaacatttaaaatgcattattcagtttaactcacttgtgaatctcgaataagaccgtgtaggtaaacatacgaaaatggaactcttccagtgaactcgattcccatcatgatcatcctcgcaacccaaaagaacaatatgtcatgtctacacaggaacaagcagtacatttatacagtattgcaaacaagcaaactaaattaggagagaagaatctcacatattagatgatttcacagtgacgggggaaagaaaaagagagaagaacctctcaagttagatgatttcaagcatgcagatgacgcagaaacacctagacaaactgaatatgaactaatggcaggtaactcatgttgcccttttgtggatgattttagtggtaagtaaatttgtttaccgtgtcctagtcacaatcattttttggccattaaattttaagacaattctttgcaaattgcaaaattaacattgatcctaagtcaaaataaaggctcacccatggaaacatcattactgaaatgaagccatttaactgaaacgaaaacagaaggctagaaagggactacatacccagtttcaagcactgttgtaggataaagctgcttaaaatcttctgatgacacatctggccaaccaagagtactgaagggccataatgcactgaagacaaaaccgaaaaaaatgtgtaacgtcaatattaaatattgcatttattacaaacatgaataaaaccaacaaagctccacatgcacgagaagatgaaaaaggtcgcaatctttatagttaggacatttgctctacagcaagcacactaccctggagatatttttcttgaaattatcgtgttcatttagtcttcccacatcaaggagccacccaaaaactaacttttgaaggaagatgacttttccatacaacttctgcctgatccttctcataatcagaaactggaaacccaatcaagataggagctttcccatcatctgaattacttctgaaatgtagattccagtttgttactaaagacctcagcctgatatcatctatccaaacatcttcccgaatctaatcttctttccattccctaccttaaatttgaccatgttatgggatgagggatgctcttcctttccatggacttcttgacttcattctctttcttcatttagaggcccacatattttccatggaatggctgtttcttgattaagttgataaatgaatgatcataaaggaaacttttgtaatgatcatatatttcaaaatatttaaatgatcatgtagataggagatcctgttaaatgtaatataccattatttttttctttggcaacaaaaagaagcccgttaaagttgcttaactataccataaaatttcgagtctatatccatattactaatacatttgtaccatattttggtgtagatgaactcagctttttgaatctatgcaattctaaaaaaacagtttatccaaaagcaaagagtcaagttgctggtttctaatccaaccttgaaaaccatgtgtctagtacatctggatcttgataaatctttacagccttcccatatttctcttgtgctttcttaagagcttcatcagcatttctagcaactatatattcttcttcattgtcttttccctcaatataccaaactggtatgcggtgtccccaccacaattgcctacttatgcaccaatccttaatatttaatagccagtgattataaatctgtgaatcatagaaggtttcagagagcatgtaaaatgaaagaattctttgaaaaattgaaaataccaataataattaaaaaatatgaaccaccttcaagtgaaacaggaataaatgggtgaggtgttatagttattgttccacttccacctatttaactatgtatgttcatatcctaagctaaagcattcataatggataatgtaaaacagaaatagcttcaaactatagagaaaatgggtaagagaaaatatactccaatggatgctccactctatatttgttttagctcatgctctagccttctcaataattagagattactattcatccttcaacattatttcaataatattgtctcctattttcttctccctaattattattttatatttgaagtgaataacaaagattaaaaaaatatgatatttaaatgatatagaataaaaaatgagaatgtattgtgcaatgtaaaatagagaagttaaggttttgaaaatgtattttaatatttctatagacattgacattttcttacttaaacattcgagatccgccaaacaagtttctggtattcttacaaaagaactggcaactggtgtttgaaaagataagtgacttgctgaaaatgtttgatatctaccactcagctcgaaggcaaaagttagaaatcataggaaaattatggattattacaactggaatactctttagttcagaatataaacaatatcagcaagatattgagattaattttaatttccttactcaaatttatgaatctttatctaactatctgtctacaatggaaaccaaaaccgaatattcattttaatcctaatctcttgttctctggtttaattctattaccagtatcaattgaatactattgataatagcagtggaaatatcagaaaaagaaaaggaaatttgaggggttcaacatcattttagtctttcatcttcatccatagtattattgccgatttttctaggaaatatcaataaaaaatccataaatgtatatttcaatggaaaagtggcttaaaaagccataaaatctggataatattcttacacatttaaaaaaaaaaaaaagaagtacatctcatgtgaactctgcaagggttcaatattcagaagcttttcttatacataaaaatagttttgaaccacctagaagtttatttcggtattaatattttctaattaggtatgagtgtcaaatattattatatttatatgataaaggaatcaggatgatgttataatagttttcataattactactctagttatgcagtaattggcgatttttttttagaatttattttagattttagctttgttttgataattattagtaaaataatatttttcaaaaaatttgtatgtattgtcataattattcaaatttatcggttctctaaaagtttcaacattaatttttgtatttctagacaaaaatctgttctatgagttttcttaaatttctgtcgatatggaaaatatctccaatattttgataaatttataatatcgatatctccctctttggttatgctttgtctaaattcaatgtctctttctcttgtatactgctttctttctatttttcctcctaccattccattttggtatatatatgcaagacttagtcacagcaaaatacatgatttcacaaaccttctcaaatctttcaggaatgatttttatatctcctttttctacagcttgaagggcattatctgctaagggctccatggtaacaaaccattgcctgcttacaagtggctcaattacctaaaataaaagcacaaaaaaatacagaatacaatgttaataagagcaatacgaagattccaaatggctgatgtatttcatcaaacaatatccagcctaggatccaaatgaatcctctggtaactaaaacaaactcacttctccaccacgttgggatctgggtactcgtaaagtatgtggctcctttttcacagctagacctgtttcttccagatctgaccacagcttcttccgagcctcgaaccgatcaagcccactaatgatatcagacaagacatatcattccaaaaataaagacaacagaacataaaggtgttgtaaagcataacaaacccagtaaacaaaaaaaacataccagtacagtccggcaacattgttaagtgttccgtccttgttcatcacattaagtatgggcaaaccaagctttttagcaatattataatcattgtgatcatgtccagggcttatcttcaacacaccagtcccaaaatctttatcaacaagctgccacacagcaataatcagtaaagtaatctcaaattcaatcaagcttcaaaataaaataaacaaacaaatgtataattgggtgacataagtcaattttccaagagtgattaaggggaagggagaagagataaaagaaaaataatctaagggatccatgggatgaattctttttcatctcttaagaaacaacactagtatggattagatgcttcattgtaaaaggagcatagggaaggtttaccatgtcagcaattataggaacatgtcgaccatatgtcatcggtacaatagccattttaccaatgtactttgaatatcgaccatcctgcataatgaaattagaaaaaaggaaaaaccaattttcaccagtccaaggtgacaaaccaaattaattgatatcccaaccaagagagtcaagaactagctcaatgagtcacaaaggtaccctaccttaggatgcactgcaacagctacatcaccaaataaagtctctggccgtgttgttgctattgtcaggtaatcactactaaagagagttaaatattaactaatattaatataactggaacacatgtaaagcctttacactaagcacgtgcaatgtacaactaattgaaaatgtgtacaaatatttgttttatacacttaagatttttagtatgaaacgtaccatactatcaatcagtatgcaaatgattgaaacccaggtaaaccatatcagaagacgaagacatacaaaaagatgttcaatttagtgtatctatcattttattacaaaagacgaggaaatcattggaaggcattcatatggcaatcacacttgactagcaaaaaatacaaattaaatttagaatcaaataataagaggtcttatattatcctcattgataataattaaaaatattgatagtatactatttttttcagtctcccaaatggtatggcgatgtaaaagatcaaaagagagaaacgcatgttaaatgcacatataataacgcattcaattagcataaaaaaaatttccaaaaaaaaaaaagttaatgacagtattcagataaagatccttttcttttcgtttgaaatcttggcacaaagctaagcttaagcagcaaaatacttataatgatccaatctaaaagaaacaagcaaatgatttttgttttttcacagtaacataatggttgctttcctcatcttcgtaaactttttttttctgaaacaaacaagaaacttgtacaaatattatagaccatcttcatgatgcaactgtcggctcgttatgaataagctttcaattgcatgtttccaaaagaaatcaagttataattgtggaattcaaatttctaattcctactttcactttcaggaatttaattgatgtttcattttaggtataatcttataagacttttaaattggttgtatccaatatttcatgagttgtaattttgtttatatcccctaattttagggattgtttgtacttattttagaaagtgttcacgccactatgagctctatataatctgtctgttttcttctgactagtgcggaaaaaagaaaatacctataatgattctaagtttcttcatgatatcaccttttaatgcaaaaagtaaatgagaaataattatcttataagtactggtgactaccttgaacctccagccacccgatacttcatataatagagaatacctttttcttcatgatattctacttcctggttgcatgtcgtaagggctagtgtaaaaattactatttaaatctgaagaattaagagaagagtgattttatctattcaaaacttgaaaaactcaccaagtctgaaacagcagtctgtagacttggagaccagttcaccatgtatgttcctgtgataaaaatatatacatttacaagattgcttcaccaggcatcaaccgtctcttcttttaccattaaagaacctaggtgagcactcgactccttgccaaattggcccaaatttgagtcatcccagtaaggactaaggtaaatccaaaagttccaaggtgataaagttgcttcaaaaataaactgaaattgcatagaagttaagggaaaatttctatgtttaaggttctaaaattgttgtaactcggtcatcaacaaaagtttgcgaacagattttttttaggggggagagtgaggtttgggtgctaagaaacaaaactttaaatatcatagcgaattgtaaaaaatttaaggagcattatatcatagatcttttttcctttaggtatttcctaatgattataaggaaggtagtctaaaattcttttaaccaaaaattcatgcaactaatttgtatacaatcaaacttgtcctcttccattaccatattaagattgaaaacattccagtactcaaaaagaaccatcactctttttcataaagtgtaaaacatttgctagataggtaaacacagtgacttctatggcaataatctggagcaaaataatcataagaatacagttgtgacaacctttacttcatttagtattctgtttctagcaaaaagtgtataagaaggttaaatcaatgacatccaggcactgcaaaaccactaaggattaggcaacaatgaaataaacagttcttaacagagcttggaagtataccttgataaattagacctttatcatgaagcctgacaaatgcctcaattacagctcctgcaagaaggcaaaaaaaaggtattatttacaagtatatataaagtacagtgcaatggctacacaagctatgtggattctccagcaatgtgattgtagctctaggtagattctgttaatttctttctttctttgaagtaattatttttaaatattcgtacaacggggaaacattgttaagaaaaaagaaaaagaaaataaatgttgatgcctaacatttaaagcacctaatacagctttcttgattatctgatacatcatatatacatagactattacttctacagttcaagtgcatagaaaaatatcttaccacttagctgctcatcaagggtaaagtgctctctactccaatcacaagaagcaccaagtcttttaatttgatttgtgattgtcccaccatacctgaacatacacgcaatttaaaaagccttctaacatttataaaagttgagagaaaaagagaataaaaaagaaaaagcatgggttcacgcacccatctagtataattcagggaacacaaaattatgtgagccatatctaatgacaagtaggcatttctaacaaggcaatagtgcttgctttacatggcagcaacctaaactgtcttaaattcacacatgactccctagacaccaaagacacatgcactagtctcacacttggttatgttcattgttgtgtagttcttttttatcaacgtcattagaagctatagtaaaaattgaataggaaaagaaaaaatgcataatctgtgggatatcctcaaaactggcatataaaggttgcacaagcttttgtggacttaattaaatatcctccttagatgggaaataccaacaaaaaaatatcgagcttgcagactaatcaagcaggtctgagaaacaaacatagcagaaaagatggaagaaaacaaaattgaggttcaataggagcatttacttctctttccactcccaaactctcttcgtgaagtcatctcgactcatttcgactctttttattccttcagatgcaagcattctttccacaacaagctggaagaaatcaaaatgtaaaatatcatacataggaaacaaaaattgtactaataacggaaacagtgatacaagtgataagtgcacaagcaataaaatctataattaaaaaaaaaaaaaaaaaaagcatcctttaaccaaaggagaataaatagacactatcaaattcttttacatcatgtaagtgtaaccataaaactatcaaaatttacaccacatgtagacttaattgagttaaagtcatgcaattgaaataaagaggcttcaaccatatgtcacttattgaagttgttgagaataataatataagtagtttgctgaatacaaatcttttagaacaaaaatcactaaagtacctgagttgcaataccagcatgatcagtccctggaatccagagtgtaggtcttcccttcattcgattatatctaaccataatatcctagaaaagtaatcaatatcgaatataagcacttttttactatgtatattttgagtcttatccctcaccatctgcccacttttccgcgagtctaaaaagttacacaatctactgttcaagtaataataaaccttaggatgaaatgaattcaaacaaaacatagatgcgagaaattattttcccaacctcaagagtcacaaacattgcatgccccatatgcagtgaaccggtaacattgggaggtggcattgaaataacaaatggatcaccaccacggtcaaagtttggtttaaaatatccttgagaatcccacctgaaaaataaataaatcaaccaatcaatttcaagaaggaaaaaacaaacaacataaactgatgcaatgtgctgatatgaccaaatcacagagaaagtatgcaggcagaaatttgataaccactcatattaatggaactaaatgacatagcacacatatccaccacaatgcattctgctatgctcactccaattaaactttgcatggaacacacagctacagatcaacagagaagaaaggaagaatcaatatgaaatctgtatggttcattttggattttgttatgcaaatgtattgtttagactaggatatgaacccccgttatatccttccaacctcctaaaacccttcgtaaattaaaccaaaaaaaaaaaactgttattgatgctgacatttccacaatttgagaaggaaaaagattctttctactgtaatatgtaacgagattcccaaaacccacatgatagtacagataaaacttgctgtaactagacctaagcaaagaaaaaccaccaaccagaaattcaaacaatgcaagaatcaacataagtcgaggactaagtccatgacaaaataccaattgtaaatgcgttcctctgatgtaaagtcgaatgactttgctatctctggggaagtaaacgtgccatttgcagatgcagcaactgaaatagaacatagaatgacttagtaaggaaaaacaacagaatttgatttcagcttgcctactaaataaatgttatattcaaaaggagagaagaagatttgaagagctaaagttgaaacaaatgctcaacttgggtgttgaaaaatggaagaaattttttaatatacactaccattcttttcaaaaagaaaaacaaacgcagccaatctaaaaagatatcatttgaattagtttgatcctaccaatccaagtatttagaatagttcaacaatcacgcagccaaacaataatgttttatctcacagcttatagcagtttctccattgtacttttgaatacagaggaaagtaaaaaatttagtattgttcgacttcgaccttattctctgaaactccttagaaacacaaaaaaaaatgtctaatttgataagaaacatctagcaactgcaattagccaagcagaattcatttaaaatagaaaatgcaagaaattaaaactgaatggggacagtatagtttaagataactgattgaattttcttgagaaaatttctaggaaaacttaacggaagtggaactgaaagtgaagaaaaagaaataccagcgaagaggcgggaactgagacgggtgaaatgccaaggagagcgacgacgagttttggagaagaggagagggttgagattgaacctgtaggcagagcaagaggaccaaagggatggagcagagaatgccgtttggattatcattttttccttcggattgaactgagaatggggttttagtagagttcagtggtacagagtagcagcagagtatctctgtggatggatgaggctacataacttctttcaacttcgaggagcctatttggaatattaagctaaataaccttctttcaaaataacttttactgaataacattctaataaattattttaatttttttattaactaataaagtaaatgactaatatacccacttaaatacaacctaaacacccaaccccaatccctacctttaacaccatcaagagaaagaaagggaagggaggccttatggctattaagcttgatatgcttaaggcttatgatagaattgaatggaatttccttcacgaagtgctcaaaggtaaagggttcgatactcgggtctgtgcgttgatcatggagtgtgttaggacggtgtcttactcggttccaatcaatggggtttcgcaaaagaagttcgagcctcaacggggtctccgtcaaggtgatccgctctctccttttttgttcctcttatgtcatgatgtcctatcaaagctgatacttagacagcaaattagaggtcagatccatggaatatcaatctctagaacagccccggcaattagccacttgatgtttgctaatgatactattttgtttgcgcgagcaaatgggaggatggcgaccaatatcctggaatgtatacataaatacgagtcgtggtcgggacagcagtgtagtttggtgaaatcaagtgttctcttctctgagaatgtggtaagtgctcataaaaacgacatcctcaacattctgaatgtaaaggagtgtgatggccaagaaaagcatctggggaatccctttgtttttaagaggaagaagagagaagaatacttgtatttcaaagataaggttttgaaaaggattgaaggatggaaatctaaactcctttccttcgcggggcgaactactttggtaaaatcagttgccctctcgattcctttgtatgcgatgtctactaacaagcttccggtctctagttgtcgagaaattgacagagtgataaggaaatattggtggacagggaatactaaaaaggatcgttttttggccttggtggggtgggatcggctttgttctcctatggccactgggggtttggggtttccggaagctaaaggatatgaattaagctttgttggccaaactggcttggcagtttgcttctaaaatcgaaagagcttgggttgtttgcctcgctgaaaaatattgcaaaaaggagtccttttggagtacaagagcaagaggtagtgattcagccttttggaaaggaatattgaattctagagatctaattcgcaaagggggtttgactttggtggggagaggtaactcggtggatgtctggacacaaccatggattccatggcttgattacggggattttatggacctcctcaaccatgtgaaaccgaggtatccaaacccaaatctgtagcagacttgactaatgacaatgggagttggaacattgagctacttaaagagatgtttggggatactttgggtgaaagaattggagctatcaagcgccttcctcacgatcataatgacatgttaatatggaaggaggtggctgacaggaagttcacagttaagagtgttgggttttatgcccnnnnnnnnnnnnnnnnnnnnnnnnnnnnatttacttattaatatagatcataa

SEQ ID NO: 15911 - DNA, 6389 bp, Cannabis sativa
  modified_base (826)..(826): a, c, t, g, unknown or other
aaaaaaaaaatccttatttgcaatacccacacttacacttctaatttcctaaaacaaaatttatttttgatttaaaaaaaataataaataaataaaacaaatttatttttgtcaaaaacataaaaaaaaaagaaacttatttttttaaattaccaaaaataaaattaaagatacgttgagtttcatcaaattagcagtctacgtctctctctctctcacattttttttctcttttaattgcttcgacgcggcattgcagtcccataaccgctaacgaaacctcaaccttcttctctgagctttcaggtttctctctcaatcttcagcaattctctctttcaattttcattcatttgattttctgatgtgagaatcatctctcttttgcgcgaaattgaaatgtggaatctcgtgattttttttaattatttggattaggaagaattggatctctggttgattttcgaaattggcctgtcatttcattatcctttggaatgttgttagatttcatggatctatttaggaatatgtaaattcagattcaattctatgtttttttttttcctgagctgtgatcttttttttcttgtctttctgtttttggtagaattttttgtaatctgatgagaaatcagtggagaattcaaatcgagaatttgattcagttgcttttttgtttgttaatttatttaaatatagttgagtttattggaatatatgtggggaatgttgcggaacagtgtgagtaaattgtacgatcttcgttacatttatggaaacatacttgtaaaatttctttattcaaatttatatatatatatanatatatacatatatatattatataggcgtgcgtattggtgtcgaaaactggtgtacccgtggctagttcagctgttactcatcattgggtgcctaaatttctgagaattttttaaagttttgttggcaactacttgtcaatgaatgtatattgtcagttgtaacggccttgatctgccttaactgtagttgtttttgttaaatctttctaaaaccaaattttattttcattttgagtaaattataacatcttttaactccacaggtgaaatttgtattgaagcgtaatattaggtttatgaagactgagcagtaaagaatttggtgacactgatacattgcacatcagaagccatccgtgaaaatgtcttcgacagtcaaagctgagaggaaggcaacccttgatgcagcatcatggatgttcaatgtggtgacatccgtaggaataatcttagtcaataaagctcttatggctacatatggtttcagctttggtatgctccttatggcttcctgattgtcttgcttgtctaaacaattacatttttcacttggttcccataattactttcttacctgagctatattcattagaaatcatgtgaaactgatgcaaggagggaggaattgtgctccttcttataatataagcaagattataggtgaaaattgtacaatcaaagatgtgaattgtcttaaaagattgtgtctagtaaaaggagtacaaaatcaaatcaatagaaagctcagacaaaaagtaactttttttgttctaaaatgacttgtattacatttacacagaatttattgtgttttaagatatatggggaaaccccatcattttttaatttgtatcatacacggtcttgtcaattgatattttcgttcgaatgtctaatcatgttaaaagattttcttttccccatatctttacccttcagggaaatagttaatatttggactacactccaagggggaagctttgggtgaacaaaacagaattttaattcaaagggaagatacatttggcaagaaaaaatattaggaactagtagtttgaatggtttaagaattagtaaccaaagtgaggtgtgatacattaagtttattgtgcatagttatttcccagatggtagactagatgcggggaatttttgtatttatctaattttttgattcaacaatgattttgaaatatgttttgtgttgtagtagtctttagctaaggagaaaaaattgcgacaagtttaatattgtgtgtcataattgcagctacaacattaactggtctgcattttgccacaacaaccttgttgacatctttcctaaggtggctgggatatatacaaccttctcatcttccgttttctgaacttatgaagtttgttttatttgcaaatttctctattgttgggatgaatgtaagtttgatgtggaactctgtgggattctatcaggtgagttcttgtgtaacttggaattgaatttgtctgtatgtgttagtcaataaattacaatttacatacattgcttcaaaaataaaattaaataaaataaattacaatttacataattttccttctaaattttatttcagatcgcaaagctaagtatgattccagtatcttgttttctagaagttgtcttggatcatgtgcgatactcaagggatacaaaacttagtattttgttagttctccttggtgttgcagtttgtactgttactgatgtgagtgtcaatgcaaagggtttcattgctgctttagtagcagtttggagcacttcgctgcaacagtatgtaagtactttcttaacaaatgttgtcttaccctttttttattttaaagattttaccactatggaatgtgtggatcatggtatttctgagatttgagattggtctaattttaacttgttctcattttggtacatatgcaaaataaaaaatttactgagtattatataagctgagatgatcctgaccaacatattaaaatggtatttgggtattttaactcacattacagctaaattggacatatttatcaaggaaactggattgttaaattatttcttatgctatcttcacttgagcttacctatttactttttgatctttattcttttgcagtatgtacattttcttcaacgtaagtattctcttggttcattcaacttgttggggcacactgctccagcacaagctgcatcattgttggttgtagggcctttcctggactactggttaacaagtaaaagagttgatgcttacaattttggcacaacatctgtggtaagctttacatttttctgattaatgtcctgttagcttgttggtttagctttttattattaaaacctgaatttgctttgctcatggattatgtggcagatcagacactttggttttcgattaattgaattatgacttattttgaacaaaagttatgatgcaaaggaacatttggaatatttcttataactattcaagattattattgaaaagaaaaaaagtactataatactagatttgataatcaaataactaatttatgcattatcaaaactaaaataaataacacccagtttgtttctcaataatttaaccaaagtttgcttactgataattatttcttactatttgaataataaatcaaatcaaacataataatagttaattataataatattaattggatacaatataataaggaaataaaaataaatatttcttggattaataaagttgggcgtgtgtgtgttggagttactaaaattttacaaaaacgcaagtatactctttctgtatgttgagtgagtttatttgactattgggtgcctaacactatcggccacccaaatttcaccttgttctcaagatgagaaagaaattgccatttgtagaaagacccacaatgtcacattcaacttttctggcagctgcttcatgtcgagctcaagtgtcagagacgaagctttaatatggcttctgacagacacaaccttattttgaacaagatgaatacactctcatcctgatggccacaaacgaatttgaggctaacatctccatttataacaaatttgtgcgtgctagtaggtggaaacttaatttgtaaaattagttgatagactaaaccaagtactcttttggacaaaggaaattcagacccaattcttttggttgagttcttcaaaaattgcagctcgacatattttctggtcataggtggtgtttttatcgcccaaccttcaatggcatgacaagtctagaggccaagaatcatgacatctcctcttcatgtcagctagcacaatgaagttgactttgttggacaaaatccccaccacccttgcgacgaaccaagcagcagctgaactactgtaatcactgccttctacggtgctagactgctagcatttccttaggacttctctggtgggtcataaacagagaaaacagtttaggtcctgtggtagtgtcccttgcactgattctagttatcactgttttcttccccatctagcatttgaattgctcttttatggttaaagatgattatggattgtgaatcattctcaccttccccatttaaaaaatcttgctctagtgctttcctaacactaccaccacttatgttaggtcagagacacattctttggaaatgttatgcacaaggatatggattttctcttggctcacatatttttctctaggtgaaccctaatcacaaagtgagtgtattcttgggtttgtattcccttggttgtaagtgtttaatgcactgagtgtcactattgcaacatctccattacggtgagaagctttgcttgtcaccattgatgaaagtttctggatgaataatctctccactttagaatgaagagacttaatcgtatctagtataatagggattcgattcatattgagatttcatcagttgttggcttcatgtctaaaatgattccacctttttaatttgactgtttgctgcgagcttccaaaacttatttttccatgcccaagatgaatgctctgataccactgttaggacccaaataaattcccatgcaaggatagagaacattataggaacctggtggtatttgaaagaccacccctcttccaagagcaacaactctactccaaattcatatagtagatgacctctttcaatcactcttgcactgtttaaatatactcaatatttctaggactattacactaaccctaaccacttacatttgaatgacaaaatatatactctctttttgaagttattgcacactcctcactacttgatttatttccatttgtttgactcttgctgcctaacagtaacccttttgcccttgcacaccaactacttgagctatccttgcatggctgagaaagaagtaaccatagaaaattaagttgcttgtcctttaccggcaaatgctatttcgaaaacaaacatatgtaactacttgttctcacttcagctagtgttcttctgcccctattctattatacatatcagttcatgaaaataatattatgtggcatttcttgtaaacatacaagtgatgaaggagaacatgtagtgttccatggaaagtatgacttaacaacaaaataacactgtagcgtgaaggaaatttaaagcacaagtctgaaccacaatatgagatgattttttatttttttttaaaagagccacaacttttcaaattttctaccaaattgaaattttccttcaaccatttaaattaagagcagcacaaaaatagtataattctgaagcatcttatacatttacttgtgcccaaagtgcctattgtgaaaaaataaaaatatctcactagttccagaagctgtgagctatcataaccgaatagtgtggtcccaatgtgtaacaaattcttgttaaaatattccctgctttaatgataaatttgtaattgtgtaaaaaggtctaggttattattttgtacagtggacaagtcattataaatacaagcaatcagccaatgattttgttgagctgagttttcattctttttctcttcttttcttttgctctctgtttttcctctggttctcaaacttggtatcagagcattatgaacaccagtggtgtatcttttttcgagtgaaatggcagaacaaactcctgtgcatggagaataaggctcgacagcaagaagcatggctagtggcgttgctcaaacattagctctagtaacaagtgtcatgaaaccacatgtaggtagttccctaattcaaccctttgctttgaaattggataggaacaactatacgctatggaaaacaagggtgttaggtatagttcgtggtcatcgattggacgggtatcttaatggtgctagagtgaagccaatcgagttcctgccctttgatgtatcttcaggtgaagatgcagtggttgttaatccagactttgaatcctagattgtgaatgatcagcctcttcttggatggttgtatggctctatgattgagagcatcgccatagaggttatgggatgtgactcatctaccagcttatgaaaagctctga

SEQ ID NO: 15912 - DNA, 7219 bp, Cannabis sativa
ttactattagttaagttttagaaattttttgaatagtttacagtactaaaaacacgtttaaatcttttgaacatgcatagcaaactagaatatcaagatctctgttttcggtactataaatttatttttaaaaaatttataaaaatgatactgtaacgataacgaataccgttatgaaaaatatctcgacacgtgatttcaaatataaaaattaattaagaagttgtaattaacactcctctaattagtaattagtagaccgggcttcactcttgattgattccttacatctttcacaatatgaacatgtacacattatttgtagtacataagaattaaacaacaagcctgttacctttaatgaagaacatagaataattaatacttcctcaagaaaagatcagaaagaagcaaatgaaggaatattaattacaaatgattgtattattgcttttctgtgtaaaccaaaaaaaaaaaaaactgtacccaaatttacagttggtaaaaattatggctgtattacaaatttacagtgtagtgaaattactgaagatcttacttgaaccttgaaaaggttcatgccttttaatggtgcaacactcttacaatgaataattaaaagaagaatgtgtatgtatggactatagagtatagactatagagtttcttatggatatgactatgagatgctaacctcattcactgatttggctaccttcatcagaagcagttgatcttgcagctaagtaattcgattttacattctgataagaaagaaagaaagaaaaagatgaagctcctaatgtactcaaaactactgttgttgattgggctgaatcattagatttcttagtaatccatgcaagtcttgctcggccccattacgcgtaatgaaaaaacaagtttttttgaggaaatgagcaaaaaacaagaaaaacaatagaattggtgccacattatagtacctctagcaatgtgatgtaatagaaatcctccatgtgttgcatgagtgcactcccatctctgatagcgcggaatatatttatttccgtctgtaatattctttcaacgagttccttctcacccttcatctgagtaaaatcaaatatgataatggaaatgaatgtatgaagtaaaggcttcttgctgtttttgatgattggatgaacttatataaggttaagaaacaaactaaagaaatttgaacatcgacaagacaaattgcacaactcgagataataaaggttggaagacatgaacatacaaattcactgacaagtacgtctggtgtggcttccccgatcacatccccatggtaaccatctccagaaagctccaaattttcctgaaataaaaaggctgtaaacattagctttttttctttctttcaagtacaataggaagtagtttgtttatacatgttatcttgttacgtaaacataaaactcaatagcacaattggaaaaaaaattgctttgtcttacaacagaattatgttccatcggcatgtaatggtggcagaggtttaacagaaagaaatatagatgacacgcaatcccaaaacaatttaaaaagcttaaaagagaatgcatttttagtgtaaagtcttctttaggatgtgggagtatacagaaacaaaaaaatatgtacaatttttcacaaaaacagaagttacaaaatcaacaaatcctaccccactctttctttcccccagccccatttaaatcaagaaagcattagagttcaaaaccagtaagtggagagagccacaacactttgtctgcccccaagaatgactatgatatcatgcaacaaagaaatgcaaaaattatgatgtctaatagagataggtttgggctttcataattattgatactcaagcagataaatgacctggatacaaaaccgttaaaatataaattacccaccaaggcgtttcttagatctcctgcccctaaatatataggttgagcaacatggcaataacccatcaaacgtggaactgttggtataatgtccctgtgatttacgactctccagctatctttgactttctgtaaaaacacaaacgaagagggttgtacaaacatgacgaaatagtatctagttaaataaaaagtagtctacacatattaactaaaatgaccttcaatttcagaaaaaaagaaactatgatgtatatatatatcatagtgaatcataatttaagagatcaaactcagtactttgtttctgaatttaaatcaccaggtaaatcttcccaagttaagaatactcatataggctgacatgatgaagccattacgtttcagttagaagcacataagttttacaagagagctagtatctagtgaagaatcagtatatggcaaagattatatttactcacctccttaagcaatacagaaaataatgacaagatactatggtgcactcttaagtacccacgctccccacaacagaaacagtataagataaaaaaaaaataagtggtgattcatacagaaaagaaactttaaagtggtacaaagctgagagataacacagtttacattcaaaagtttgaaaaaaattaggccaaaaaactgtgccagctacaatatttgcatagggctatcgataaataaaattccaagcagagctcacttcggtaaaaggattgaaaccatttgtaagagtagtatgaaaggcatatatggtcattaaacaaatgaaagtgtcgtgcaaaaaaatgaaagggagacgcattcttttttacctgattgtaaatatctgcaaatcgtttgttaccaactctaggagatccaaagttatacatggtcagagatattgccccacgtctaaaacacacaaacatagaaaaatcaataaaatacatacttaccaactttcattctgcataaagatttttcatagttacacttcattaagaaattatgcatagtagagctaaatgtatgattacacaaatgtccttgacactcccaaacaatagataaaataataaaacagggaactttaaagcataaattaagcatgtgccactagaaatataactcctgcttttgcaatgttggccacaaacatcctcattttgatattaaagtcaagaagcatccttccaaacattgaatacacattacttaaagtgagaatcaaaggaaaatcttagtgtgtcatcatcctagttcactttgtactcaattattgccacatttttcacttctcctccatatgatagtttaaaacataaataataccacaaacatgtcagaacgaaccaatttgactcatgataattcgtattttgaaaaacaaacctataccaacccacatgagtaaattaactaaagtttagggaaaaagcaaaaacacggaaacttgttaaggtgttatacagtagtccttgcttgtgttttaaatgtttctttttttttctctttttttgtagggcttgttaatatatccatgtgaccgtattgattgaacttaattgttatgagaaaagaaaataaaagaaaagaaaaggtaggacatgaaaagaatatgatgcataacatgtgagcacatatagtaacaagaacatacagaaagaactcactttgccaattgactcgatgaaagttccagagcaagaagggtggccaacgcacctcctaaactatgaccagttatataaacatgccatttgaatgatacctcctgatcatcactgccaatgtaaaacaaataagttatatgcttattcaactgaaaaccgatacttaacaatgcaaatggattaaagcttaattaaatctagctggtccataatattaacctgcattcctaatcaatcatacatgtaacagatgccgactagcgagattatacagcacataaaagaatcatttacaattctagtccataataagtttaaaaggcagctcatcattctaaactaaattatacaactcagaaatttcaacatagttgttgagtataacttcactatatcaatgaagtaatccaaaaggatcgagtataattttataaccaacaagatctggaaagaagcatgagattgatttgtttcacgtgttttggtttatgcagtaagagattatactagaaaagattaatccacttggtattgaacatatagtcccctagtaccttttcttaaatttattgaataatctatccatatttctcagaatttattgttggcaaacaatcaatttgttatttttatttgttttttcataatccaatcaaatactatcctaccctaacccatcctattctatctcaaggtaccatagttaccatgccagaaagcattagcaaagcagattgcagtaagctcccatcaagaggtcctcagtcaaggaaaaatgcccttgggtagtaattagggaaatatcacatagaatctgactacttgtataactagcatgcaatctagctttatttaaatattccgaaaattcatgtttttattacagcatttaaatggctgttgtcacctaagtagatacaagaatctacatactagattgaagtgaaggactacttcgtagttatttcaaacatattgaaaacaagcataaatagtttatggacaaggttaattacacatttaaacatcacttacgaataaccaattgcctgtttgatgatagtgaatagtcttatcctcactgagtcatatgcacttaaaaaaccactgtgaacctgaaattacttattcactatcagtacatacaaagatatttactgttggaatttatgaaattgtaactcaaatttcaataaattcttacttgaacttcttgcttgaagtctccacctattctttcagggttaagcctataaaatacacagaaattataattttggtatcaaaataataaaaacatattaacaattaaaaggacatctcaaacttaaatgtattaatgtgatgaaatgataatgaaaaactaacaagaaatggtggagcacttgaatacttatgcttatatttctaggtggagcacttgaatactcatatggtgtgttctacacaagtatgaaatgaagagaactatatgggaaattaaatactgtactactacacattcagccactacattatttatgagtaagctggaagctattagtatagcacataaagcatctccattgaaggaatatctaccaactggcaaagaccaactctcagaaatgcaaggcagaaaaagaaaagacaaaacttttgaaaaagagtaccataaaattataactaacagatattaccctgtaggtgctaccattaaatctgttttcaagtccttccattttgcctgcaaaatcaaataaattagaatacttgaaccgaaagcaatatatacaaactccatacaagcagcaacattggacttacctgctctgttcctctaaaagcaacaaccaatcttctcctcgaaggatctcgccaaattgccacctgcggcttaccataatttagtgatccatcgaatataatctctgtgatcaattacttggtttttcttacagatgaattaaacaatcaaggctaacatattccttcatattctagaaagtaataatcaagaataaaaactccttacaaaaagaaacattacctctgtgtctgttgtttcattgtctaagaaacatatcttctcaaattcagacttaataaagcttggttgacctaaagaagtagcaagcattgcccaagcctctatggcactctctgcagttgaaaatagctctctcatctcctcagcctttttttcatccaggaccggcccatctcgtgaagcaagcttctcattagatcctgaaaaatcatcttctacatttgaagcatcttcttgttttgattcactcttttctgaaagatgtccttccttatttgcttcagaaattgctgcagtcaaaaccattaacgtccctaatacagattctgtttgctttaagagatcatttgttgccttttttatagctggaagagaagaacgaatggcgttcatatcaagcgagccattcgttgaatcaaggtcttcatctatgccttctggagttgcaagcccagattcaatgtaacttgcctctgctatcttttttgactgtaagccaatactgtttaacatgtcaaatccatcccactttaatttttctggggcttgaagaccaagtttctgaacaacactttgattgataacattagcaaagctcttccagaaatctttatctgattcctttgtctcaccaacttgatttactaattctggagcatatccattgtccgctccatcatcatttgtgttgagatcctctaaattgctactatcatggtccgcattatttgagggtccattggcacttttttcgatctgtggtgccatgtctgatacaagagcgtcttcgctagacatctcaatcacactttcctcattttcattgtctggaagtttatccttggtaagatatgcatcgttgaaggatttcatctgcccaaaagcataattaacaaactggcgggcttgaactgtttcagagccaacgattttcttcatagcagaatcaaaaccatttttacgaaaaaactctgaaagaaaagaaattctccaccagtccttttcctcatcaatttcgtcaaagtctttatacttgacctgaaacctcacattgagcaaccacatagattgaatatcagtaaaactaaaacattggtggaacacaaaattgcccatttatgagcaccaaagacaaaggaatcagtctaattataaaaataaaaatccaaatgagagaaagaaagaaaattactaggaataattttcacttaaaaaacatagccaacacatgcaaaaccaaaagggccctgaacaacagtaattaatatatcttggaatcagtgaaagtaaaactttgcaatatgcatcacacttgaattatctgcttttcttctaatcttaggatctgaaggaaactttaaagggacattctacaattaacatgatgtgtagggatagcaaaggaattcattctaagatacctttttggattaataaaatgaaatatatcttacctctagttgtaactttccaccaccacccatcccctccagttccaccagtacttcatgcaactctcctaccagaacacatatttgtatattatcattttaattttagcaagaattaccgctagtgttaatctttca

SEQ ID NO: 15913 - DNA, 4954 bp, Cannabis sativa
gaatactcctaaacatctttggatatatctgcatggtctatactattttcgatacaaaggcttctgtacatccgacaaaataaatttctcataaaataagataaacatgaagattcgtacacctactctagcataaaaacgtacactttttttagacgcctacgtgatgagataatcaatgtatgtcacaccccgaaaagacaagattgcccaagcatgagctacacactttgtacaatttcacccattaggcctttaggttaagggaataagccaattgttatcaacaagtaggattagtcttcacatgtaaatgtatcataaattttggttatgaagtaaaaacgttgccaaaatccgcttagaatttcatcacttgtaaccctatgtttggttgagaagaaaatggagtggaaataagaaaagtttggaaggaaaagtggggagaagtgaaaaaaatatatatatttgtttggttggaaagaaaaatgaggtgaagagaaaagtggatagaaaaatttgaggttgaacccaccaaaaaatttccactccaatttggagagaaaagttttacaaaaacattaatgtaaaattactaatttattttttgcaacaaaaaaaaaaacaaatatgttaataatttaagggtaatatagtaatttacaacaacattaatgtaaaatagattttctattctttccttctcattttctctagttgatgaaaaatataggcaacaaatctaaggttaaaaattaaatttcatatttaaaatccaattttaaaactgaattagattagatcggttgataattttcaggattggtttggggcaaatagtttgaattgtattgaataccaactcctactattttagtatcattttgtcaaagaatatatgccaataatttcaaaaatagcacatctgaaaaaaaaaaaatacttgtaatgtcacattacattactactcatattaattattctaattcaatgtgtagcaacaacaaataagaagctagatgttaaaaaaataaaataaaaatatatttactttccaacctatttattcaataaaaatggtaaatgaacaccttaaggtaccaaacactatactgctatcagtgcatttcaatatctagtctcatatgaagaactgctaaccatttataaagtatcgcatcgttgtggtgtgaaatttgatttcacaagcttcatttttttctctctttttttcatgtaaaaatatttttgttaaaaaaaagttcactaaatcctcaaaacttgtataccaactagcatacataataagaaaccaaagactgtatttgtatatgtacagatcagtatatatgtatatatatacaccactgattgagtaccattaaataataataaataataaaaaaaaaaaaaaaaaaccctggactgaatctaactccaccactcaacaataacactaagaagaaaaaaaaaactaatgaagcaaagtaactgagaatagcacaagaaaaaaaaaatccctactaatggaggaaaagaaagaaacaaatgttatctaaaatatgttgcaaataaattatggttaaaatcaaagaatatatgaaatgtagtcctctctcaatggggtttgcctggatgaagaacacagatcaagaaatgttgttgttgtcgccgccttttcatgattttcctttcccggtcgacccttcccgctggctacgaaaatgactcagaagctgttgtgcctgcattttttgtttaatctctcattacaattgtatgttatttgataatcaggaagacttaattgatagtattgtaatatcaaatcgaggtaattgttatatatgcctgatagttatctattattattgtgttctaaattatatacaaataacaggatgagcatgagcggtgataccaacgcaagagcgttggaaattagagtgtaatcatttagtactctgtgttttatcaaaagatagaattcataccgtgtgtttttaataatacttataagtgagaacagtttgatcaaattgataaaatttgattgacgaatttgagttcagggtatcaaataagcattatcgagcaatggaatttcaaaacgctgcgtaccttttctctcgctctcggtgttccagattgagataacgccacgaggggagggacggctccttcctgtagaacaagggtacaaaatttattactatgaaggcagagttgaagtagtatggaggcagcattttccttccctctctgggaacccgattcaacgatctcaactagtaatggaattccaccttcccgaaccattgttaaacggccctctcctaccgtggacaaattcgagagaagggcaacggccttgtcaaccatcccggtacctgggtcaagtaactcaacaagatgccttatggccccggcttgaactattcgagccttgttttcgtgaaaaatcgataggttaaacaaagcggtagcagcatctttctttcctctaagagtacctgatcctaaaagatccactaaagctttcaccgcaccagaacgaccgattttctccttgtattcttcgagtacagagaggctgaataaagctgcagccgaattctcttttgctccattattcccagttctcaatacatggatcaacggttctatagctcccgcttcagcaatcatagctttgttatcttcattaatcgataaattcaaaagagcagttacagcgtgttcctgtgtttgtttcgtctctgaatacagcaacgaaagtaacggtttgatagcaccacactggccaataatacttcgattctccacattgtgctttgccagaagccgaagctcttcagccgctgtagtttgctcttcgatggaaagactctcaagatcttcaatgagtttcgttacatgggaagttgttgttaaatcctcagatactgatgatttggactctttattggccatatacaactgcttacccgacctccaaagagaatttctcggttctttgtttggaggctcggaagtaatctcaccagacaacacataatcaatactcgaaacagcactggatgttgattcactcctgctgtgagagtaggagtgttcgggggatggatgaccgttgggtttctctcccttctcaatcccattaccgacatctacatggtctggttgtgacgaggctacaacgacagttcttgttcggtctgagtaaacaggaagtttcacattgttctcctcagaccatgttgctatcatagctttgacagtataattagtaatgacatttgtgtgagacaacttctgatgagttttcgggcaaatggtcagtccatcattgagccatttcacgattgaagatctctcgtacgtttgacccgaagccataatcacgggatccaacatgagttccgatgataaaggacagcaaaagtacgaagggactgtgacgtcttcaattcgctgaagtttaaccatgcaatcacggattcggtagacaagatccataatctgtctaatttgattcaaatctcttctcactttactgcattcggcattgattctctccttctctacagcaataatctctttcaacaactcttggcttgatgtcaaatcaagcaattcgatgattctcataagattatcctcgtaagcatttcgagctctcatcgcatcttctatgtcttttgctattctttcctgtttcatggattgaacctcctgcatacattgctgaaaatccccgaaaaacagattagtcttgcatgaaaaactataagtgcgctaaatgcttctaacaagaatatgaaaagggaaatttgcggcattaatactgatgtaagacctacatggcagccacgtggcagcatttgattcgccaattatattaaaaaaaataattggactaatgagatgctgccacgtaggtccctagccagaaataacggctagggaccaaacgtctgcattaaatgtgtaaagttaggcattattcgcaataaatcaaactacataagtattaatgcagcaaatttcccaatatgaaaatatcaaacaataaaaacaagaatcaaccgaacgattgtctgtctagcacacagttttccttcttgaacagtttaaatttagtacttaccttaattgcagacacatttgaactcggtgaatcggatgattgtagcaatctgtgcaacgcgcagcagataagaagtaaagagccttgaattttcataaacaattgctcgcttcgcaaaacctggtacatacaaaaccaaatcacaaaaaattaagacaagttatcgagttttcaagaaccgctcaacgctatctgttgccctatttaaaacgaatcgggtataaacaaagttagttacttacactgcaaatcttgctcatcttaggagaccaatcttccataaactctctagccatatttacagctgtatccaattcctcgaattctttacataaaatctcatcagagtacattcctgaatcaagaacttcatcaagaaatggcttcaaaagtttcagaacaccagctatgtttctgtagtcgttctgtatgagcaccggcttcacattttggcacgaaacaagatgaatgaatcgagaaatgctgtttataagacatttcacagatgtctccatcttttacctgtatgagaaaaaaaaaatcattactttaaactaaaaaattggaaaagttcccgaattcttgatacccctgcttcaaatcccagcccccgcaacaaaaaatggcgatacagagttataactccacaaaaaaagggtacctttaatgttagagaaaagtagctagacaagaacagaaagtgttagcaacacacaacttggtaaaattccagacaagaccgagaatgactcgcccctacaaattcgaaaggacaatttgactaaatagccatttgaacacaga

SEQ ID NO: 15914 - DNA, 4057 bp, Cannabis sativa
  modified_base (27)..(35): a, c, t, g, unknown or other
ttcaattaatctcaacaccttgatatnnnnnnnnngtgtagtatgtagtattctctttgtaataggatctgacaggttgtatgctttttcttgtatgcattgtcctttgattcctcctccaacaacattcttgccaatatgcatatttaaatttcaccttacatcctcaacacagtacattttaccacggctcgcatgcaacacacccatgcacacactcacacacgcaccacgactcacatgagcccccctctcacacacaacatacacaacgcatacactcacacgcacacacacacacacacacaccacgacttgcatgcaagcccccctcttgcacacaacacacacaacatacacaatcacacacacacacacacacacacaccaaggctcacgtgtgagcccccctctcgcacacaacacacacaatgcacacacacgcagctcgcatgcgagccccccacatgggttcgcatatgagcccccattcacacacatgaacacaccgcacacattcacgcatgttgaggggactcgtatgcgagcccttaactctcacacttgcatgtggacgcaatttactgggttggcattagatttgctcggatgtatcccgaggcccacaagtactgttggtgactttgagaaatggacgtcaaacgagtagttgaatcaaatgcgccttcattgatccttaggttatgaggcgactaatcccgagggttagccgtgctaatttttggggttaacacttcccccaatctacaagaattcttttaagtgttcttgtcgactgagtgaattggggaattgcttggttggagtgggagccttactttctctgtattttttgaggatatgcccactatacataggggcctctcttgatttaatttcacttcacaatctccatcttagagtagtggtaaattcttctcacattgtctaagaggtctcatgttcgaatctcgtctaaacttttttctcttttctctttttggttgtcgagtgatctaagtcaccatgtagtcgaatgaccttgatcatcatgaggtcgagtgattttgagtcactcttggggccgagtcacattttattactctttggttgagtgactctagtcaccacaaggttgtgtgacatttgttctctatttgatcgagtgactctggtcaatgcgaggccgagtgacatttttagttgatgttggtcaagtgactctgagggttactcttcgactaagtgactttcataactgatattggtcgagtgattttgagggctactctttggccaaatgacttgtgtaactgatgttagccgagtgactctgagggttactctttggccaaatgacttttgtaaatgatgttggtcgagcgactctgagggttactctttggccaaatgacttttgtaactgatgttggtcgatcgactctaaggattactctttcgccaagtgactttccccattgtggtaagcaagttttcatttgagggagtattactatttgagcagtctcatcctcttattatttactcatccttttactgtgatgtgagggagcttattgtacttgactgtgctaccctcttgatttgcaagtgtttgcttatcccgagaggcatccctcttatttcagagttaggccatgagtgtctttcaagacatcttttggctaaattactttctgttgggagaagtaggtgcatatctcttatcgactaagggtagctaatccttgccgattcgaaaaattccccgctcttttttttgcccaccaagtgtgtagcgtcattatctttgacttggtggcccacgtgattgtcttctttaatccagtgtaggatactaaaagtgaactttctattgctaggaactcctcgcatagtggaactttacttagaagaatatcttagatattcaatttttacgggttgtataacggagatttcacttgaatccatcgacttacgagtattggtgtattatctaatagaccttgtaagggtctgacaagcttcccaaagtacactcacttgtgtccgtccccaagactctgtttccttcctcgatacggatgtatatttctgctttctcatagaagtcctcatttccatccaactccctttttaacatattcccccataatccactcccaaggcatattccaatagctatggcgaacttgagttcatcgttggacatcctccctactttggcaacttcggcattaaagcgttggatgtatctccttaagctttctttctccccttgcattacattggtgatacttgttataggcacaatgtaatcactcgttgcttgatgttgttgatggaattcctccaaaaattgcttccaagatgtaattgttcctagtctaaggcttttaaaccacttatatgcagctcctttaagtgtgaccacaaaatattggcaccttgccttgcatgacaccttttgcacattcattagctcattaaaagctcctagatggtactatggatcagtttaaccattgtatggtgtcatgcgaggctccttgaaattagatggaagtggttcagtttgaattttccttgagaaaggggattcttcatcgaacccatcatcctccaaatttccctttgatgcataaccatcttttgatgtagatcttgcatctttgcttctagctctttcattctcttgtccatcctttctcgagagttggtgagagaaacttagttttccctgtggttcacatggagcatgtgagtagtactgctctcatcccatcattgtgtggctttccaccacggttgaggggcgatgcctttcgcttgctttgctcttgaaaagggggcgcaggtgcagtgtctcctagcacgagattctttggttaaagtcccttcataagactacatgatgtttccctcattttcggtcttaccccagcgggtagattcacgttgctttgaacgtcctcttgggttcttgtctcgtgataggcccttttcgctcccatcctttaggatcctgcggtcttgctagtgacttttgtacaaaaagtgtgaagcttgagttttgcctttgagaatggcgctcagtaccttttgcatgccgaccactgtagattctaacctttggtttttctagcagaggtcatttatttcatctccatagtggcaagtttgggattttgggctcacagagttggctcgcttctcctttctggggtgaggttgcgaggtaccagaaacaacacaaaatgcttagatgctcttgctgccttcaagatgtggagattttccttgacaacaaccaattgatcactttggggcgagatctccgtccacccgtccttggagaataaggcgctaaagaaaatgtgaacgttatcaatcctcaagtaagaagagagagcgcaagcgggaagggatctcaatcaaggcaaggagaaaattttcgtggagagatcccaatgaatgagtagcgcaacggagttaaagcaatgatttgaagaaaacatatctccaattgtgcttcatttaagagaaatttatgatgctcattcattattctattgttatccccaaaaattaatgttgctaaccctcatgattagttgccacataacccaaggattaactagggtgcattcaattcacctactcgcttgaggtgcatttctcaaagtcaccaacagtatttgcgagcctcgagatacatctaagtggatcccaagccaaccttgtaaattgcatccgcgcacgagtgtgagagtcgggggcttgcatgcaagtcgtgcataatgtgtgtaacatgcatgagtgtgtgttgtgtgtgtgtgtgtgtgtgcgagtgggagcttgcacgtgagccatggtgtgtgtgtgagtgtgtgcgttctgtgtgttgtgtgcgagaggggggctcgcacgcaagccgtggtgtgtgtgtgtgagtgtgtgcatttgtgtgtgttgtgtgtgagagggggctcgcatgcaagtcatggtgtgtgtgtgagtgtgtgcattatgtgtgttgtgtgcgagagggggg

SEQ ID NO: 15915 - DNA, 5933 bp, Cannabis sativa
  modified_base (1501)..(1513): a, c, t, g, unknown or other
  modified_base (1572)..(1572): a, c, t, g, unknown or other
  modified_base (5661)..(5663): a, c, t, g, unknown or other
caacccacatcactcacagccgaccgccccaaccatccacgcagccccgaccgccataccgaccgactgaagaatcaaccggcgtggaatttagctcatttctgggttttgaaggtcgggtttgatggttttcccgatgcccgtccgatggtgtgcttgatggtacaccagtttggcttatttctaggttttgaagatcgggtctgatgtgggcccgatgcccgtccgatggtgtgcccgataccgtccgatggtgtgcccaatgcccgtccgatggtgcgcccgattgtacaccagtttggctttatttttgggttttgaaaatcgggtccgatgtgggcccgatgcccgtccgatggccagtccgatggggccagcccgatggtcagtcaattttttggaaaaaaaaggaagaaagagggacggttggagaaaatgggaagagtattttggggtttaggaaaaagttatcccatataaaaaattatgtatagtattaatttagagagccaatttataagtttattaagcatggaaatttaaattcccctttacatactataaaactctcatatgtgtctctattttattatttaaaatactttattaaaatttaattttatctattttatcttttacatttatatatcatttaaatattatattcttttaacttttttattaataaagtattatatattaatattatctatgtttttatgtgtgtaagagagagagagtgagagacaaaaatatattaaaataattaatgaagaaattaaaaaggtgagttaaatgtagagaatttatgcatcaagttttgaagcatatatgataaagagaaattttaaaggcacctctaattctaatatttttgtgagttataatattattgttggtacaatttaatattcagtctcatttattttactttaataaaaattattgaatattattaattatagggtgccaatctctaatggtagtatttttaaaggtacaaaaaatctccacatcatcaaaaaaatataatattttattttatcttttttccacataaattttgatactcttacttctaaaaatactcaagtaatgtagtacctttcaaaaatgctataattataatctcacacattattaaataatatattatttattttaattataaatattgtcacactatttatttacaataaagggatgtttggtaacacttttatcttctaattttttaatcacaacaataaaagtaaaatttgtgtttttaaaaaataaaaatgtgttctataaccacttctgttttttaattttaaaacaaaaaataaaaactttcattttttgattttatttaagttgggtccaaatccagggccaaggtcgtggtctgagtacgggactagggcatgggccggagtccgagtcccaatgtccagattgcggtcagagtctaaaatattgactaagaaaaaaaaataaaaaattttgaaagtgatttttnnnnnnnnnnnnntttgattctcaattaaaaaatttacaattgaaagtaattttatagaacatgtttttganaaatatttttacttttttaatttaaaaaaataaaaaattgattaaaaaaatgttatcaaacagactcctaattttttttatttttttaaaaaaaaagagatagcatcaatgccatatagtggcattaacaatcacataattttttatgatagcaccaatttatctttaatggtataacatgcttgtgttttgccaaattaacattccatataagcaacctccaaaatttataatttcaactcattatctataatttctttattttttttttttttttttgagtggtccaatacatttagctacactgatgagagtgctcctacgctttcatacatgaagaacaaaatatttttaagatgtgtttggaaacaaatgttaaaaggtattattattgttttaactgttaacaccatatatcatattattattacttattagtcccatataatttaatttcatatagattatgaaatattgtagtcattctcaagtcaccccttgtggtgataatagggactagtgttttataacaatactcatttggaaagtgaatttttatttgaatttacgtgtaatttgaattaattatttaattggtgtgtttgcgtaattataccattgaaggtctcaatcatactcttcaataactctcatgctcattcatgagaattaggtataagtactaaaaattttctatcttaaatatttacaacgataaaaatattgttattctcgtgtaattaattactaattatcaatagtaaaccatatacaaattcttttactaaaatgacttgaaaaatatttatttatattttatcatttgataattagatctaaaaaaatataatttgaaagtgatacataaatatatattattttttttatttgtaccataatggtaattttataaaacaaaaattattttaaaagagtaaaggacattttggtcaaaataataaaaattccattttattctatataccaatcatcacaattcttattcagttattgattctatagtctttatcaaacaaaagaatagaaatttcattctatttctattaccattctcatttctattctatttttagtttgtaaccaaacgtgatcacctaagtgtttttacatttcttaattctcacaaaaatgatatctcaagttcgaatcgctcgatctctaatattaaaaaaaaaaatcacattgagaaattaaaaaaactaagcttacaatattgaggagtgatcgatcattacgaaacaaataaatgtggatcgatgcattatcatttgttaattaagatctaaaatattctttttctattctgaatttttatttttattattttttttataaaaagaattttcatttgtttgattgcgcgatattataaaataatatttcctactttgcagtgacataagttatttattttatttttttctttgaaaagataaagaaaaaaaaagtagaagtaataatgctcacacaccagaactactggatgtatccatacattaattcatacgtaactttttcatatgctttgaataataatgtatcaagacatatacacaagaggccaaacataaaacgacaacaaacaagatcatagattatttaaaagcacttggagaatgatcagttggaaatattttattttggtaaaaatatttggaaaatatctttacaaataatttggaaatatatttatatatagatatacattataaatgcacaaaacaaatgattgagcttcaatgatagactatatatatggaccccaaatatcatttccccaaaaccaaatgatttacaatgagtactggaaccctatatatatcatctatatgagctttaactaactaagtgacggtacaaatttttttagtaaatgtgcaatgaagacaagcaagcaatcaataagttgggatatatgcacttatgacttgcttccaaatccattctccttaatatcatccatatatacatatttacttaataagtttttagtcattaccaacatagcattaaaaccctccaaaaattatatccacaaaaatatatatgataatatataagatataatattgtaaattgactaaaaacgtttcaatatcatatcattctatttatagaaactttaggaaaaatccactagctaggaagctagctatttcattccctcaagcttcttagctttgaccttccatgattagaggatatctatagacttatagggtactcaaattgaaatccggttattaagaataatggtagatgatgacccaaaaatttcatgaacataataataatatgccgaagaaatatttcgttgaatattattttttgtttggtggtcaagaaaatattgcccatttagagagatggtcaatcaagaaatcaaaagctttttttgcactatatgaaaaatgagagtttattagagcatgcgcttgcgcatgtccttttagcttacctttaattacttcaaaaaagaaaataagttttttgttagactttttgtgtgacagatattgttattaaatattaatgtcattctctttcttttctaaccgatgacttaatggaatatataatttatatgatgtaactcttaatttagttgctttctcattcaaaaacttcaaagtaattttagtttcatctcaattaatatatagtaaataaatacaccctaaaatacgagctctctccctttctcatagaaaataaaggcttcttacatatatcgttcccatgatgatttttgagaggaaaaaaaaaagtagacaaaaatagaagataaagtagatctgttttccttttgacattttgtacaatatatattatgatattctctcttcaatgcatgtatagttacatcaacctttccttcctttttaatttttagttttttggattgaaacatcaaacttttgtttagtcgatctttgaaaagtgcaaaaaatttgtaaattgctttcatgtaaaagtatatatatatatatatagcacatcaaggaagaataataatgtgctaggtaattttgttatattatatatgtgacagagaataacattaataacatctctaaccagttctatcgtccacgcaatcaacttgtgtgacgggtccttgcatttcacagctgcttctcactgtcttctttcctctttctctttataaataatttttttttattttattatgtattattattataaccagaaccatgtcaaatcactgtttgccacgtgtcagccaatcatttacgtttcctttcatttttgttttatacagaagcctttcgttacatcaactcaaaaggtcctttggcaattggcaatttggcaggatccaatcacttttatttgttagcttaaccttataattaccaaattaccctctttatgtattctcacttgcacatacaaaaataaaaatgtattcaaaaaatttctaaactaaaatgaaatcattatcataaaaatgtatttaggtaatatttgtaatttttttattataaaaaagaaaacgtgtatagtaacttttatttttatttttagtgagaaagaagaaagtaaggagagaaaatgaaataaatattgataaggccacctccaatgggcctgcaaaacctcaattacagtgtgatatcacactaaaactaagtccaaccgaatgaaaattgtataatcatttttggatttgtctacaacactaaattgttttttttttttaataattatataatatttaaaaaaactaaataattataaataaatattaatcaaaacttttataaatgtatttgtttgtatttttatatttttaagcgtgctaaaaaaataatttatgggtgttcgcggggcgggtattgcggtctttgaccatttttttttaaaccaatccacacatgcggtttttctaatttcccaaaccacaaccgcaccgcgaaactaaaaaattgcgaaaatcacaccgcaaataatggtgcgatgcggtgcaatttttgcagtttggattatcaccaatatcacaaatacaacaaagcttaagcagcacttgtcaaaaataccataagnnntgaaaataaatataaaaaaaaaataaatttcaataatacaataattagtgggctttgagttggacattcacatattggacctaattaaataaaagaaattagtatttttataatgtgcggtgcgttgcagtttgaaccgcatattaaaaattcattgattaacacccctaaaaaaatatacacactaatgtaatgtttattgtaaattaaaattttttaatatttactaatataatttattgaatttaacaaatatttagtattaaaata

SEQ ID NO: 15916 - DNA, 6123 bp, Cannabis sativa
tagctacataactctagttggactgggcttgcacatcaaatgctttagttaactagaaaaatccacacttctgtttcacctagactttacatacaaaagctaagcccgttaaactattgatcaccaataatacgggttaatacagcaaagaactattcaatcaactcaagttttaataaaaccaataaaatttaatgtaagtccagattaaaagtctaatatctcataattgaggaaattatattatatatctcttttaatttgatgcatttaatttttaccatttcttttagaatctattatgtttacctcttttttcaattattctaccaattttactcttatcactttacgatagttttcatttttctctaattaaaattttgtccaaactttcccacaaacctacacatctacaaagaacacaaatctattatgtttgaaattatgtcttgtttttgtagtgtgtgaggataatttgagtacaatactcataaaaagaggtatatttaaattaaatttaatttaaaggtaaatttgattaatgtataaaaaatgggggtattcttcaaattcttctcattgatctcatctcactcactatccaaaataataaagtttaggttttcacactacatactaaaatttctagcttttttactttttcattgtggagcgaaatttttttcaaaacttatactgtgtactgtgttaaatttacactgattgttctacaattattttttagttattccactgttattttttgttttaattgttctgttttgttattttacggttgtttgataaaaaaaaaaacattatttttttgtaaaaaattctgtgtgagtaaaattataaatttttgtcaaaaatacagtatttttgtaaaaaaaaaaaacccttaaaatatcttgagctttttttaaaaataatattattattattgtaaagtttcgaccgttataaactaagaattcaaaatttttaaagacccttacaactctgccctttttgctatttccactccattaaaaattcaaaaatcagagacacaagagttcgcctttggtggggaagaagcagaaagtagggtgcccaaatcatctaccttcgatcacatgttcattccctcacaatccgacggttgagattgtcacataattaataaccgaaatcacaacgtatgatctttggatcttccccctctcgtttcacttccagttcttcatttcagcttctttttcagcccttaacttttcgggacaatctttgagctctcttgacggttttagcaaatttcctcaactcggttcgggagaaagttatctggccatgtttggatagtgagaaaataacaacgaaaagaatttataaaatgcccgtttcaactcggtctcagctcacgaatcaagggagcaacgaaagtccagaacagaaggaaggtaatcttccatatagaaaccttcaccatggattgaaagagaaaatgagagccttaacccttttgtacgagcagcaaaagcaggcttccctggctctcaagaaccagtcttccatggcacaagagcagcaacgattcaagacccagtcaagctgtgagcttcagggattttgtaaaaatgaagaagagaaaaaaacaaagtcgaataataaccaagtgatgagggagaactcaatacctaactccaccgttacaagaacttatgtactccctcagccttcaaatgatgacgcgaaggagaatgtggcgatggttggaggtggcggcggtggcagggatcgaattgtgagcttttcagcgtgtccgagaaaggccatggctccaaaaattgtagcgaggaagctctcattggggagtttggcgcctcagatggaatcgaaaggcgtggacttgttaaagaatgttcaagaattggagaagttggagactgttccggtgaaaaccagaatctgtgggagtaggattatggtgtttgtgaggcttagaccaatggggaaaaaggaaaaagaaatgggttctcggtgttgtgtgagaattgtaaacagaagagatgtttttctgactgagttcgccaatgaaaacgactatctgaggctgaagaggcttaggggaagacatttcacatttgactcttcctttccagatactgctactcaacaagaagtctactccactacgtgagtactaaaactatattcttcaactttttttttttttttttggaaattttttatgtttaagatatagattttgccctatgaatttcataagttctgtaacaatggtgaaaataaagaaacaaatgtctccttttcttgttatgtcttgtttgcattttctatttcaccaaacaaaagaacaagattatctgctgctaataaatcccaatagattaattatagataagtacctatgagtgttttatattgtgccaactaaaatttaactcaataatgacctttagtaataataaaattttgatcgaaaaaaggtactccacaatttttcagaactgcagacctcgtggaagcagtcctgcagggaagaaatggctcagttttctgctatggagcaacaggtgctggaaaaacttacaccatgcttggtacggttgagaatccaggagtcatggttttggcaattaaggacctcttcacaaaaataaggcagaggagctgtgatggaaatcatgtagttcatctttcttatctggaggtctataatgaaactgtcagggatttgctctctcctggaaggcctttggtgttgagagaagacaaacaggtctgttttcttattatgccatgaattacattccaatggttgctagagagagatatctgttctgattattgttcttgttgcttttgaagtcaaattttctttcaatgatttagcatagtgtgtgaagaccattgtatttattcattcgtaaggtttggtttgcagggaatcatagcagcaggtcttacacagtacagagcttactcaacagatgaagtaaattcctcactttatctgatataattttcttgttaaaactttcattattagttcttgttgtttttaacaatgatatgcagcaaagcaaactaatttgttaagtggggcagtatgtaattttgtttactttggtttgtgataggtgatggcattactccaacagggaaaccataaccgaaccaccgaaccaactcgtctcaatgaaacttcttcacgttcccatgccatcctgcaggtattttaaaggatggctgtttgagattttaagaaaagacatgtagagtaaacaaaagttttctaacctttatatcatctaggttgtggttgaataccgagtgagagatgaagctatgaatgtggtaaatcgagtggggaagctttcactgattgatcttgccgggtcagagagagcactagccacagatcaaagaacacttagatctcttgagggtgctagcattaacaggtcacttcttgctctgagcagttgcatcaatgcccttgtggagggcaagaagcacattccctatagaaattcaaagctgacgcaacttcttaaggactcactaggaggctcttgcaacactgttatgatagccaacatcagtccaagcaatctctcatttggtgaaacccaaaataccctacactgggctgatcgtgccaaggaaatcaggaccaaggttcctcctcctaacttctgtttcttgatcttatttccttttcctctacatttctgctatgtaactctttgtaagttgtaagaaattcttggacttgttgcaggcctgcgaggaaatgagtgaggaaatacagcaaccaccagaatctgagactgatagggccaagttattgcttgagttacaaaaggagaatcgcgaattgcgattgcaaatggctcgtcagcaacagaagctcataactcttcaagcacagtcgttggctgcaaacttctctccaactccttcttcaggtacctctcttatgactcctccatctacagcccaaccaaatgagaaaaggaggacaaggacctctttcttaggtggtaactgcttcactccagagtcgcggaaaaagggtgctgaagaaacagttagagagcttcaaagaactgtcaaggcattagaaactgagattgagaaaatgaagaaagaccacactttgcagctgaaacaaaaggatcaacttattcgtgagctttcaaggaagagtgacaaaccacaagaagaagtgtcactacagacggcgacaaggatggtgacaagggctagtctacggccaaaggaacgaccgaaggagccaattggaggtgaattgaagagtcctagctatcgcttccgatcaccagttccttcagctaagaaacgaagcttttgggacataaccacagctaacagcccatccattacgacactcaatgcaagaaaaaccagaagccatgttgtttctgaaactggtgatgttccatcaatgcttcttcaggtaattcttaggtttttttttcgcttcattattactatatcctgttgttcttggaatttttcacatcaaaagcatttagctggatacagcagaaaaggtctcaaaatcattgtggccctcaatttgtttcatgttttttatttgatgatatgagttttttctacgttcaacaactgatgcagtttgaatatccatttttctggtttgtgttcttgtttggaccccattttggtgaattccagccaggttttgctcgacaaaagccagagtgtttaaggtaacatcggagagtgtttaacaaagcgagttacagccagagagaagattaaaaatgtggaaagaagggaatgacaagacaaacacaggaggctttaccagaaaagttcattccccacaaaccataaatctctcttggttgaggctttgagctggtcaagttcaagatgaaaggaaagattttgtactttctcaacaatgattgccacatgtttttttttttttcgtgttcttttttatctgtatattttttctttatttttataagaattgcaaaagtattttattgcaatatcttaattgtacttgtagaacatacatgagtttcttcattaatttattttatggaattatatgtgaaccagtttctttctttgttcatgtaaaagtcgtcattgcaaaccttacttaaaatggcttaattgcaaatgcataatgatctttttcaaaatagatgtacaaaagttaccagtctccacttccatcttgactgcaattaaatataatttattaagagtgtgttttgataatatttttttaattattttttttgttattaaaattagaaaagttaatatattttctaaaattatgtttaataaaattatttttactttttaattttttaattaagaatctaaattttaaaaacaaaattgttgacctcgcttttagtcaacgataatgagtcaattaataaacgataagaaatgtaactaagatagagcaaaaaccattaagcaataaagaacacaagattttaaagaggttcggttgcgttagtttggtattaactcgagaacaaagaatacagtgtttcctctctcaaagctctcacaataaaatctctgagtattttctcttagatctctctgaagtaattctttcgaccccttttacagtgaagatggatcactttacatagggctaaatgcatgaaggaaggtttcccttttgcttacgatatctataattggtaagaacatacattacaaatttagaatacataaaaattgaggcattcggacagcttgccatatccttttgatacgatcctaggattgtagggattactcatgtgctttacgatatcaatcttgaagttgctaagtcttgatacattgctcggagaaatgacctcgtttgctgtctggatcatctggccttgccctgctcggtcaagcagactttgtccgtatagatatatggttgagctctattcggaatatctctccagctaaatgtagagaatatcagactatcagacacgtgtcaccagtatatgttgccacgtcatagtgcaaaaaatgggataatatttacccccaaagtctgcatgggacttccaaagtcgc

SEQ ID NO: 15917 - DNA, 5826 bp, Cannabis sativa
ttcttcccttaataatattttaatttctcttagcgtgtaaagttgttttgagtggtttttcagggaaggtagatgggaagagtagggaaaaaaataggtctaagcattcagaaactgagcagcgtaggaggagcaaaattaatgagaggtgacctttatgttttgtttttattattgttgttgttattttgtctttacttattattattttgtttccttagcattatgaaattgagagaaaaataatgagaaaaagatggttgcccaattcatgtatgaatctctttttctttgtaaatgatattaggagctaaattaaaccagaattttagagttttgttttaagaatgctacctttagtacttggaacattaaaaagcattaaagaccgtactttatgatataatggtttgttattatatatgtaataatactctttttatgtaataaactatactaatctctcacatgtaatattatggcgtaaattgattgatgttatggttttgctggctcgaaaattttgacttcttttccatatgatatgtttttaaatgcaggtttcagatacttagagagctcatacctcaaagtgatcagaaaagagacaaggcatcgttcctattggaggtcattgtctgtatgtataaggcttatgtatgataacattttcagtgtcaggattcatgttttctgttctctttgtatgcagcttatcgagtacgttcagtatttacaggagaagataaacatgtatgaggaatcttaccaaggttggaattcggaaccagcaaaattacatccatgggtaatctaatgctcactgcgtttatatttcttaataaagaaaaagttaatatgaatgtgtgttagcatgaaaatatatgaacttttatatatttatagatatttgatagtgcctgtgttatagctgcacaatatagttcgtgggattagatatcttgggtatcatacataaaagcaagtgtaatacatttttgattaaccagatatttgtccgtaaaaagttctgatggaaaacttaataacgatttagatcaaatgtgagctcagaatttctgttcaagtagcatgctgtatgagagaactgatataattttgttgtaatagttgtgattagatggagcgtttgatatgaggtttagacttgatggaaatgagaatataaaaattaaattaaattttaatgatcaaagggtttgtgtttccaagtaggtctcactttttaaattaaaatggtggtaatgttaatcccctccaaagcatgagtttgatattatctccaagtctactcccatcaactcaaactcacatagcaaacaccccattaggtgacgtttggctggaagaaataaaaacacagctagaataagaatgacattccaatactttaaaataaaaccaaacaaatgaatggaataaaagttgtttcacttgcattccattccatttcattacctccaattgaacgccaccagaaagttttcctttgtttaatttgtgattcttttgacttcttatgttgttttgtcttccctctattttcagtattcagattgcattaatttgatgtcattagttaacaaagttgctatttttcatggttttttttttggtctggggcactattctgcatttagatttgttttttcacttgtatatactagtgtgataataatgatgtttggcagctataaaacacatttgaaattcatattgataaaatcgatagttgctctgttagaaccatttggtagacctcacttccttttaagtagcttacgagaagagggcgctcaagtagttatcaaccataaactaatcctgtacttagcctgcaacttgtgggtgctggccttggtatcatttgctgcatgtacttgtgtacaaattaatcccaaaagacttgcttatgagtggatgatgcctgataagctatatactaatttcatactttttctacgtggaatcctaacatgccctttttgctgttgtggaaaaccaaattaagtaacttaaagaagacatactgtgtgctctctctgttttgaagtcataattagaatggttaaggtggtcaaccaattagattgctgggcatattgattaagagtttgtcatattccttttgagtgagacttgttgacatctccctcatttgtttgcaacagagaaatcaacatgcgcctacagaaacttttgttgatctttctcaagctgtgaagaatggttctgatcttccgaataatgttgttatttccccatcattgcttcccagtcaacaaaactcattggagtctgacatgaatgttgctatggcttacaaaacactagatcacctccccggatcagctactctatcagttcctcctaacgtgcagcaaacaaatatgtttgaccctagtgggaggcatggtgttcctatgcaacctatgcaggaatctgtttctgatgacagtgaagtagatcctctgccacaaccattacctgaattgtggcaaggtgggcgtacaactgcaagttcactgttaaacaatgcactgagtatcaaggagggaaagaatggatctcttacaatgtcaaattcttactcccaagggtaagcattggccactagtttcatgattttgtttttaaataaaacttacatttcggcattgttttaatacaatgttgttgctttattaaaattctattttaagtgctgtttcccatgtggtacttggcacaattacttgctgactttattttttgtggaaagtttctgtatgtgctatttctaagtacagttgtgttgttgagcagggtttttgattctttgaaacaagcactgcgatcttcaggggtggatttatcacagaccagaatctcagtgcaaattgatgttgcgaatcaaacagatagtagactaacttcgattgcatccagttcaaaggtttttctcgagtcaattaaatatcagtgtttcattttagcattgcaatactttatattttacatagaaatctagaatgtaaatcgaccacgaaaggtcttagactttattcacatgcagacctttaacgttttttatttgttttcttcttgacatgttgtttgttcaggatcacgcaaacctgtcactgaacagtcaggtaatggcaaacaatcaagtaaccagtacagatgacaagttcgatcgagctcataagaggctcagaataggtgaaaagtagtttattttttcagctgcctaattttcctattttattttttatttctttaatttggggggtggggtgattcgagttgagaggggtattggatgggtatttttttttttgggataattgtacatgtgtatgcggcttgtgctatgctccaatttccatgcgcatggataaccttagaagaaagtttcagaaattcagttgcttgattgtacttcaatttgaatagacaattccatgcacatagtgaagcaactctcacatttgtaagatttattttaggtgtgatttttatcctattatgttagaatctacttggctagttggcttacccttaacacccactgagtacttcattatgtgcgtttgtgaatctgtgcataattttgaatctagtaagatggagtaaggcttatacttaatgtaccatttttgctgaaagaaagatgaccactagccacttatattcttatgagaataaagttcagagacaagaaattttccactgtctttatgggcactcatggtgcctatacttttataaattgtcgtattgttactagtctaatttattattaaattttatttattttattttaataataataatgaaaaatcgctaattatttataagatgtaatctagtgggacgtgacactaattataaatatcttaaaggttgcttcttgacatggttcaatatattatattattgaatgtgatgggctatcaatgatgttataatagcttttttagtaggattatttcataaaaacaacaaaataattataaaaatacagtcttacagaattttaaatatttttaggatttttttgattttatttataaaaaatatgatctttttatgttgtaattttgttaatttgttgttgatattttgttatctgtatgttattttttgttattattttgatgttattttcatatagtttttttgttgattttatgttgtttttgtgttattttttagaaaatcgtaaaaatgtaaaaaaatattctttgagcgtaaaaatataaatattttacaaaaaatagtgccttatgtaattattcttttcttatttgtctccaaacctctccaaggaaaacttttcaaataaagaaatatctttttttgtagttgttgtcgatgaatccttggaacaaacatttcaacttgatgagtgtgttcttcactttgaaatgacgtataagttagtttcagcttaatgaatctaatctaaggtctccaaagtgagttcaaaaatagaaagatgtattctaattggtccacatagcatagtagtagaacattctcttatacttctactttcatcaattcttttatcttctattttattgaagttcttctttcactggtagttagagaggattgttatggaccttgagatgttcaatactatactaatgtgatacgtatttagtggtttttttatattatttattaaattaaaatatgtgtaatttaatgttaaattacaccaatagtaatatactacctcagtacttgacaccttaaagtgttcgctatcatctcttttaattctttttctcccttaccatttctcttaagtgacgtttagttggaggtaataaaatagaatggaatggaaataaaataatttttattccatttatttgtttagttgtattttgaaggatcagaatattattcaatgaaatgtcttttctaccattttggtggaatgactactctatttaaaataataaaaaaaaaaactattccaatgtaatattccaatgtaatatgaatgtaatatgagaaaaaaatatgagaaaaaatttaataattttttttatcaattatttttatgtattttaaatttattacgttcctatttttattttcattctcatttttattcttatgtttttattcctctcaatcaaacatcaccttagtcttaattaaatgttgcgttcaattgaaaataaaatagaaatcaagcgtgttactctttcaagttccttttctatagttgagttcttccaaactctttttctacggataagttattcttatcacttctcctcatttcgagctatctttcatactctatctttttgttttatttaagagatgagcactgaaatttatgtttttcaggaattattaaaggaaaatttgactttttatgcttacaaatacttaatatttttcccctaaacacataacatgtaatatttgtgggatatgacacattttacaatatccctaaaatacctccatttacattatcccctaccccctctcttcatctctctttcttcatacccatcggaccccaatcggggtccctatcggacccgtcagacccaaatttttttttacccagcacatgcatcggacccaagattttttccagcacatgcatcggaccccaatcggggtccccatcggacccgtcagacccataaacataattttttcagcacatgtatcggaccccatcgagtcatcgtcttccccaaactgcgatttttccaaatcgcagatctgaacctaaatcgaaccctaaatctaacaaaactcacggtgcacacataaacacat

SEQ ID NO: 15918 - DNA, 5474 bp, Cannabis sativa
  modified_base (4147)..(4149): a, c, t, g, unknown or other
  modified_base (5408)..(5412): a, c, t, g, unknown or other
tagtaaacaacatgttaaaataattatttttattttgatttcataacattttatttcctttcatttctcccattaatttattccgataacgattacgctttagtgaacgtgccataaaagaagagcggcgaaaatttgaattgacttctataatttgcattcttctaattaaatgtgcaagagcagcaaatacccgccacgtagaattacgaaagtactgggataccccatttccaacgagcggaaacgcggcgtgctgtgttattttgctggggtagtttcgtcaattgactcagtttttccctctcttgcatacggttcgaacacactgacacagtagagagagaaggagagggagatggcttaccagcgaaggctccaggctgcggcgaaattcatcgaaaacgctgacagacgcgccgccgaagagctagtgattcctgaagaacttggcgtgactgccactctgaagcctcaccaagtcgaaggtgtttcatggctcgtacggcgttattttctcggcgtcaacgttgttctcggtgaggactccgatttatctgtcgtttgattatgttgggaaattcgattcagttgttttatttctcttttaaaatgtgcgtatagttctaataaaaaggagattaaactgtgggattgtggatttctgagtttattttttggaatgctgtcgattttgcaggagacgaggtacaacttctctcactctctgaaaatctgaagcggtgattttaatttttttaattaaaatttaggtttaatttttattctgctaaacctctatgcttatgatattcatgaactcgcaactgcatttcatgaatctattttggagcaagcgttgtgtctcagtttgaattttttcattgtctaaatccagtttgaagtttatgaattgattttaatctaataattggcttagtcaagttgagtagttgtagtaatcttgatgtctcagcctttatagtgtatctggtaagagggaggaagatgggttgggtttggggaagatgcatttttgtaggattgatattttgcagtgtggagattagtcattgatttcaaaatagtcaattccagcaagttttcaattcctctaaatcggagagattttaggaaagaattgtcctatcatatattagaatggtcactaactataataacttactcttccacttctccctcctattaaggaagatgaatttggtttccttcattcctctcataccaaactcttgggaaaaaagtactctcctttcttccatgggtaatatctctctcattcctatatctatctttcttcattgtcaccaaacatattgcatgtctgctaatccgtcttggaaagaatcaaccaagtatttattactggattatttagcaatgaacatgttttgtttgtcataatattgtattgtatagatatttgtttactgaagaagctgtagggaaccgagatgaaggatcaaagcattactgtagtctgtagtgccgtaaaagaacaaatgccataaaagatttgtttcgtatgcttatggctttaataaaatgcagatgggactagggaagactttgcaagctatctgtttgatgagctacattaaggttcaacagatgtcacctgggccattttgtaagtttctgaaatcttgaaatttttcattgtccgatatcattttagatttatcatatgcatacttatatttatctgcggttataaaaaatctgcagtgatattatgtcctctaagtgtaacggatggttgggtatcggagatgggtagatttgctccaaaacttaaagtttcacggtatgttggggacaaagatcaccgtcgtaatttacgcagaacaatgtatgagcatgttaaagaacagtcctcgaaagctgatgtgagttttcacctctttcgtaattgtacttaatgaaacatgtcagatagtatcatttagaattattagatgttatcactttagcatctaaaaattgtctgtagtcttatctctgttgtttgctctttatcttccttcactacaaaggccagagagaagtaaggaacttgattttcttctccctcattcacaaagaaaacaaattcagctcttttttcttcaaagtttggattcatctttccaaccaaatgccttaagaatttctcaatcattaatgccccattttacactttacaaaactgttatacatctcaatcattaatgccccacacctttcaggtaaacgtagtaaactaaaattcgttgaacagcttatacgtctgctcattagtcacactacaatgttggaataaaaatatttgattctgttaggaacattggacatccatataaaataaaaaggctcaaaaggagtaagatttgcaagaaaaatatccagaagccaaaccattttatatggattggattcaacaaaagaaaattttctaagatacccggcaaatacattaactcatgtatttctttattgttagtattaaatttaaaattgaagttccaattgcaaaagttgtacaaattcaacaggggtttataattagtctatgaatgtaatcatagcatttcttaaagttttgctttatatatttatactatttaaaaatgggtgtcttcctagccttttatagataaactcttcttcattaatccaattttgaggttttgtttgaaaataaaaataaagtccaagtgtaatcttgaaaaaaatgaagcaaagattagtggagacccacttgtatcctttcagaaatgagcagatattctcatcccagtagtccatatagtaagaaataacttaactttgtgaagtagactatctgcctacaaatatagttagagatccaaccttttagtgtatttctgatttttgaaatgcatcttttatatttttgaatttatattcattcacaatgtattatttaacgatatgtgcatttgaacattatacacagagatgtggtactgccttcttaaaatagtttcttccaattactcaatttgtacattcaaattattaatatttttgagtggagatcacaacgtatttaattgtatgattgagattaccacattttaattttagtgtgcaaattgagagtgtatctgtcgttactcttaaataaatgtaattgattgaaaaaacttgtattatatcgagtatcattactcatattagtttcctcattaatgcaagtgatgtttctttgttttgtaaaaaaaaaaaaaactcagtgaattatactttccttttctttgttttacaaaaaagaaaaaaaaatactttatgaaatatactttcctttgacgtctaaaaaaacctagtgaaaacactttggaataccctccattttggtcacttacttctaatgaccttccattttgctaagtgttactctaatctttccattgactgcttttcattttgcatcttgatcacaggttttgttggttccttttgacgtgttgttaacaacatatgagatagcattgatggatcaggattttctttctcaaataccatggcattacgcagtaattgatgaagctcaaaggcttaaaaacccttctagtgtaagtttaacttttcatgatcccactttcttaccctcaagaacttgaacaagtactgggacatgtcttcatgctcattgttgaaaaatcagcttttttaattattattattattattattatacagtatagctgtataataattttgtttttattgtaccattttttaaggaattagtttagagagttattgtatctttattatttgatttgtttctctttatagaattattgtacatgttatatacactgctgtgtattagaaatataataacacaaaaacattaccctaaatctgtcgactgggtataagtctgatctgttccctatgcaagttgtgcggtttttgaccactttttcaaatcaacccgcatatgcggttttttcaattttccaaaccacacctgcaccgcgaaattaaaaaatcgtagaaaccgtatcgcaaaaaatggtgtggtgcggtgcggtttctacagtttgtactatcaccaaataattaaactatcacaaatacaacaaatcttgagcaacacttgtcaaaaataccnnnaggcttgaaaataaatataaaaaaggtttcaagtttcaacaatataataattagtgggctttgggttgggtcttcacatattagacctaatataaatataaaaattagtatttttattttttattacgcagtgctgtgcggtttgaactgcatattaataattcaaaactgcaaatcgcatcgcactgcgctgtttaggaaaaattcaaaccgcgaccacattataaagaatttcaaactgcattttttttttgcggtgcgacgcgggcggtttgagcggtttgatgaacaaccctagtatcagagccaaaaaaagaaaaaaaaatcgtactctaccctaatcgcaccctaaccctaatcacctctgtcctatttgcaccatgttagattttgagtcgggtataaccaaaaacaaccccatccaaaccaattccaccgttctttctaccaaatctactgagtctcactctgtccagatcactaccattcgcttgaatggagaaaacttttttgagatggtatcaatcagtgaagatgtatatgaaaggtcgaggaaaaatgggatatttgactggtgaaaagaaggctccagtagaaactggttcaacttatgaaacttgggatgttgaaaattatatggtggtggcttggcttgttaactttatggaagaagagattagctccaattatatgtgctatcccacagcaaaggagctatgggataacgtaattgaaatgtattttgaccttgaaaatcaatctcagattttcaggttaattatgaaacttagagaaataaagcaaggggaggacaacggcttactttacttctttgaaaagaatctggcaagacttagatcttttagatacttatgagtggaaatatgcagtagatggcaaacaccatggcaaaccagcaaactggaaaagtaaggcagagagagaaaaggtaggtcgaatcccttctgcacatgaagctgactccagccccttcattaaggagcagttggatcaccttcatgcattgctgaacactacctcgacctcatccagtattcctactgcttctattgcatatgcaggtaacaaagtatcagaaataaatgctctaaattgttattaaaaatcatccactacatggataatagattctggagctttagatcgtatgacaaatctttctaaattttttgaatcatatatatcttgttcaggagatcaaaaagttgaaatagctgatggtaatttctcatccattnnnnnaaaaggtttaattaagatttctaaggggatagatcttaaatctgtcctccatgttcctaaac

SEQ ID NO: 15919 - DNA, 2956 bp, Cannabis sativa
taattaggggtggtaatttgtgttgtcgtgtcgtgttgagattttaaatttactaaaaatttactgacacaaacataacccgtgatacaaaataatttataaaatacggacacgagtagaacttacaaaatctcatatcatgttcgtattaaaccttaaattactactcattgattattattttctaaaaaaataaaatcatttttatattttgtctttttgaggtaataataaaaatgtcaataacacaatatgtcaaaaaaaaaaaaaaatctaaataacaaatgagaaaattagatggtaatagtataccctttttaatttaactcaactcatttttaacttactttttaaattccatcgttaataccctcttttttaatcattatacccattatactcctatttcatacctctttctaatttttatttctctaaaacaaaattattcagatgaaaaacatatattatacaatatatattgatattaaagacgtttattttaagtccacaaaaataataataatcaagaaaagaaaatcaaaagaaatatatgacaacacgttaatatttttcttatattttttttttatttccaccatttattataaagacgattcattaaatttaatatatttagttaaataaaagtatatttggtaataaacttataaaatgagtagattttaattaattttaatatgtgactatttttttgattaatttataaaaaaaaagactggatttatcccataacaaatactcacaagatcattataaagacaataaatatatacatatttattcttgcacattaaataagagtaagttaaaaaatcaaactctttctttgtttacatgtacaaacaacatacataaaaactaacccaaacacattatgagataatcaaaacttaaaaaaaataatctctcctataaaaacatgaagtttcaagtaggaaaaatataaaaggtactactaaacttaacaaacccatcaaacaaaaacaaaaaaagaactaactatgatcatctttattgaacaagttagaaaaattagacttccatttactcttactatgtctaggtgtgagtggtccagaagaagaagaagaagcaaccattctcattctctcaatcaaagcctcagtgttaccttgttcagacaaaatctcttccaattgtttagtgtcaatcatcaatttcaccttccaaaccccatttccgcccgagggcaacacttgcatcatacccgagttaccactcgccaaattatcaacaaactcagccgacgctgaatgagacaatgacattttcttcttatttgtcttatcagcatcagcgtcagcagcagctatgtattcagctttcatagtattattactctttaacggaagaaggtagtagaatttcccttctactaaattctcgttttcggacaagggtgatgatccatgaccttgtttgaaaataccatatccggggtgagaattaagaacttcataagctaatttaggagatttaaactcaagaatagagcctgaatctttgaggacccttatagaggaagagttcttcttaggactatttttatcacatgaaacattggtagaagtacatgattttggagaacaattccccatttgaaaaaaaacaaacaaacaaaaataaaaatagaagtagtacactactctacactacacttattgtgtttatatatataaattgaattaaattgtgagaatcttattacatgcaatagtgggaaaataatggggttgtgtcagaaatgacaaattagtgaataattttttttattttattttttgggtagaaaacatttaatagggcagcatgtgaaatttgaccgttggtggtgtaataataatttaatataaataatgaagaaaaagtacagaaaaattcaccattttaaaagaatagtatttttatcaataattttgatatgtacaaggccaaagaacaggaaataaggtaaattttaaggttaaaataatagggaaaaacgacagttaagattaggaaggtgactaaattcaaatttctattgttttaggcggtttggatttatgtgttttcatattgtttttatttttgtcctaattaaaaataggcatctccttaattaaataattaatttaattagtatattttgtattctttataagttttttaattaatccgtgattattaagtttatctctatttatgatatgttcaaacctaaatttcggttaattgtacttgaaggagtattttataagtggcgtttacgattggttataactatattttttaaaaactattttcatataagattcgatacttaattacagtaatagtgatatgacaccgaaaatagtgctagacactaataataccttttaacaattctctacttaaaaatataaagaaccaatatacgttatgcaacactagttaaagtggaaaaaagacactagtcattgccatattgataaaataaatttcatttttataagaaagatagcgaaaagatgacttatgtgtatcaacatttcatatttacagttattaatgtaaaaaatattttagaattgtatattctaggacaagataggaaaatgctctgtgttacattcatacacggaactagtcaagattaggggtgacaaaatgtgtcatcatgctgtgtttgtgctatattttatatgactcgcttctatttttcgtgtcagacgtgtcgacatgttttttaactcgtgtttaattttctcaaccctagcccgaccagtaaaaaattgtgtcgtgttcgtgtcgacccactgtgacctattttgttattatttaagctagagttgtagagaaaaatgatagatttaagttccattagaaaacgtatatacatttatgtatatatagtttattatatatgataaaaattaaaaattttaaa

SEQ ID NO: 15920 - DNA, 5785 bp, Cannabis sativa
atttatatacctcgttgccaaagtaggagtcgggaccgtaggcgaatttgatgccggggtatgaacaggtgagctttcttccacaaggaatccatgaaatggtggatccttcatcaaacaagtaaacagggctgaagtacttgaccccttctttcatgatcaacttaactctcaacacctttccttcattgtcatccggaatgagttgagttggcaacacttcaatcacagcatctgcgtattgcttttgtggatctgaaccaacccaaaaaataaaatggatgtatgataaggcatttcccatttgacacagaaacaaattaaaattgtcatttgaatgaaaggaaaacagaacttaaaccatttgaagttaattatcttaaagagatcattaccaatataagcatcgaaatcgggcttccgagcttcgatactggctttgatgctttcaagactgtggccacgctctgccatgtccctctgtaaattatgggtatgatgatgatcagatacaattatggtaactgtatctacatatataatccgtgtgtatagattgtagagctacctgaattttccatgcaaacttaacctcattgctgatgtccaagtagatactgaagtccaggaggtctctcactcgagaatcatacctacaaattgagaaatatcagagcacaaaacaatacacatatacataataacaatttctaatacatcatcacataaattcaatgaaggtaatgatttatttctccattttttatacataaacctcttgtattaatttggtaccagatataaaactataattaaattaaataataaattaataagataaggaccaggcccagtaataatgtgacaacgacctgtggaaatcttctggcctcagcaatgcaatctatatattgcttaggttatcatatccacaattcatgaattttcctaccaccaatccaattcataatccttaaacatccattccaactatataaaatccgtgttttcgattttttacaggtaaattcaatcgtcccgtttagttttcgacttagtttgatatatatttaattaagctaatgacatttctgaaataaaatcattagaaattaatacagttaactaaacaacaaattcggttcacggtatcttctctcttctcaaaataataataaataactccaatattagagaacaggtgtaggtgggaaaaataacagatattaggacactaagagattgcacgaaacagatgttagaaaagaaagagtaagaatttcatgcatggagacatgtaatatatttatgaaataaaataaagccattaatttttttacttttttttttttttctgttatcaataattgaaaaaagaaaaagacaaaataactcacattgggtgaagaccttcaatgacaagaatcttgggaggtttgatgagctcaggggggtcaagaagaccagaaacatggttgtaaataggcttttcaacaggtgtgccttctttgagagccttaacttgttcatacatgagatcaaagtcgttagcttttgggtcaagagcagtgactcccttctcttttctaccagttctatccaaagagtgatagtcatcgagacatatcacagttgtggtgtcactgatcagagtgtttgagtccggatttcctcccttaggtggctctgccgcgcctccaaacacgcttgtcaaccgcctcatgaaggtgctcttgccacaaccagagtcagcagctagaccaatcaccagtgtctgtgagtcaccagctgagcatgttatcacataggggctgcagctgctggtactaatggaagaagaagaagaattgcctcctctcctgttggttctcttgcctgtgctgtagagcactacttgtctttggtgaaatcccaagtgggattttgatggtgtggagattgatgaacatgttgggttgagctgagttgtgtagactgtgcacactgccattttttttttgggggggaggagggtgggttgtattcttcctctccttagaaatggagtagtgtttagagaggaagatatggttataaatgtatgtttctttctagttcatatgatgattttaagacaacatatatgagttgttttcctttttccaaatgaaaaataaaaagtttgggaacacaaataaaaggctaagaaggttaatgaatgtagtttttggaagggaaagaaaattgttggctagtgatgtcattgggtgaggggagtgatgtgtccctttacttttataattttatgtgttttctgtgactaccccttgttttggataatttggaggtatgttaaggtgagataaaattggacttggatgggataaagcaagttagccatgggtttaatagtcaattgatccttatatttatatttattataatggatatttttgtttaataattgctaaaaagagatgagaattggtttgatgaggattgaaatggtgtatatgtgataaacaaaggcatggagagaagcttggtggttatttgtttcagtttggatatttgggatgccacatggcataaaaggagtggctggtttaagattaggggtggaaggtgaggaatggaagagagatggggatggagtctatgccatacaattcgattttgaactgtgcttgtcttgagctactagtactactagcatttgtgagagtgttgtatatagaagaaattcagtgttatttatttagtagtattatccaggaccacagatacagaacatactaaaactacaaagaaaaagagaagctatactttagagaaagaagtgagaaagttgaccaccaattctatgtctgaataaaatattaatttcttccctaaaaaaatacatgagtaattctaatttgggtctttgtttgtaacaaaaaaagttgtgtacagaatactaaaaataataattgaaaaaaaaaggtaaattgcattttaatatgtgcacttagattacgagaataagaatacctcccctggtatttttgaaacaatggtgaattattctacaatttagataattgggtggattcatacatgtgcctcacgttcgaccattagttacatttatgcaatttttaacactaattttcagaatgcaatctgatagtttaaatctgtatgtgtgcacgtttaaaaagaaaagtgttaggaaaacactatgtaactgaaattattataatttggagtaattattatacatctagcatgtttgtttaactatataattagtgattgtatatatatggtgcacatatacaccatcaaaaactcaagatgactgaaaaatacacaaaaacttaatcaacaatgtcagtaataaaaagatacacaaacttaataacgatgttttatcacaaatattgaataaaacttagatctaatatccttgggtagaagcagctctaatagctgtgatctttattgataattggcactaacaaaatcaattacaaacttggatcaagtacacaataacacacacctaaatggtgactcgcaccattacaattcatcttacttgaaagcttgtaatcagatacatacaagtcttttttacaaccctcaaactcactcttagttatagttggattcttctaatctcaagtgtgttgtctaaaccttgatccctcaaatgagtcctaagactctccttttataatattcgggcagcaagttaagtccccgactgaattaactaccttgacagttggtagttgggagaacttgttaaatttgactaagtgagctaaacatcacaatttccatctagtttagtttacttagtcaaaatagttaatgccaataacataataccaatagatgacaacttctgaattccactgaattagtctcagaggagactttaacatgctctaatgttgagcaagtttagacaatgtctaaacttttctctgattacactcattgtgaaaacatcagcagggtcgccatttgtgttaatcttcttaagactaacttgcttggattggatcacatctctgataaagtgcatcttaatatctatgtgtttcgatctctcatgaaacatgagattcttcataagatgtaatgcactttggttatcacagtgagctgtgatatcatctgagttgagattaagctctttggtcaatcctttcagccatattgtttgtttaatggcttttgttgcagccatatactctgtcctccatactctatggaggacagtgagacaatcttatttaatttggattttcaactcacacaatccccaatgaatagtgaagacatatcctgttagtgatttccttgtatctagactctcaacaaaatctgaatcaacataacatgtcacctcctctttaaagttgctatcaccattaaatgttaatccattgtctagagtaccctttagatacctcatgacccactttagagtcgtctagtgttcacttcctgaattagcaacaaattttctcacccatactcacggcatgagctaaaatttccttttacataccactgagtacatcaagctacaaaaacaacttgcatagggcactttaaacggttggaaattattttaccaggatttagatttactaacatgtatgtttgattataattttataatctaacatccaaaacatgaattccctaaaataatgaaataaatagataaaagttatagaaaactttacattgatgacaacgaagtaagtgtatcagatctctaaccgttgatcatttctattacaaagtatgatcaaaatctgaacttggattctccttcagttgacaaaagactacactatcttgagtattgcctcgaattgtgtgggaaattactcattcacttagggtttgaaaataacaagaggaagaaaaagagaattcgaatatgatgagagttctgtatattttctatttttctgacaaagagagtcacatagggttatgaaaataagagccatcatattctagtaatatgatagcttttagggttagattttgaattaaaatggaatagaaaaagattaaaaaaatggctttattaaatcatcttggccaaacgctatattctagcttatatgatagcttttaggattagatttcaattttgccattttattgaaacttatctttcttttcacaaatgtcatcttttaattctaactctataaataccaattctatctatttaataattataactaattatcaaataaaattatcgtttaacttatttattaattagacctttcaaagtctcttaattaataaacaaaccttaaaattattttttcttctaaaagaagcccttgcttagtgaaactcataaataagatataaccttattcagaattctaatagattaattataatcaattaattaagtctacaagataaaattatctcaagtagtatggggaccatgggcctatataatcaagctcttaataagtagttctagaatttaccgagtaaattctctatcttattaattcctcttgactccactatagatttagaattgcactcctgattacatagaacgctctattcaccaagaatggatacactataaattatccattatttaaatctaaataatcaaagatcctctatagatgatttacatggagtagggaaaaatttatcgttttaccctctaatgtattttatcctaaaaacacttacctacttataaattatatttcaataaactaatgtaattactgaaataagagctcttcca

SEQ ID NO: 15921 - DNA, 1991 bp, Cannabis sativa
  modified_base (1908)..(1911): a, c, t, g, unknown or other
tttattatatttggtcatttcttagtttttttaaaaaaaataagacatttactaatttaattttcaaatttaggactattttccatctcaatcctataattatatggttagacaaacattacaaattatataattacttccaattgtacccaaatctaattacactagaacttttcaaacgtaccttaaatcaatgtttcattcataatctatcacatatgtatggattagttaacaaaatagttcactttgattgttttcggttcttttaaaggagataatactattttagttcatgtaatttcgctaaatattattttcaattctttatcctaaaatgtacttaaaaggagccttcaatatattattaaagtagcgaaaaaaagttttctaattataattttagttaattataatttttaaaagaattaagcattctgcaaatatagttgcccatgcttttgcatgtggctctttttttttttttttacttggagtgatgttccgactatgttgtcatctttattagtacgtgactgcttgatttaatgatgttgcactctagtattaaaagaattaattacccgtttttatttattttctcaatttttaatttatttatttaattttgtttttaaaattattagctaattaataaaaaaattcagtatgacatattatagatgatagtctaccaattttgataaacccaaactaagtgtttcagtaagttttttggattgggttgatttcatgttcctaaggtctttttcttctctttgtttttgtaatgactgcgttattatcttgatttctgcccacttgatgtgtcatgtctacgtggccgatatcagcgccacatggcagtatagttcaccaacaagaaagtcaagtcatctacttagcacttcaactaacgaggagtcccgacactcaaacaggatgacaaatgacggaccagccacctcaaggaggctggtcggccacccctagtcgaccttatggccagcatagacaagctagcttctggacaacactaggtcggccagcctgcatcctgtagatgcatggcctgccaaacattagcttggcaggactttgatgtatagcttcatgcgtggtcagcaagctagattgtgaattgggcctcaatagtccataaaaatagaggaaaaatatctattttaaggggcattttagtcatttgtattttactaatttaatatgtaaatatctacttatttcacttgacaaaagggtttaaatcctatataaagggccttaactaaaccctaaaatcctaagtcataagctgaattctaagtctaaactctctctctctctctctcacacacacacacacccaccattatttcttctctctctctcttactcttaacttgacttgagtttccatctcatctttgattcctacattgtaaccttaagagaactatctcagatcccacccatagtgatctgaatagtattatctctcggtatcaatataactgaaaggagaataggtcattactcgctaactaagggggtcgaccctctataaaatcctgtgttcttttactttcttgttcttattgtgtaacatgtggcaagcatcaacataaatacgactccgttgtcggttagctaaatctgaggtcaacaatttggtgccttcattgagagtgagttgatatcatgtctgatcaaacgtcatggttaacatgaggagaactttcactacaccatctgcatcatcaggtcttcctcaagatccttttgactgtagatcctgttgttcatgttccagccacgattggaatttttatgaacattacaaatgtgatcaatcctgccataaataatactactaatgatctgatgaagtcaatatcaatggttgatctnnnntctatggatcttaatcttgatatgcttaggttcagcttagttgtattatttatgtctttagagttgttcgtggaagctaa

SEQ ID NO: 15922 - DNA, 9875 bp, Cannabis sativa
gtatttctctccagccaaatagcccaaagtgttgctaggacagccgtcctccaaagtatatcctgacgtttacttccttttagcttaatcactaacatttgtggaacaattctaggtagagcccaaatcaatccgaactcctccaacaacattgaccataatttggaggagaatttacaatgcagaaacagatgttccacttcttctccactactcttacagcatacacaccacccgggagaaatgagtataaaaggtcgatagacgacaaatctttatacaaaatgaaaggttaacaaaagcacaccagactctctatcacattcccatctatctctctggcttaacatgaagtttcttaattttctcatccaacctgaggtatcattttgatggattgatgcattaatgttctcttatttataggagaaaaaaaacctctattccactgttctgctatttttttttaaagatgcgttcatatataaaacaaaaggttagaccataagatctctacaaagaatgtgatctaagagcgaactccactcaacaaaaccaaatacatcaaggactaatgcccattgagccgtaaatgggcagtggtatgtataattgtatataatatatatttaattcatttttaataaaaattatttacctaattactctatcactaatcaaagttttaattcttcacgcacatcaaaatgtcatataaattttgattcgttattatagtatatattgttgtacttgttgaatatcattgtatttctacaagttatctcatatcttttatttttaggcaaaatacttgcgatatcaatgtctcttattcatatttttataaaattttagtgtcgatattttccatcaacacccatattttcatccttcataataatttgtcttttgtcataaattacttatcatagaaaaaccataatatatatacatacatataaagttgtaatgactattgtgagtactagcgaataaatacaaaagaaaagccaaaatctagaacgacaagagtggacccaaaacaaaagaatagataaaacttttgcccccaaactattaccactatattatcgtgtccaccaaataatttacattgttaaaatttcctcctgaattattctcgttactaagttgtgggcgtagctcatcttctattacattctatcctatgtggctaacaaaaagttgatttagcacattaggcactgacgtgacaatgtcacatcatccattgtgagtgtcacacctataatttaaataaaaaattaatttagaaatcaaaaaaatattttttaaaaaaagagaaagaggtcacttgtcttactctctccccctgatatattattaagaacctcactatggcggaggaaaaccgtagtaactacaatgtgtcacaaaaaccataaaaacacgcagtatagaacagaacgaaaaaaacaaccgaataaaatctaatacatcaatgaattccattctcaacataagaaaagagagttcctcaaagtgtttagtcctataagcccagtctaagtccaaagtgatttttcccataaaatctctactgagttgtccttgcctttgaaagttctcttgttcctttccagccaaactgcgcacagtaacgccaatataaaagtcctccataatttaattcttctcttcccaccaaccagcttgtgtgttaggacttgcgctacaaaatggggcaaaacccaagacacctcgaattctttgtagagataagaccataatttaagaacaaatgggcattctagaaacaaatgttcaatattttcactgctggacttgcaacacacacaccagttaggggacatagctaagtaaggtctcctttttttttgcatgttctcattcacattcactttccttaaggccatcaccacctgaatacctttacttttgcagggagtgaactcttccaaagcattttggaccaatctaagctactagtgctttgagttgaagtaaaatgatgaaaagctaatcgacaagaaaaaaaacccctaaaatctagtttccatactatgctatcatctactatttccactagatttgtgtgctccaaaagaagtagcattgagaaaggctaggaatctctctatctaacagattcctccagaaatcaaagtttcagtaaaccaccctatatcctccctcctcaactactgccatgttactgatacagaaattcttatctttagtgagcagcactaagtccggaaacaagctcaacaaggaagaatcgcctcgccatacatcttcctaaaagcgtatcctgtcacccctccctaccttgaatgatacaagcttcaagtattcttcatacaaatctgcaatgcctttccaaggccctctagaggacaaacgctccccttttttagaatcccaaaaattttcaaccttgccatagcgacttttgatcactctatgccacaaagctccaggttctagtggcaatctccataactactacaggagtagccctttacttctactttccaagctaccaatccccaatcccccttcaagtcttggtttacacacctctttccaggcaaccaagtgatcattccattcaaacaatcctgaaggtaagaccaatccttagcttctacctctaataatataatcagcgatcttatcttattatccttcaatactaatagcttcaagaaagctcctctcgtattaatgaaacattccataaaacaactcccgctactaatcatgaaggatcttttgaaagcaaccctttgctacccatctaccgatcttatcttattgttcttcaatactaatagcttaaggaaagctcctccagtattaatgaagcattccataaaacaactctcgctactaatcctgaaggatcttttgaaagcaacccgtcgctgcccatctttctttttcaagtcttccaaattttgagtcatccatacataccactgcatcgatttttaccactatctcgtaaccgaatagtcttgttctttcacatattcttactgagccaccatcctttaacagaataatcataaacgccttgtgtttggtatgaaagctccaatatttctggagtctctgatcacattcggatcagaaaaaatttcccagcaagtactagtggggtagaggccttttttcttcccaataccagtggggttttggtgtttccacagccaggagggccatggagcccccacgtatgcatgaaaacaattctcaaaaggagagagaagagagcataattaggaggagagagaagaagaggatgagggggataacgaaaaaaaaaattaaaagattaaaaaaataataaataggatttgtccccctgaaatatgacccttgtagggttttgcccctaagctttttactgttgcaaaaattctccctcaagtttaaaaatcattgcaaatatctccctctagttatattccactcatttacttaaacaatttgttgatgtagcactaacaatttgcttatggttgtctagtttgtacacagaatcaaaggatgtggttccctttgaatttcttatggtttagaaaacaaaaattagatttgatccttttaatttgttctctcaaaaaccataaatcttttgtgctacggatttgtatagtagtgcatgggtttatatggttgtgttgtttatagtagtcttacgttgactgtgcagtcttaacactgttttatttgatataatatgatatcttgaatttatgtttttaacatgacaattcacctcttcttattggatacgggccttgcttaagatcaaaattagcaaaactttcacaaaaatgttgccatatctaactttttaaagatgaaatcaataaaaatttattccaagtgttactttgtgaatttttctatcaaccgctgacagcaaacaagggctgccttggcaggcttcatagccaagtgcatcgggatcacggaagactgtccaagtcccagagtgttctcttcttggtctatgtatcgcaagtctaggcgacaaagatctggcgatgttgaataggacgagcttacagaagagatgttggggtggtcgagcttgcaaaaggttggacatagacaaggatcgtggttggggctcaagaagacgactggagttgttgaattgttgattctaaggtattcatcttggttagtatataagcatgttactgtatatatagattaaaaaaaaaaaaaattgggttgggtttgtgattttccctacagattatatgagtttgtttgatattgggcataaaattagttttgtgtttatttccccatggattatataagtttctataattttagttgattaaaagtttaatgtatttttgtgatttgataagtctttagttgtttagagaatttttttttgctgagatattggtgatcgataacattattcacgcttcaactggatttaagtaattgagactgatgttatggtaagacaatgtgagagtgaagaacaaattcgaataaggttacatttaatttaattttaaaattaattaaataaaattattctctgctacatttttaattaattttaaatatatttttaatttaaaaaagatttaaattatttttatattgtttaaattatgtctttcaatactagttattttgtttacttttaaaattttagaatttttatttatctatttcaattatttaaaatggatttttttttatgtttttcatttgaagtataaacgtggcacttatgtgacaaaacaataatccaatagctacaagccaaaaagtatccattagctactacacgtggcactactcaataacaaaatagtttgaaagtaattataaccgaaggaaacttcaaggcgcacaatacagtaggcaaaagtcctatttattcaaaacaaaatggcggaagggaaaaaggagaataacatctgaacctattcccgtttaggttactctagtcgaaatgacattaatgataattaaaaatgtgttggcaaccctacattggttagacaaatagcagaacagaggaaacctggtgtaaataagggaatcaaggttccaccccaataaataaagagaacatcaaaatgccagagataagaaaactatgttacacaaaattttaacattgaaagcaatcttttcatatgggcatataagtaataacttgctttatgtaccttatcattatttgctttttcactgtcatcgtcatcttcaaaaaaagataagccagcttcagaattatgctttctgatactcaaataagcttctatcccaaccataactctttcaagctcctcaggaacttgctgcaaattaatattacatcacatcaaccagtaaaaggaaaagaagaaaatagatgctatcatatgtacccaaaaaaagaagcagaaaaagtaaaaacaacaagataagaaaaaccttcaacgccaaaaaaaaaaggataagaaagataagatatgttacaaacaaactttaacatcaacaagaattttagttatctttagtttttaatgtttaacgacgggaaaagagtgaaatagaagaaacacaatgttaaagaacctaaagacacagttgtcatttctaaagagttgaaagacactaatgtgacaagacaacagtgtctgttaatgaaaagacaaaacatcttgttgttggcttgcgatataaataaatcattgagtacgcaagtatgtaactaaaaagaaagagtaagaacaaaagtgagtgcagaatatgaatgtttagattgatgaccagtccctacagattatttatatagcaaagcaaaaaatgccaataaactacaaactgtcacccatacaaagaaagtaattatatctatcaccataattatattacctcaacaagttctgctcctccccatgggagacaagataagatacatgcaatataaaagtcagctcgagcctgccaggatggattccccttctcttcatcaattgttgtagcagctgatgataataatgtttcaaaagtaacagccagagagctgggctggagaactttgctgcacatctacaaaagagagagcaataaagataagaaagatcacaatagaaaatattttaaacacacatcaaaataccaaaaataagcagtaatataaaccagaataagtaaataggataaaaattattattcatattaaaaggatttaaaaataattttgatcacttaacaaaaaagaccaggagcgcatttggataattaaagtatttggatggttagcatctttgggaaaggtgaattcttatgatagaatgcaaaaaagaagaccttattaggtgctctacccaggttggtgtgtttgctgcaaagcttgtggagagtccattgatcacttacacctaaagtgcaattctctcagactttatgggtcaggctactaaggaagtttgggattttttgggtaatgccttgtaaagtttctcaaataattgagagtaagttaatagggattaagagaatggcaactctttggagattagctgtgatggccattatgtgggcagtttggagtgagagaaatttaagaatatttgaagacaaagaaaactcagaagaagaagtatgggaaaaaatcaagttctggaaagcaacatggatctacaagtcaaagcattttgaggatctatctttctcggatttgtgtagagagtggggaatcattctgtttaaaaggatttattttgtataattagtagtacttatgactataagctaataactcttcgttactacagttttcctccgccataagcaaagaaactaaataatatttgggaggagatcaatctaagacaagtgacctctatctctttttcaaaaaaaatgaccaggagacaaacatgagtagctttttggaagtaaaactaatggtttcccttcaaaatataaaaatccacaagacaaaaagtaaaattgtcccatattacataaacacagtttttgtgaaccaatcggaactattgtgattcatccaactaatcctcatatgaactgcagtagccgtgcaaatgttactaacataagattcaagggaattattaaaagtaatagttattgtacttcttggtcatggtacaatgaactaaatttgaagtccacaaccatccgcataagtttggattaattgcaacttttcttgtacattaagagttaatttatcaaaaaagagaattgccacaaaccaattattattataattaaataagttatgaacaagtgcaatgtacataccataacagtcaagaacctcattaggattcgaattcggttgcaattaccagagtataatgcatcctgaagattaatacatgattaagtaaacacaagtgtaatcaatagttaaaaattgttaactatgagtacatacaaaaagactaaatatttaaagtagttctccccacatccaataaaagcattgactatggtactatttacttgtacatgacatgatacagggcaatcaaagtatatcggatgtcaagcaatcaaagagcacacatcgaatgatgtcctttcattaagtccaaccaattgtttcataaacatgtttaacaatttaaataaatactatgcatacttacagcctggctgaaaaacatgcttacctggaagttgatttgagtactctcaactaatttcctaccaaagtcttcattatccaagttcatcaagccaacctacagaaggagataaagaaaaaccattagatcttagcaagtatcactcaaggaaccaagatgaacatatccatgactcatccactcattgaaaaattaaacaattaaaaagtcacacacatacaccctgttcaaaatattcacgcgatttgttcttcctcgtacttcaattttaacaagtttcttgagtgtgcatgacacttttcctatcattttcgcttttctttgatttcaattagtctactcctattcaaggactaattggtgataatgatatcacttctcttttattacaattaatctactcctattctagctattaatgaatatttatttgtactagtttatggaactaatatacattcaaacttacgaattcttgtcataaatttaattgaatcatgaatcaatttcgcttattattccttgtcctggattgacatacacataaaagttcaatgtacatacccttacactatctgatcatatattttaaccagttccgtgttatacacaaataaaaatactcacttgtacaatactgactccatttggaaaagcttttgcttatgcttacagaatcttatttgataagctaggcatctagcttccataaaatgtcttaaaattaaaaaaaatgtcttcatattatttatatgaaaaaataagctgtccatttacatttaaaaataatagtataggatgatataacaatatataagagggaaacaacacttattcaatagattcaactgtaatgccctaccagcgttccatataaaggaatcttgtgcggcagctgttcggcgcactggataagaaactgccagataaacaaattcagtaacatgcgaatacacccttcctcggcccagaatatgttatacataattaaaaaaaatgcctaaccattgaaacaaaagtatattgaaaagagagagagagagagagagagagagagaaatacggccaaaatatcattggaataatgctccaactcacgccgaagcaccccagagcaagtttcctgcaaattcaaattcaaatattatagtaattattcaacatgtacaggtttgtgaagggtagtagtgaaacaaattagggttttcaaacgaatatgaagacaattaggagtatatacataaatgtattgaaacatcaactaagttgagagagtgagataaaatggcacagacaatatgatctttgaagtcggaggaagtgccgtactccggggacttgtcgccaattcgaaggagaaaactcttccaagtggtcatgatgagtgaatgaaatgaagtgaagtgagtatttggaaagggtttatttaaatattttcaggtcggagccagctaacaacctttttgtagtacatagaataaccctaacttatgtctgcccgtacttataaggctgtcttggttttttttttttttttttgaagttacacaaaatattgaatttttttaggtttttttttttttaaccatctaaaaataacctaaaatgaattattgtacgggaatggctcctgtgttgagtctagtctctctgtagactttgtgggggttcctttgtgaccgagtttttgtttttcctctcttggtgttccttatctcttttttctctcttggttttcgatgcggttgggtttttctcaggaagttctcgtctctgtggggtatctccccgtttgtctgtgagtgtctataaccatggttattatgaaggaagttgggactgaggaggcgactattcaggttgtctctactgacagcgatgcgggaagactactcgaacgtgatagcaacatggaagttgagatgatgaagctattcgaagacctttctcttgaggatattgtgtcgaataaagcttgtgtagggaaagttgtgggatgcaaaaatatggatgcctctcttgtaaagaagatcttcctgggcatttggaaccttgagaaaggatggaagatgaaaaagtttgagaagggtgtattgggtttcttttttgactcggaggatgactgtacaatggcgatgaatagaagaccttggctggtgaacggagagttgggttttttgccctaaataaaaatcatttcaa

SEQ ID NO: 15923 - DNA, 7351 bp, Cannabis sativa
gacaaatcttaattagccaaaggaaaaataatttgatggtgatcacagtatgaacaaacattgatttaataagaaaaaataatagaaactatactgcatatttagtagatagggtcagccctaaatataggcaggctacgtcgaggaaattagctggtatacctactttactttatgtgttttcatttttacctctattttcatattttgtaagatataccaatttttaaagatgatatcatcattaaattccttaggttaatgaaaatatatgctagacttaagtagagagtgaaggtatattgaacaactcactcaaaaaaatagatatattttaaaaaaaatataatatgagggtatttttaattaatgaaaataaaatgtatttttcaacttatcctggttaagtttgcgcctagagtccatttattttatgggtccacataaaaaatattttttaaaaaatatatatttttaataatttttaaaaatattatttatctttataataaaataatgcggctttaagatgagatatttaagtaacgttcttgatgtgatagaaagcaaggagcaaagggtggacttcgctttattgttagtacgtggatgagagatataaccaagtttctatttatgccacttgaattatatattatgatatatgtattatgccacttatcaattaacacttaaatacttcaaagtgagtgattcccacgtagttattcttaaacattcaattaaaagtgatgtaattaccatttaaaactatcctattggctataatgataactgaaatgcttaactataactatataaatatgtaatagcaattcgcaaataaaaaaaaaatgaaaatgaattacaattaaaaataatcttataaaaagattggcactgtctgtctatatttcgaatatttatcttctctatgtgctttcaataaattgtaattacattatttttaattgaatattttaaaaataattacacattattgttatgagtaaaaataaatatgtataatttataacacgtcaaaaatatatatatatatatatatatgtataatttaagtgaattacgattattaatcataacttttaattaagaattatacatataatttttcttaagtgacgtttgattggaaggaataaaaatataagaatagaaattgaatgaaataaaatttaaaatgcataaaaaaaattattaaattttttcttttgttacattagaatggtctttccttcctttttaaaatggaatagtcattccaccaaaatagtgaaaagagcattttataagaatgtcatttcaatactttaaaaatgcaaccaaacaaatgaatgaaataaaaattatttccttttcatttcattacctccaaccaaacaccacttaattactaactattatggaaagaaagaagctgagtattgtgagttagttggttgggatagttagatcacttaaagatttagttgaggtgtataaaattataaataaatagaatatcaaaatattatgaaaaagggccacgtgagacttcctttatgatgtatttggctgctcagaaatttcagaatccaaagtttggataatggtagttaggcgccctctacacacacacacaaaaaaaatcatcatcattatcatcatcatctttatcatccttgtatgatatagttctcaatttgcctttttaattcttttacttaattatttattttacttggatttatttcatggctaagatttccacttttgactataaaacgcacatgacatgacccaattgtatttgataatttagttttatatcaagaaagcagcccaagctcttgtgatagtgattgatcactttatgtgactcaattctatgaaacttgaaagaatttcactctccattcttattattgttaatgacatctttgaaggttggttcatgcatacaatcttaagatggggtccatgcatccaaattagatcttcttttcttgaagtgtcacaaaacaaaaaggagtacaaaacaaaatagttattagtcaccaacttgggtgtgattttgtgatccgaaaaattccaagatatgctaatcatttatttattatttaaagggtttttaatcatttgttaagttcttcaatcatatgcacgcgtgaagttaaggcatggcaattgaaaaagaaaagagaaagtgagttgtgtgtgtgtgacattatgtcatatcagagtcgactcagagatttgatgaagagggtatattttgttttcttttgccaccccaaaaaggaaaaaatgattcaattgcaattctccattgttgagagaaaatatatgtggtggacttgattaggtggtgtgatcattcattatcatagtgacaccccaaagagaagaaagatccaatttttctgacgttcaaggacttttatgctaccaacccactgtcaatttccaatgaaaaggatttaacatctatatactcttttcctgggtcaaaatggcaatgatgtttaatttaacatcggcaagaaccaacccttagttgggatttaatatgaaaccaagttatgtggagagagagagagagagagagagtagtcttttttgtgtaattattaagaccattgtgtaatttatatgcatgaatatgtcttaaccatgcaaaaactacactcacgacccacaaatggtgtgaatgctgttattacttgtttacaaatgggagaattgaatatctccatattacaagaaagaaagaaaaaaaagactaaataatgtgtttcgaattccgcctatatgagctctactatgtcccgacacctctgtttaaaatttaaaatcaaaattcaaaaataggtatgtttcaaggccggggtttaccaatcttcgcctcaaatgtccatttccagagcattctttcgccgataatggatttacttttcgctgctctcgtcatcgccaaaagctaaatcaaatatctgactgtactcttcaacgaagtgaacattaaggccttctttcacattggaagcaagttcatcgtaatcccttctgttcgctgcagggaaaataatggtctttacttcacccctccttgccgctatagttttctctttaacctgatttgttttaacagaagcaaccacaataagtttgaaggcagtacaacaatcaataacaaacagatataccagcagcaattgagcttgaaaacttgaaactgcgtgaagcgatatcaacaaattattttactttttttaaacacctataatctaaattcaaaaacttatgggaaagttgcaaaatggcaagttaatgaaatacgaaaccaaatgcgtgagagacgttagaaaaatgttaagaagaaatcgcattatgtttagcatacccctccaattgggagaatctttcctgttagagtgacctctcctgtcattgctagatccttcttgacgggcttgttcaatgcaagggacagcatggatgtaatcatggtgcaaccagcacttggcccatccttcggggtggcaccagcaggaacatggagatgaagcttggtattggcaaagtaagtgttatctggttcttccttgagcaatattgccctggcaacagtgtgggcaatctgggcactttccttcataacatctcctagttgaccagtaagaatgagagctcctttcccatctccttgctcaacatgggttgtctctatgtatagggtggaaccacccatagcagtccaagcaagacccatcacaactccaattggagttcgatcaaaaattctttctgcatggaaaacaggtttgccaacaaaatcagataggttttctttgtcaaccaatactttctcaatttccattgttgcttctttttcattaacattttcggtctcttttgcatcctgtaggaaaagaaaagaaaagatgtgagcccatacatgaactcaaatttacgtaataaagctatcttagcacatagtaatcaaaataaatttataaagggtgaaaattgtgatatttatctttcttattgtaaccaagcaatttactacatagtgaaaaagaatgggaacaagggtagaaattttgtgattgagcagtattagattatcataaactaatttgtactgagcctattagttgatcaactttgaggctcaccttatttgtgtcaggttccaaagaagattcaacttgttcatgactgtcgccctccactgattctaacccggactgattcttgctgtcatctgtattctgaaccaacccattcacttgttctacttctgcgtcattagtttcagtgacttcattttctcctgatactccttgtctgacaagtttcagagctatctgtcagaacacataaaaagaagttaagcttcagtggaagagtggaaccaatgcattatattcaattagcattcaaaaccaatgcattccccattccatgaattaacaactcaatcaatatcaacatctcgagaaaaattccaaatttgtagttgaatattgtgaaaatatattagggcttcacaatcactatcaagagcgtactcaccttgcggtaaatcttctctatctgtttctggagatttcgaacacctgattctcggcagtaattttctataagagctaaaagagctgcttctgtcacttcaacctgatttacaattagttgtattatacactggtacaactaaaaacacaaagcatgaaattcacagataaataagaacctgttcaggtttaatgccacatgattcacgtgtgctcttctccaaataatctctcgcaatatgcatcttctcatctgtaatatatccggcaatggaaatgacctccattctgtccaagagaggattaggtatcatctccacaacattagctgtgcaaacaaacagaacctgaaatgaaacattttcaagctttaggtgaaaagccgttaacaatggctactactgctggatagactgtacaagactagcatatagagagtacctctccccagcactggaataacatcactaacctttgatagatcaataggaacatcaagataatggtctagaaaatttgcattttgctctggatcaagaagctccaacagagcacttgctggatcaccggcatgcccccttcccaactgccattagacaataaaataaaaataaaaactaccacaaatgatagcccgctcattatgagcacagcaaaccatcacccaagagagtaaaatgaaatcactgaaattaaggctgcccaacacttatcaagccagtcttgtagtaccttgtcaatctcatcaatcagaacaagaggatttgctgttcccacgttcttaaggcattgcaccatctttcctggcatagcaccaatataggttcgacgatggccctggacataaatttttggaagttaatgatagatataactgtattctatcactttaaatatgtgtattgatgtcaactcaatataacgaggttttaactaccttaatttcagcaacatcggctaaccctcctaccgaaaaacggaagaacttacgattcaaggcacgtgcaattgatcgaccaatgcttgttttgcccaccccaggtggaccagagagacatatgatttttcctgtgattgtcacaaatcgaaaatacaaagcttaaaacaagttaagactggctcaaaaaaaaacaagtctaatccataacacgtggcctgtaggtgcaatgccattaaaactaagcaagaaaatcacatcaaccttgtgaggttcctctgagctttccaacagcaatgaattctaatattctttcttttacatcagtcaatccataatgatcttcatcaagaatcttttgtgcatgaaggacatcaaaattctcatcactgcaataaaaaggggtaaggcttaaaagaccattgaaaataaaaattgctacaaacattaaaaagaaaaaacaataagcaaacccattatagatgtataaagcattacactagacaattcatattttatcgaattttgatttagttcttatcaattttagtgcagacaaaacatgatacaagtaagaaattaaagcgcagtcaacagaattaattgagtgataagcagacctgaagtttccccaagggagtgcagtcaaccaatccaaatagttacgagtcacattgaattcacttgaacttgcctctaacaactgtagttttgtaagctcttcttcaataacttgcaagacatgaggtgggcatttttccctgtttggctcaagcctttctctaaactttgctgcagcataatcgacaaaaaagtgtgaacgaaaatgtctataaataattcatagccttactgggataaatgttttcaactaaaaaactaaagcacactgtaacagaaaattataatataatataacacacacactagaaactgatatgaagtgaagaatagcctcatctattagcaatttatcaactttgccatgtttttcttctagacataggatgacaaacaaattactatggaagggaaaaactaaatcatcaaaactaaattataaatctaccctataaagagaaatgagaaagaatgaaacctagtatgttataataactatcctagtaaattacatcaaagatattctggactgactaaccagatagtgctgttttatcatctgtctccaatcccagttcctacacaataaaaattttaagatgcttaaagttggatggagaaacaaatgggcttgaaagaagaaatgcttgcagagtaagatataaaaaacatataaagacaatggagccaaataccttctttattgccttaagttgctcattcaataagtaccggcgttgttcaccacttatcttctcttcaattgcttttgcaatggattcctaattacagtgcagaaagtacagttcaaataagggttaaaaaaacaatgaggtcaacacatattaagcaatggcatcaagtacctgaatcttggtaatttctatttccttctttactaattccagtgtgagctttaatcgcttatacacctgttatatttcagaattacataagtggcaacatagatagaaaaaaaaaatggtcttgaaatagtaattttctgaaaatgttcaagtacggcaaataaaacccaaacccatctcaagactaatcaccacattgagatatgttgaatgatactcacatctagctcttcaagcacttcttggcattgcaatttgtttgcaccagatatggcagctccaaaatctgctaaccttggaaagttaaaatctcctatatgctggatgttgggagaaaaagaaaagga

SEQ ID NO: 15924 - DNA, 5657 bp, Cannabis sativa
  modified_base (26)..(31): a, c, t, g, unknown or other
  modified_base (5592)..(5611): a, c, t, g, unknown or other
tcgaacatataattaagattatattnnnnnntgctgacaacactataatcattaggttccttagcctcttagtgtgaggatggacggaggataaacccattgagctttaactttctcttggaccccaataggaacatcctgttcaagttcttcaataatgtagtcttggccctcacttaggacgtcctcaagctttgagacgggttcttggccttgttataccctcttaatggtataatcacgacaacaaccttttcctcttcggcacaagctggacggacctcgccctggtcttctatctattgtagcttctcattgcaaatgggtatttcaacatcttctttaggatttttggttgctccacattggccattaccattagctgggcaaagtgtgggtccatggctgagatcttcctataggtttgtttagtccttgtcaccttcctacgtctggacggagtatcctgtttgatagtttgctttgcaacgttaaccataatctctactagcacaaagattctttttgaaggctctagatgaccctctcaaagcatgtttggaatgtctgcgtggaccctaacgtccacaaaatggacaagtaatgtctccaacctctattcatttcccagataaatcttcctacccctttccacaaatctgaatagggtaatggttgtgttgcacaacgggctctagagactacaaaaaatcacttataacttcccactcatccaagctcgaagtggagaaactcccactggtccaagatcaaaggggagaaactcccactcggtaatggcaaagctgggcggagtctaggctggtctatgtagagcagttggagcagatcattatctatctgatgtttacttccctagaaatcacatgggttcatctacaaaagaaggagagagacacgtaagaactagacaaatgagcctgatttttccaaaggaaaaacatttatgatgctcttaccagatggatataaagattaaaagagggaaagttcatcctactaataaaattcttgaagtcaaaggtccaagagcacgagaagaacctaaaaacacttgagaagaatttttgagaatttttttagcaaaaatggtttggaatcaattagaaaccaagaattacgagtcgtgcatgtctttttgaactagaatttaaaagccctaatttctatttttgaataaaagtttcatgtgcccagatttttggagaagaaaattcaaacaaaaataaagtgcaataaatggaaagatggaaaaaacttactcactattgatgaattccttagaaatgtttgagtttgtctctaaaaatggctttagtaggatagaattttagcaagaatcctttgagattttgaagaaaagggagttagttttgctttggtattttaagaaccgaaattggtgaaaaaagtgtcaaagagtaccaaaacccccttttgagatggcaggatgggtagatcggtaactttaatttaaattttagtttttccccaaaaaatgacaattattactcattgaagagtgcaagcatctggcacgcggtacccaataacgttattgcgcctaccgatgtccatttttcaaggcagggcattaaatgcccaaggcttgaagggacaggtagatattcgtatcttacaattagaataaattaaatcaaggtaaagtacgagagccaaaatgtgtcacccatccaagaaaactcagtggctgagtaagtccacgtattaaaaaatagttcccatgtagacttcgggggcaaatgttatcccaatatctgcatagggtgatgtggcatttcataagattgacacgtggatggcatttccaaagcctacacatgtgctcttccttcaatgatctatccaaagagttttatgtgaatctgattaagtttaaaccttcagcaagtattatccagatagagcctgtatgcgactatctgagcaggtcttcaccatctagtgaagccaaatcctctgagcaggataccacgactgaaaaagatcttccaagatatttttcgtaaatatatcgcattcttagctcaatctgattccttttttatgggattgacacacgttaatagaaaggtcataggaaactaacctagtttccctttttactttctaattgtttttagaaacttaattcatgtatttttccctaaaaatagtggaatcatttcattatttggggatcgaaatcatatgttcttgagagctattatgttgtaaaaataattgtaagcttttcctaaggattattgggagactcacttggacaactccttgtgatcttgataattcttcaaagtaatacaggtaaaaagagggtaggctattatcgtaatcaagggatgaaacctctataaattatggtattattattgcttaattatattaattattatctaatatcccatcactttaaagacaacatcatactaaaagcgagatcaacactattgtttagtgaaggtatgtgtttcttctaaagacacttcttctatgatgggctctatatggttagtgttttgttctctttctactcttgaggttgttgttgtatggttaattattatgaactgagactgaattgcttcatcatctttgctactttagtcgtcaatttctcaatcattagattagctacaagatgatgacagattgtcgtcatctgagttttctatatctttattgaaatagatttgtgggataatatttagacagtgctggtgcattatgtttggaatgccatttccaatatcaaattttttagattttgatttaatatatagatgttgatcgagatttttgacaactaattaatgaaaattgcgtaaatgattagaagagagttaatacaagtagttttatgtggttggggcattaatgagccttatccatgagtcactgatatttaatatagtggtgtttctttgcagggaatgtttttcaccattttttctgatccccttcttagaatgtggttgggggtatttatagccttatgaagaaagctaaaggtcactattgttgcaagtgctcacttttagtttgcacaagttcctagattcaaacaatagtgtatgcatgtctgcatagtaggttacatagggtttctctaggtgttaggtgagacaaatctttatccttccatgattgacgtactaaccgcctcagttaaggtgtaatcgccgaagaatgtgtttaatgcatctgacatgtcttttcagattcatccacagacgcttcctccatgccgcatttaatgcgtttatataattcatatccacggccttgggtccggtctagaaagctctacctagctcctgaagaagaacaaaaacgtctctcccttcgaacccacttgtatctcccgaacggacctcttgtacatgtccacttaatctggacaagtttacttaagacatccttaaacacttcctaatcttaagacttatttgccatgcggtcaatcataaggctattgcatatattaggacaaaagtagggtaacatttacccccaagtcttattttgcaactttgtaaatgagacttgagacttgcctttggcctttgggagtgatgtaattaatagtttgcatgtgtgtcggctatttattatttataatcattctgcctcatttttggtagctgcctcattttttgcgggtaagaattcaattcccacttgttcaaaagagcccttcattaatatcattttcataggggtactcgagcatttcaactgccctagctatcctgaccattaggttactagaatttggatggttcgaaccctgagcgtcagatgaccgtcgattggcattagcactcatcttgaaaagcctataaaagcccgtaccacttactactgaggtttctactcactcatcattatttgtttccatacttttcaaaccttccagtaaaattccaaactttctagattttcttttacttttcactcgcctctgtcaggcgagttatcaccgtcgtgtggtggttctgacacttcttgagatttctttgtcatgtaagtattttttccttccagttttattttctggaatgttaagcacgttgtaacagattttagtttgtccttggaaaaaatatttatatatatttttgtagtaatggtgactttcccttagaaccttcacttaaagttgcatttatcgttgatttttatatttgtttttaagaaaaaagaaagaatctttgctgtcagacctttgtagaaattttgaggtttatggcttgtgaagaatcatactatttctccttatattttcctctcattttttatggctcttttgttgtggcttgaatgttttgcaccagatgtttgatgattagaatcgtaagattctttttgactttcatccgaagggggcctcttcttaacagttaggggacctccattctcctttttgacttaaagtttgatgagggggctaactgttgggtttcttgtcttttagatgaatgaatttctccaggatcttcacaaacatggtttctttggattcaaccatgaattctggaactccattcaaaaaatcctacgtcaaactccaaagtgtcatctgatgttaccctcactgtcaatccttcttcgaccaaggcgactaaaaagcttgccaccttggaggatgttatgcaaggtctggtaccttatagaaaatattcttactgctccaacggttgggaggctaatgagtttccctcgtccctgatgtgtgctcatcagttggagaagaatttggtcgtgaatgggatcgagccatctagttcaggagtctagcaccgtctacctagatataagaagacacccagccataactacaacggtttcagagcgtggagccagacccatctcatgtcaggagccatgttaccactacaagattacttcatagattttttagtttttttcggacttgccccttataaacttatttcacaagcctatcgcctgctttgaggccttttattttctacgttgccaggggttgggttgacctcagccccgcaaaatttttgtatttttatgaacgtttctctatccccaagaagggtgacaagtatgaagacaatttttataagttgcaagcccaaccagccaatgaaaccccattaccctttaactctcaaaagaatgtcaaggaataccgtcgcatgttgttcttttcatcggggttcaaggctttcaagcatctagatcttctgaaaaattgggtcaggattcctccattgcacaggacaacccctaccaaaatatttctaaatcatgcaatggtattcgccagctataaaaaggaggagtcgaacgttggtgacttggtgaccattgccaactgccgcagggctaagctaatctaggactgtcaatcagttgaggacttcaacttatctaaggtgtcctatcccaatgcttagggactgaaaagaggcttcaaactgagatcattgcaactaccgaagagaaatacaaaaagtataagtacagaaaggaacaagaactttgtgttgggaatattttaccagtatctagatnnnnnnnnnnnnnnnnnnnnttaacatcctaaatatgaaatctccaaaataatgaaataaacacat

SEQ ID NO: 15925 - DNA, 3677 bp, Cannabis sativa
aacttaaagaaagaattaagaaaatttcaaataaaatacacgatgatacatattcatatatagtcagcatcctgataaaaaaaagttgctaataataataaatgtttttttattggcctatgttgtaaatttgtatatatatacactaaatactaattttggagaagggggctgacacacttgaaagggtcatctacactaattaatgagggagtttataatattaattatttatgtccatacaaataataatggtgtatatatatatttatatatattatattcgtattgttgtcatggaccacaagtttccaagtcttatatgctgcaggatataatatattctatatatacgtaaatgatatatgctatatataatacaggtttatagagttgatttacagatagatagcatagcataatatttacgtatagcatatatactactaataatcaaaatggcttgatgtggtaattagtgtattataaatgtttacacactgtcttgatttttgtcgaaactatgcggagtgctaataaaggaaaattctcttttatacactctagctcttatcttttttttatgtctataataataataatatagtaataatggatctcaaatacattgacagtgacacacccatctccatggcctggccatattattatatatattatagatagcatggatcccttttaagtgtagtgtgaagtgaagttataataagaagatgttaataataggagagacaggtgcatggaagaaagaaattaaaggtagcttaggggcgaggtccaatgcttaatattaatttgatcttatatataattgaatattgatattaatgttgggcacattggtcaaacatagaccaatctatttgagacagatgttggtcggatatagtccgatgaatagtaacgcaacggcatgtttgacacatggcaaactaactcttctttttgcctgttttgccgtgctaaccaagcccaagcccaaacccaacttttcttttattggctaattccacttattcttccaatccctatgtgacatggtcatggacaacttcacgtgcatgcatgcttccttaccttaatttctagtgtccatttctatatttacagatagtaaatgcatcattaatataaccaaatataattttttgtcccataatcttctatagaagtatatatttgacaatttagatttgcgttatgatcatgtacaaccttaagtagtcactttaacctgcaggcccgctgggtatatgggctggccggggacattacacttatctccaatctgtgtttgtttgtaatgtaatgtaatgtaattttaattttagtttatgtttttatactataaaaatgtataaatatcatgtattaattgtatataaattgggttttgttattaggtattagtgctgttaagtatctaatatcaccacaagcatgaccggccttagattaacgcgggctaggcccttacttaaggtcacctattttagaagtctaaataaaaaatatataatttctaataaggttaatttattttataataagaactcaattttttttctaaggctctaaggtacttctagcaaaatagttagggatattaattacataaaattttaacattaaattaagtaggacttaattaaatatttagttttattaatagcgatatgacatatctttaattctttttttttcctaataatttatatcaaaaatattttttctattgtattatcatttaaaaggaaaaaaaaaattaaaaacagagagccatccctgccctgtttacatttctatagccatgcccaactattattatttatataagcacaacacaagtggggaggtggaaacttggggagattttgtagtacattctccaaggattttctttgttggtcttataatcataattcaagatgcaatttcaaatcacccctcttttgagggatttgcacggtcaactttgtgtcaaaaaattctgtaaagagattgatttcatttgaagtgataccaattaattaaaatacaagtaatcactatatatatctataacacattaaggctagaaattaagctgccaatgaacatataattactttggatatcaaaaacataattaatgattgataataatgaaaataacactcctattatatataattgcctcctataaatataaatatatactcataaatctagtgagattaattgaattctggattgctcccatttcatcaaaacaaaaaacaaaaaagcgaaaaacaaaagagctggattgtcatggttcggttagcaagggacatgcatggctatagaaagtatgggctatacgttataatatgttatattatatatatacatattaaatttatcgacaagaataatgctatgcaccttcatcataatatccaacactcataataattgacacatgttcaattaataatcacttatgtaattaaaaatagaataagatctgataaagctagctaattagagtttattataattttttaattaacactctctaagaatacgatatcaattgttcgagtttaatttgattgtaatccctactatatatactacgcatgcatgatgcatctccaaagaaattctctaaaaatagcatttttaatataataaagggtgaaatatcaaaaatattactccaatcaaccattctcatttggattggataactgatctctaaatatgaaattttattctatatattagctcaaataagaaatacggttggaatgaagttaactattttttaatattttttattttaaaaaaacttttttatatataaatatataatttacactactcaaacattttcatatagctaaaaaaatatatatgtattttttttttaataaagccaattaaatattacatactgtgttgtgtgtatacaattgaagtattatttgtctaacattattattatacaaaaaacaataataaataataaagagcaccctaaaccctaaacacaatgagaaagcattataatttgaagaagttggtggatgcaaaaatacatggttttggaaataattatttaattttttaaattaatgaaaagggttagtggaaaaaagagaggagagttagaaaagattaaaattggaagaaaaaaaataaaagataataaagaaatgaagcgacaaagtgtttgtggaaacttgaaccatggacaaaaaccagctagccttgggttttagactttctcactctcacatacataatatcacatctcttactcttactgtatttaagcattaaccacctcaactctcagtggcttatgagatctgctttctcatcaatttctcaagcccaacatttgctatactctctgctctaaatgaaggcaacagactaatgatcgatcttgatcttaattattgtatatatacatatattctgttgtgattctatatatctatatatatatatatataaaagttgtgttgttatatataatatgaagaaataccatttttgtttttactgcagatattaagttggatgcaaagcaagctcaaatatggcaaacataatgagaacaactgcaagaaaacaataacctcaaaaccgtttccccgtaagcacatttatatacattatac

SEQ ID NO: 15926 - DNA, 3053 bp, Cannabis sativa
atttttcttatttaaattgtgttacaatgctttaaagtggaaaaaaagagaaagaaaaaagaaaaagaaaggtgttttgaatcttgattagtgtgtttcccagggtgtcccttggaatcagttaaaccgatgaattgtgatgtgtttggttgaatggacaagagagtttttggggtcccatcccattatccatttcattccaaattcatatcattccccttattcccttctgcctttgccttgcattgcatagaatgcgcttttgttagttagtttcaatggaaattcataacatcaccaattaactcaacccaaccccccattaacactttccaaccaaaccaaacataataactaataatcataatgaacaagaaggcttctgtgtctaaggagctcaatgccaagcacaccaaggtctccttctttccttattaaccaatcattcaatcatctttaatgtgctttcattgcttcatcatcttttattctttgtatgcagattcttgaaggtcttctgaagttgccagaaaaccgagaatgcgctgactgtcgaaacaagtacattcataacctttgcatcatcatccccatttacagattcattttaacaatacttatattagaaaatattttgttctcgatttgattgccaaacattaattaccatcatataccctttttaaattgatagtttatattggaaagtgctgcagagttgatcttgaaacctttgatgaaaaattaagtatcacctgtaatattattgcttaaagattgttgttgtttacttcttcagggcaccacgatgggctagtgtgaaccttggaatatttatatgcatgcagtgttctggaattcatcggagtcttggagttcatatttccaaggtgtattttcttgtttcttatgattctatatttcatttcttgcagctgtatactataaatggattctatgccaatttgagtgcaactgcaagcattttcttagttttttcagtagtcaaatcatgagtaatctcactcaggacttttgacacttgattttatgtgttaaatttcacattgatgtgtgctctttctatcagcacattgtggagtattacatatatcatttattgtatgatctgaacatgttcagcaatgacatattttactcattgtttagtcttttttctttctattgaaaacaggtacggtctactactttggatacatggcttccagagcaaattgctttcatggaatgtaagaatctacacaactggtctgttccataagagtttagattatttatgcactgttgttaggttcatatgaaggaacattaaatggttcattttgtcttttcatagcaatggggaataagaaggcaaacaattattgggaggcaacaatgccttcagattttgacagaagtggcatcacaaagctaattcatgacaagtatgtggctttacatgaagcctattttgagcatttttttatggaggatggacttgttatttgtccccatttttcactaaatgaaattaggaactaacaggtatgaaggaaaaatatggactaagaagagaagtacaaaagcaattgcagaatcaggtgaatcacaaagcaatctcaatttggttactgatagtccaaggaaagtacgaagtctctctcttgaggaacaaattcttaccaaacacacaacacaacctgttttcgcaatggctaaaccgcgcgcagtaatgtcatatcttatctcttattattatgtttaagccaaaagaacacaatgacactttacagcattgtaaatgcattatactttacaccatattggatttatgatttgttattttgattccattcattctttttctgtgattcttgccactgcatcatctttgcttcgcttttttggttcttgaaagtgtagagaaatttacttaaagaagatttttatttgttgtatgcagggctctctagatataaatgaaagttataatattacttcaactttgtcagagggccaaaactccagcaccacaaacctcttcagcttactttatgtccacgatgtgaaaaaggatagtacggccaccaaaccttcttcttgggcaacttttgattgtaagattacattcttacttgtattcttttttgtagtttcaaatcttaaaaacttgttcatactaaatttgctattgaattagtcaataatgataaaagccaatacaactgaaaatatatggtgcaggagaaactctgttcagacaaatgtaaaggattgtagcaacagctttcaaaagagtattgtctttacaacacataacaaggtctgcagtttaatttggaagcttgttttgatgagggtagtgttttctaatcatttttcacctcaaataatgtttgctcattaacttaggcacttatgaaatttatttataattcttagtctgaggctttgattaaatattcattgttttggaatttatatgaaaattgtactcacaactcacacttgaaagaaactacatacaaaatatgttgaagtagttagtgaaatttttgcttccaagggcatgttgttattctaatttgaaaaattatttattgctttgttagaaatttaattgtaaaaagtaccatatatattttttgtaggtgtcaatgtaaacattttctgaagataaccatatattgtttcaaaaaaaattcctcttttattgttgtgttatatcaagtggtaatggtaacttgcttgttgaaaaagaaaaaaaaaaaaagaaacaagaagtgttactaataacttttatctttatatatttgtaaattttgccaaggccatagagatggaaatttatactgcggggatgggtaaccgcggtgacccgcccctaatggggtggggattctccattttagtggttaatgggacggtgatgggagacaatttcaatacccgaaatggagatagggcgggagtggggataatactatccgcaccatatccgaccctgatatagatatatatatataatttcttttttattcttaacatat

SEQ ID NO: 15927 - DNA, 3748 bp, Cannabis sativa
aaaaaaagagagagagaaaaaaatgcattgggataccttgttgaggtggtgctctttttttttttttggtataatttttcaacattaattattcaaatttcttacttttctgctttaacgtggaactttttctttttattttttttttgttaagcgtttttctttggaaattcattcctttagttaacattacgaaatgaattgcctttaagtgccataattatattagatagaatgttgaagaatatttaattctaaagtacacaatttcttaattaaaagttttaaaacctactacagagttcttatacaaatgtttactaattttgaaaagaaaaattcttatacaaattaaataagccaagtgagcctttacctcttttattatatttcattaaaaaaaaggtgaaataggaataattttaacttaaggggtttctttaggaatatcgtaaattaacattgctcaatgtaacacattttcctctcgagaaaaaaaaaaatcagaaagaatattgagctatgttataaaaaaaattagaaaatgatgtaacagaaattaattttgctatatgataatagtagttcatcataaaaatcactagtttttatttcaaacatcaaaagaaaaaaaaggctcactttgcgtgggatatgcaagttagaaatatggtacttgatttgtcaatctgttattaaactcactaaactcacataattaataaaatccttaaaagagagtagccatattcgccaatttacaggctgttatcaaccacttgccaacctgtgctcgtatgtgggcaagcagcctacttcaataattttgttgatataataactttattaatttcattcataacccactaagtcgacaataagtagtacctaagtttggtcatacattcaatgaaccccttttcttttaattaacataaaaagctccttgttagactaaacttctctttcaaaaaaaaaacaaaaaaaacaaaaaaacaaaaacagaaatcagttaaaacttgtggctttagcagctctagtctccttccaaaaataaatcaaatggtccttttttcttctctcttcccaatttttatttgtttcgtgcacgtttgagtatttcgacgtactttgtatagttgttattttataagatgtggtttcgttcgttaatacttttcttaagggtttgaagttttagacttttaagaacacctttagttgtggttattgaggtctcattttcaaaggatgaaaaactagtggctcccgagtctgtcactgtcattacacgagcaaacttacgagtccaatcgaattagtttatatatataaatgtatgttctgagaataaccatcactaaaagaattgtcgtacttcattttaatatcagaaaacaaactaaaaaaacttaaaaggacttgtgtgtttgcaattgcaggactatggagtaactttgttcctctaccgtacaccatatctcgtggatcttgtgaaagaatccgtgggggtagtactgaggctagattccattgaggatggcaatgcttggaaaggaatggacgttctcatcttcaattcctggcattggtggctccacaaaggaaaatctcagccgtatgtttttatatatatatatattatctatatgtaattttgtgtaattggttttggtttggcagatgggactatttgcgagaggggaccaaattgtacaaagatatggacaggcttaccgcattttttaaaggaatgagtacatgggcgagatgggttgacctcaatgttgacccttcaacaactaaagtattcttccaaggaatatctcccacccattatcagtaagcacagctaaaccttcacttcatttttgtcataacaatttattgaattattgacctaaaaacaatgttgtattttactttttgttaaataagcacaagcagcataattgcatatgttaataagtattccacataaactgacaaaaagtccctaacgaaacagcttagtcaatagaacaatcagtataaaattgagaagcaaacattaacataaagcagtgtagataaacacgtgcaaacattactataatgtagaagtgctgtagtgtagatcagacttgtgcaaatggagtagtaactagtttacgaataattttggccaataataataaataatatatattactaggcatgtcattaatttgaacgtttatgtactgataataattcaagaccattaatggctatatttgaccaataattcgctaaaaatgaatatacatggtacttacattgacaaaacccataaaaagaaaataacaaaagcaaatttctaaataaaaaaaaaataaaataaaattaagtggcaaaaaaaaatcattagtgtaatttctactattttgcaaggttgtggtgctatgaaagaaagatgtattaggttggctggagtaggcattagtaaaatatatgagggctgatctgggccaataccactagttatgctatgctaaaattagtagaagtagaacctcaattgaaatgattttgatgttattgtgaaacaggggacgggaatggaaccagccaaagaagagctgcaatggagaacttgcaccattatctggatcaatatacccagccggagcaccgccagaaacctccatagttagcaaagtgctgagtagtatccagaaaccagtttatctgctcgatatcaccacactgtcacagctgaggaaagatgctcatccatcatcatacagtggggaccattcaggcaatgactgcagccattggtgtcttccaggtttgcctgacacttggaaccagctcttatatgcagcacttctttgaagttcaaccacaagactacaacatcttctgtcatttatgtacaataattgtctgtatactagctcagagactcaaagaaaatctctcattcacttccattggtaggatgtataataataaaacagtggaaagaaaaccaactgtaaagtgattgattataattaaccaaaatgatgtattgggaattgacagataggaacccatttatctacaatgcaaaggcattgtaattgtgatttcagtaaccactaggtggtgtaaggatttagttcaaaataaacttggcacatcttatcctagttgaaactattgtgtaagtccctttatttttctagcagtgttgataataaaacaatgtttcccctcttcaatgttcattatttgtctcttagttttgaatttagtagatatcaaaacctggttattcagtactttagagaaaacaagttgctagtaaccaacataaaccgctgcatttactatgtaacaatcatcattcttatctcccatttcctcaacatgcacaccacttgagcatattagtcctccatccacaacttcaacattcagtatcttaccactgcatatcgttcaaaacaagaaagataatggtcaaacaaatgattagcaaagttatttgatgtacccatttctaattgcaaaccaaagattttgttccacaacgaagtagaaaggcccagacttagctacatattatatgattacatcttaatacaacaagctgtagaaagcactaacaaacataagcatagaaccatgggatttcaacttggcaaacagaatgtattaattgaagggggatccttctcttgactgatcttctgtgtctctaaaaaccacgacaaacactcttcaagcagagtaaaaa

SEQ ID NO: 15928 - DNA, 5679 bp, Cannabis sativa
aaggcccaaattctaaattattggatatgtacggaaacatatagtatcataagttacgttaatatcttcttttaataaattcaaaatagagtttgtattgacgaaacagaacaaaaattatatatttacaaacattaggtacttacgctgctaaaaaaataattaaatttatgccggtcacaaacacaaaactttaagtaaacttatgccacagttatcctttttttatacataaaatcataaatgccttttccttatatatacattgcaattatttgattgttttttaatgaatattattaaaatttgattgcagaggagagagtgattagtaacttggctcgatttgtgttaatcatatgggtgtttgtgatatttatattgactcaaagttacacagctagtttaacatcacttttaacagtgcaacaacttcaaccaacaattagtgatataaaccaactcttgaagagtgggcaaagagttggttatttgggtaactcttttgtgtatggactattgagacaaacaggttttccagcttcacaaattgttgcttttgattctgctgaagaatgtgaccaatttttgaccatgggaaatgcaaaaggtggtgttgctgctgttgttgaagaaacccctaatatgaagccttttcttgctcaatattgcaataaatataccatgattggcccaatattcaaaaccgatggcttcggtttcgtaagtacactcatttcgaatgcattttattttaaagaagttatacattttatgactttttatacaatgtgtgtaagaatataatttttattttaaaaaattattttatggtaaatattaaaagttatgcgaaaaatagtttagaataaccaggtaccccttaaagtaactagttatctcaactgttgttctccttttttcttttttgaatttttgcataaaataacttcttttttataaaaaaaacatttctaatattttttttttttaaaaaaaacatttaagttataacaatattcaatgtagttatgattaatatgtctttctcaactataataattagttttgtttaacataattgtgttgtattgttttgtttttcttcacattactaattataaaaattctgtatatgtctatttttctgttaggtttttccaaaagggtctccacttgtaggcgatgtctcaagcgccattctaaatgtgaccgaaggagatgaaatgaataaaatcgagaggaaatggttcaaaaatgaacaaaacacttgttcaaactccgaccccaaaacctcatccaacaatctaagcctaagtaacttctggggtttattcctaatagccggagtttcttcattatttgcactcataatctttgctattatgttccttcataaacacaagcaagtcttgttggattccaatgtttcacttgagaaaaaaatcaaagtaatttttgaaaactttgaccagaaagacctaagctcccatacttttagaaaaaataatgatcaacccaatgatgggtatgatacagatgttgtggagatcattactagtactaataataccaattgtcctccaagtccatcaactaccaactatacaattccgaattcacctgcttcaatgtgagtttaaggagtaataataatactattttctataatgctcatcaggactctatagaaatcacatgctgatcactttgatgagcattttgtttgattagttatggcaaataattacaagttactattttattactagttactttttgttactagttacttttgatttatacgtatttgcgcctttttctttcttaaaactaagcacatttctaattccatgcatgtatatgtaacactataattagtatgtaacacttaatttattgtatatgatggataaatagatgtatttattaattttaagagtattgttatttggtatcttaaagtgtttaacacgtatttaaaattaatttattgtttttcattgatatatatttgaatataaaaagtgttctttattaatacaaattagctataagaatatagacaaatcctttactatacctatgacttgagtataaacaagccgcgagctaaataattaattggcaatcttgttcgtagactgcttaacaaagacaagtgacacattgcttattggtattttatggtatccgttagtatttctctaatttgttattactaattatgatactcaacattttaaatatataaacttagttactcaaataattaatgataattaatttattgagaatattatatcaaataatttaaataaattttttataaagtcaataaaaaagatatcttttttatattctaacaaagatatcttttacaatataatatttacttggccgtttgtgttaagtgtagttccatgtcgttgtcttttattattattcattaaaataaattatatgttaataaagaaatattgaaagtcaaaatgataaacaaactctatttttaaaataaattataacttaaactcatccattttcttattcgtcttattttcataatttaatgttgtcttaactaagcttctcagattcgttaattagaatttatgacaatctcttatatattttatctatatatgtgaaaatcatatctctaaatatattacaaatttaaaatacattacttagactcagttccactacaatattagaaaatacaataagaatggtgtgaagtaaagatcaagctttctaaatcttataaaacatatatatataagaatatatgtcaagtttttaattaatttaactagattacattttcaagtcacccttgtacatatctctattaatcattttttaaataaattgatgatacatatataaataataataattttttttattttttattttttttcttactcaaatatatgtataattaattttaattatggataatcacaatcacattatattgatattgtataataatatatataatttaaaatctatatgcgaattgagtttatatatatcattactttttttttttttattttaaattttggtttatcatcattaccttactataaataggctatatattacttttcttattaccataaatagaaaaaataaaaaaaaataagacataaatgatagattagttatgatattagatttgagaatgagaataaataatgagtttgattaatttgtttatttctttaatttactactgcatactttagagataagatcattcaatttttgattggctttaatgaatcttattgggccataagagctcagatccttctctatgaatggtagcggtgatgactccaacgtcaacgttgacgctctttttgaacgttgagtcaccaccgctgccattcacattttcgagaaccccgtcttctacaaacgaacgaaacatattgagatcaattgtcatgtcgtttgtgttgggcctaattcttctaccttgttgagtcactttctcatttttattcccacattagtatgatattgtctgctttgggcctaaaccctcacggttttgtttttggagaccttcccaaaagacctcatactaatagagtaatgtccatccttatatatatccatgatatttttcatatctagccaatgtgggactttggttgcacacccaataattctcccctcaaataaagaaccacatgctcgtgacctcccctccagcaaaaccacattgtgcccccgttattaacccaatgaaacacgccgcctgatcatcaactttatcaggaagactttcgacacaggtcctaacaccgatctccatcttgttcgtaatcatcaacgggacacgccacctgactaccttaatatcaaatagactttcaatacaaggcaccatatagatcttcaaacgcaatgttgtctgctttaggctaagtcctcatgaacctttggctctgataccacttgttgggccccgttcttccaccttgttaggccgccacctcacttcccacattagtatgatattgtctactttgagctaagcagggccagcccaaatattttggaggccttgtgccaaagattaaaattgggctttatatataaaaaaaattgtgtacattaattaagacctcaattgctagttttttatttcttttatttttttaaagatatgtttctaaatttttgaatataaattttttaatgtatttataataataaataaaaaaattcttataaaaaatgggcctttaaaaatgggggtcttgtgccatggcccaagctgcccaaagcttgggccggccctaaggttaagtccttatggttttattttttggcaccttgccaaaaggcctcatactaatggagtagtgtctattcttatatacccatgatcttctgtatttctagctaatgtgggactttagtttcacacctacactacaaaaaataactacttttaattagtgacaactttttagtcacaacataaatttttgtgactaaatgtgaattttagtcacaataaaaagttacttgcgagtattatctagatacaagttatcactgatttagttttagtcacaagaagtatcgtgactaaaaacacatttagtcacaacaaactgtaatttttactactaatacttttagtgtatatcataagcagttcataatgatacttaaccggatgacaccttaaatttgctaccaactcagtactttagaagggtttaccatcaaaatttgaacttgaaagattaaatgtaaatgaaaccgcaatcgaaagagtttagccggcaacaactctttactttctatattgagaggagtgtattaaaatttagaatatatcagcccccacttctcttttgggctttcttatttctttggccttgatgcctttattcaaatgagagtgtttcattcaattaattcctacaagtcaagtaaatagcactatacaaagaatatatatagcaatagcactatacaaacaaagtgctcatgacactttaaaacacacttagatatttttgatgtgttatatatagtaaatgcacttagatattaagttaaaaaatcttcggttgatatatcaacaaaatccaacttaatgctctccaggagcttacttcactgaagtaatagagctgatttgctcttaactcttttcactgttaactcattccacagttcctttgctttagtctagttgtttctgcaatggatcctgccagtgtatgcgacctatttgaagaatcagtccagatttcacaaaatgacatcacattcgcccttaacccgggggaagtcgatgaaccacaggaggctaaccaagtattgctaggaaaaatcattagccggcatagactcggaaaagcagccattcaagggtctctcaaactctcttggaatgccataaaaggatggaaatagaaagaaatagagagtggcattatccaatttacgtttgctaacagggcagacgcgctgaacgttcttgcccgtcgtccctggttcgtttgtggtgctctattggttataatgccttggccgacatggctatccccagcagaggtgcggttcgacaaaaccccgatatgggtgcgcattgacagtataccccccttctactggaatctttccaacctc

SEQ ID NO: 15929 - DNA, 11383 bp, Cannabis sativa
  modified_base (8313)..(8319): a, c, t, g, unknown or other
ttggtgtgaaagaaataaggagtcacatggttctaagtttaaaatagcagatgttatatgtagtttctctgctacatatctcatccaatatcaaaaggccattcaagctgctgctccacaccagaattctgatgctcaaacttgcagcacccaggtagctccttaatcttcattgttggtccatccgaaatggcagccacctgaaattggctcgtacaagatgtaggcgctcttattcagaacaatgaaggtgtggttgtagcaggtctctcaaaagttgttcaagggccaaggctgctattccccaaaagaaatggaggctactgccatgttttatagcttgcaatggtccttgacgcgtcaactacaaatacacttcattgagtcggattctcttttattagtaagttagtaactcattttcatgacatggtagaggatattaattatcttttgtcctttttcttagagtaaaagtatctcatgttataagagatgctaatcaagcggtccatgacttagctaaatttatttttcgattggatgaagatatgtcttgattggaggaaatttcatctccaatcttttctgttgttgttaactatttttttttttttccatttttaataataacagaatttttcttaaaaacaaaactgccgcgagtgatgctatcattgactatctctcgcgtcgttcccaaagtgaaacgctttaaattaagagataaagaagaaatcatcacggaaagaggacaaagacaaagacaaaccttacataaagactttttccgctcccattacataatcttgttccctacataattttaaggatggcccagtttcatgaagaagaagaagaacaaaaacacatattaatattatattataatggcaaataacaaataacctcaatctaccaaacacaacgtaccttaatatactctataatcattattataatcacaaaaaaccaccccactaatcatatcttttccacaaagtattcggcctgttgttttttttttttattattatttatttaaattaaagaaaatatttaaaactaaataaataaataggatgtgaaagtgctgggtcgaatgggacaaaacagagggttcagtcttgttggctgccttgtgtaaaccgtgtgggacccaataccgtccgaaacaaaaacgaaaatgcatggcgttggcatggcatgagacggcttggcttggctttgcttggcttggcttggcttggcttgacctgacttgacttgacttggctttatgtgatgcgcaaacttagctgatgcctcacgaaaccttagatcatttcctttcacttttggtcccgacacgtggcaatcagacgacgtcttcaccaactgtacgttttctatatttctattttttttttattaattttgttttgtaaggaaaatatgggacgtgccttcatgatcttggaagttgtcgatcttttttttattataaaattgttaaaggatcttgttgttttgttgttggaagaattttactgtgtgagtactttattcagtaaccaatactcaaagaaaataatttgattaagcaacgccgtaattaaataacaaatgctgcttattctacaaggcactcctaaaaaggtacatcgataagaaaatttggtactctcatatttataatgattgtgtaaaaattttttttaaaaaaaattagaataatttatagtatacaaaatactattcaaataatttatttcaaatgtgttataaaataaaagaatcatgcgtacaataagttgtttaaaccttatttttaacatgttaaatatttttacatttctcaaaattttacaaaatatcttaaaataaatatatcatcataaaaaaatagaataattataaacaattctcctagatgtcgaaacaaataagagatgcatctaaaattttccaataataaaatacattactttcaataaatgttcattgtcaaaaaataaaatacataaaattactctgaggtttatcaataataatttaatgcataataaattatttttgttagtttgtattataatatttataaagggtgtagggttggagacccagccccaaacacagaccctggaccaggcccagacctgagacttagacccagacccagatcccagacctcaggccctgaactcggacctcgaacactgaccacgggacctgataccttgactcgaatcctgtattggatcgagttttatgccataaataaaattcaatttcaatgtagtcatatttactatcagtaaagataagaaatcataacataactttgtctttcgcttaattcacatgtttcatttttataattatatgtaatatataaattctatttaatcctggacatatagttatttacaattgtagtgttgtcaccacaatagaaaataattgtgattatatgcttcaaagtaattaagtcacgagatttatcagttcacaaaatttacattggcgtgatcattgacgaagtggtttacttacaattagacaattgaaatatattttccaagacattggtaaagtaaatttacattgaatgtatatagtttacattgggcatgatcgatattgacagtggaaagatattacaaacttactgttctatttgttctcagtcaatatcacttagttgatcttaagatctgttgacaatgaaaactcgtcaactaacttaagccagaaaattgaaactcaaacacagtacttaaaatgaagatgaaaacgtgaaaatacaaaaacttaaacaaatattcagagcaacaataaaggaagataaatgcttgtatttcttggagtaagtgttgcagtgattttccaagccctctcacatttgagaatgggatattatggcctggggtacaattgtggtcccaagggacaagatgacatccatgactgctggttgcaaatggtggtcttgcaccttgtaactttgtttggtgcaagggggtcccgagttccaagggtagtggatgtgtgaacccttggtcgatgttaggactttcatgtgttgtgcttccactactcatgccttttgggaaatagaatttgcaggaggtgtggttgtactctctttgcatgcacgcgtcatctttgtatcatgcctcgtccttgtaatcataccttcgctgcattattccacaacacttgggaaaacttcaccaagcataattgtgtaatcaagaagagcatttccaagtgacatgcatgaaagtcatggttgagtgacttgcatgctatcttggccgagtgacttgcatggtgcaaggctgagtgacttgcatgatgcatggttgagtgacctgcatgatgcatagttgagtgacttgcaagttgcatggtcgagtgacttgcaagcttcatggtcgagtgacttgcaagcttcattgccgagtgacttgcaagctttatcgccgagtaaattgcaagcttagtgcatggtagagtgatttgcaagatgcatgatcgagtgacttgcaagcttcatgattgagtgacttgcacgcttcatggccgagtgacttgcaagctttatggccgagtaacttgcaagcttggtgcatggtagagtgacttgcaagatgcatgatcgagtgacttgcaagcttcatgactgagtcacttgcacgcttcatggtcaaatgacttgcaagtttcatggccgagtgacttgcaagcttcatagctaggtgacttgcaaactgtgtggccaagtgacttgcaagcttcatggtcgagtgacttgtaagccttgtgcatggtcgagtgacttgcaagttgcatggctgagtgacttgcaaacttcatgggagagtgaccttgaagcttcatggtcgagtgaattacaagcttcatggttgagtgacttgcaagctacatggtcgagtgactccttcttgtgcttgtcgagtgacacgcacttaagcatgcttggaagagtgactcctccatgtgcatgtcgagtgacatgcacttgaccatgtcgagtgacatgctcttgtgcatgtcgagtgacaaacacttgagcatgcttggccgagtaaatcctccttgtgcatgtcgagtgacatgtacttgagaatgcttagccaagtgactcctccctgtgcatgccaagtgacattcacttgagcatgccaagtgacatgcactttagcataccgagtgacatgctcttatacatgctgagtgacatgaacttgagcatgcttgactgagtgactcctccctgtacatgaagaataacttttgagcgtttagagaagaaaataggactatgcatccaaagcaactctttgtgcatgtcctcgttaatctctcaattagtagtcgactaatctcgagtgttagccttctaatttttaggattacacttgcccctagtctataagaattcttttaagtgttcttgtagactaagtttgataagccttactcccatctttcggttctgtgactgcccctttaggcggttattccttgaggtcttttttttgtgatcttttgtgggggagccttgtctctattacttttcatggtgatggcttgtcccgtgcagggagtgctagcctcttgagctttttcaaactcttgtgtgagctattaatttgtttaagggagctttttgcaacctgggctttctcaacctccttttggtgtaaccttatcatggatataagggagcttgtggcccttaggcagcgctaggcggtgctcaaccttttttaagatttaatattttattgagggagcttgtggcctttaggtagcactcgaccgcttacattgcatctgtggcacttgacgtgcgttttgaatgctagaagatcggtacttcttggatataagagactttgtggcccttaggagtcactcaacccattttaagatttaagattttattgagggagcttgtggcccttaggcggcgctcggcccttacattgcactcgtggcaatttacagtgcattttgaatgctagaaagataagtactccttttagagaggcgtgactcttagagtcgtatctgattcctcttttcttttccttttttttacattgcttcgttcactttgctaatctcgattgacaagtatagtaagtaagtcaagcaggcatgtggagagtgatgaacgccgtatgtgaggtgaaaactaaacatttcattgataaagataacacatgattgcccgaatacataagctatttttggaggtcaaccttggttccctctttaattcaatacaatgtaaacttgtatttgctaggaacattttcccatatagtggaactcactttgaggaacatcttggatatctaattcttacagattgaagagcgaaggcttcacgtgaatgtaccggcttacgagtgttaggggcatcttctaatagatcttttaggaatctgacgagcttcccagaaaacactcatgggtatccatttccaagactttgtttccttcctccacatggatctacttctctgctctctcatagaagtcttctatgccaactcattcccttttcagcatattcccacatagtccactttggtgactttggcattaaagcgctagatgtagctttgcaagttttcttgttctcattgctctacattagcgatacttattatgggcataacgtaatcacaagcttcctaatgttgtacaagtaattcttccaaaaactgcttccaagatgtgattgttcctgatcctaaccccttgaaccacttatactcaactcctttgagtgtgatcatgaagcattatcaccttgccttgcatgacactttttcatctccattagctcattaaaagctcctagatggtactttggatcagttgtaccatcaaattgcatcatgcgcacaactccttgaaattaggtggaagtggtttaacttgaatctcccttaaaaaaggggattctttatcaaaatgatgaatcatcatctgaattttgccttgatgcgatagctatctttctaggtaggtcttgtatctctgcttttaactccttcattcttttgttcatcctttcacaggagttattgagtggggctcaagttttccttgcagtgtgcacagggcttgtgagtggtactcctcttgtctcttcattgtatggcttcccatcatggttgaaggataacacttttcgtttgctttgctctttaaaggggggcataggcacggtgccccccagcgttagactttatgggggaaatatcttcgtgaaatgaatagatatttccctcattgtaaccttactgcgatgagtaggctcaattttccttgaatgacctaaagggctcttctctcgcaatgagccctttctgttaccatcctttggggtgatttttgttgatgacatggagttctctctccaacatgtgcagttgggatcccctttccttactgatggtttttatacataaagtgtgaggcttggatttcgcctttgcatatgttgctcagcaccttttgcatatcggccaccgtagtttctaaaattttgttctcccagcagagatcatttatctcatcttaatagtggcaagtttgggatcttaagctcacaaagtacgctcacttctattttctagagaggtgtagtgaagtaccaagatctcgcggtgatggaggtggaggatgttttattggtgatgggactctttgcctttgtgacctatttttacaaacatctgctatggatgcggtcaccctatcttagcgcttatccactagattttctttatgacgatcatctccctctcttgcgggggatactgggctattctggccaacttcttcaaccatggacgtgggtggctctcttttggaagtgatcaactgagtgttatttaggttaacctcgacgtcttgtagatggtgtgagcgtctaggaatcttacaacaatgctaagtaaggaaacaatgaagcttgaacttgtcgtttccacaaacggcaccaaactgttgacagtgaaaactggtcaactaactaaaggccaaaactcgaaactcaaacacaagacttagaatgaagatgaaaatatgaaaatataaaaaattaaagtaatgttcagaacaataatggaggaagagaaatgcttgtatttcttggagagtgttacagtgattttccaatcccctctcacatttaagaatggggtatttataggctctaatggcatggggtacaatggtggttccaaggaataagataacatccatgagttgtaggttgcaagtggcgatcttacgcattgtaactttgtgtggtgcaaggtggtcccaagttaaaggggtagtagatgtgtgcacccttagtctggatgttaggacttgcatgagttgtgccttcactacttgtaccctctaggcaagagaacctgcaggaggtgtggtttcactctctttgcatgcatgcctcatcctttgtatcatgcttcatccttgcaatcgtacctttaatacattttccccaaaaaattaggcattttataccctaaataaaacccatttcaatataatcttttttgttatcaattgaagattagaaatcatttaagttaacatgtgattttcatgattatggtttaatataaaatttttaataaatccagaatatatagttattcataattacaaggatgtcatcacagtggaaggtaattgtgactatatgcttcaaagtttacgtctcatgatttaaatacactagattcacactgatgtaataatcagcgataaagtttacttataccttggataagtgttatgtcctttccagggcattgataaagtatggtagtattggatgtatggagtatacatcgaattagattgatattgaacttggtaaagatatcataaacttacagttgtatctttctaagtcaatatcacttagttaatgttagatcaaaagatcttaatcctgatatggttcggtttaatctcaactgtgttatttatgttcctagagtttttcgttaaagttgaccaattggatcggcccaatacttacatcttgggaacatggtagtacaattaagtgggagcgctaatcatagatatggaatctatggcttctatctagacatagaagttgttgccttaaatagtgatcaactgatagcggggtgttatatatccgatgcttgtcacgtgttacacaaatagaataaaagagtataaaacacacagatttgttatagaagttgagcccccttgtgatagcgggtaatnnnnnnntccccttttggttgtattaatacctaaagataatactacatagatcagtatgggtgggatctgatatagctctctataaggttacaaagcatgaattagtaggcaaatctttaatgggagactgatattgccttagaggcatgtgagagagataaagagaagaagccctcttgggcatgtagcagagagagagagacaaaggtttctgacttagagtgatttggaggcttaatgacttaggtttctaggccagggttaaggcctttatataagaggcctaaaccctagattacagtttgaaaccctagatattttcatagtttgtttgataattataaaagactaaatttcccttgaatctagatattttccatcactttgaaagggcccaatttgtaggtagcttgctatccatattttgggttatgcatagaatcctgccaggttaatcctggctgcccataaacctattggggaggtctggccgcccaaggcctgcaggatgaggtctagccgcccaaggcctgcatgatgaggtctggccacccaaggcttgcaggacctgacaggtcactatagctccacaaagaggaggccaacctttggatgtggaggctagcctttttcaagttgaagacaactttgaacactatttccttctagaggccaggtttcatttggtcgaacagaagctcccttggatggaagtcacttcttggccggctagctagtgcacaaatcatggctagcctataggcttctcttggcggtccaaggatgttggtacagctctttgagggctcgcttcactctattcaattattgcttgacgattttgcgatatcttgcatggagaccatgttttgctattggcaggattatgctccacctgtactctatctttggcttatgtggacatgccacgtcaggtggacaaaatttgggataacattttccccccaagttcctattcgaaaatctggtcagatagggactttctagctctcgtcttgtttgtattagtctctgttgatcagccttgtctagctaagtgttagctttttgcctggcatgcttttggatttttgatcttctctctctataaacgtctcatcttctcttcttgggtatctcttttttgtacctgccattaacaagtttcaagctttttaagcttttggaaacttttttattctcatcttagtttgcaatctctttggtataatgatcctcatgatagttttacaatgtttaatgtgcgaatttttgataaaaaaatatttgatttcccccttcgctatgatttttgactctttgagtcataggaatacaaggcacatatttgagttttgaaagaaaaacacacattaggcttcaaaacttaccttggccgacatgggaggtctttcttgagacctggccggccctaaggcttgatcatgggagttggctagctttaggattttaccctataaagctagtttgttcatgcttgggtttgggaccctagccgaacctttcaaggcttgagaaccctggtcagcagggtcttggttccaagtggtagccagttttctgtcctcttttgacattggcaagaatctggctctgtaggcttatacacccttagtctcatatgtggtttccttggaaactctatatgaaactcaatggtgagcctattatagttgaatattcaacttaagacttaacatggcttagaacctataaggaactctaccttagtcatagcttggtatgtggcctctataggagctctatctgggtctttttctggctatatatggttcttgcatggcctttgcctcatgcatgtgaactgatttaatatctggctttaaggctttcatgttcttgctttggcctataggccctctattttttaacactactattatctagccttaatgtgatctatgacgaacatatgatcgtcctacctttcttcttatagccttgatatgtaagggtccagatttactttgtcaagccaaagtatgcctgcacgacttacaggcaggtttagtagattattctaagcattaaaatttctctgcataaattctttgtgctagtttgatgcattgtacggtatgggtgccccccaagcgaccatgcaagcatgtctcttcgtcacttgctattcaccaagtttcacaaacttggcatgggttcttccttagggtgctatccatagtacgcatgtggaactaaaagagtaactttaagaagttaatcttctaagcaagtagtttagacacagtcggtcttatgtgtaacaaaagcttagagcttagtgtttgcttttgaaataacatagtggctacccctacacggcttagcaaagtagagcccccgttgaagaacggtgggagaccaggcctagaaggttgtgggtactagcgcttttatgggttcatgcacgatgaaatgttagaggaacttaattgacaagttggctagtgagagtacttaccgagatgtttcctattttagtgtttgggtaaaagttctgacttgaagttctcgtcatactcaccagacttgtatgcacctttatttttatcttataacatggtgcaaaccttctcagtttggttcgaacatgcttactataaggatctttgttgtcaaggaatattcttcagggagtaattctcttgtgaagtatttctttcctcgatctatttgttgatcggccaggtaactctttataggtagccattctgctctgagttggcttggtctcttcttctttcccttttgtcaatcgatcctgttagcaggatgttgtgtacctcttagtcactgaagaccagaagtatgagagcagaatgttggtggatcgggttagctagggcaagaccaggcgtccagccacattaagagagcattgcctcggttgttggatgaggacatggcttaccagcatctgaaggtaatggtcggccagattgtggattctacggtcgaccagcttgttgaggacatagtgtgtgagccttctaaaggcccaatgtaacgtccccgcttcaagcctcca

SEQ ID NO: 15930 - DNA, 6221 bp, Cannabis sativa
  modified_base (3941)..(3943): a, c, t, g, unknown or other
ttgtattctcttcttctcttttctataactaatcttgttaactaactaattctatttacaatagaacttctggttgcatttgtactctctctcttgctataactaaagtgttttttctctaattgaggcaagttttactaatcatttgtactctctctcttgctataactaaagtgttttttctctaattgaggcaagttttactaagcatttattgcatttgtattctctttttctctaaagtgttcccactgtagactaggttgtagacatcttcaccaaatgccttcccaaagaatgattcaagtatctcaaagacaaactaaaagtggtgtctgccccttttcgtttgaggggggatgataaccaaaagttagtaattagtttttgtgtttagttagttcggttagctaatcttgttagctaactaattctatttacaatagaatttttggttacatttgtactctctctcttgctataactaaagtgttttttctctaattgaggcaagttttactaagcatttattgtattctcttcttctcttttctcccctgttttaactttttcatttcatataagaaaattttacttaataggatataattttataaaaatttagaatactaatactaattattagactagagtgtgatttaatacacattttaaaatataattatgctaatgtttaattgtgaattttttttcaaactatagtgtgagcttattttatttattgagaaaaatagaattttcattaatagataaagtagacatagttgattacatgcagagattgttcatcgagcatactcaacaaaaataggttaagcaagccgtttacattaaataggacaaaaactataacaacgtattaaactaaatgacctataagccgccagctgtgaagcataaaaaatatgaagaatactagatttttatcttgaatgaacatgtgacagatcacacctatcaataaaaattagctaaaaatcttccaataaaaattatgtaaaaataccccaattattcaactagaattatagagaataaatgaaaaaccatgttcaaaattcttgacattagctatcgatgaaccataaaacaaggtgtcaaaagacaccgaaaaagaaactagaataacttgttcaaccaaatccaaaaaggactagaagtcaaacatggatgtaaaaaaaatagtaaaatacacaccctcttaaacatagaaaaaggaaaataacaaaccaaagaagattgaaggaaaaaccaaacaccaccaccgatgattttaggacaccgtcacaattatcaggaacagaccatccaccaacaccaaccccacaccagatctagtcgatctcgatcccaacaaccatgaaacagagcctcccaaaagtactaaagacgaatgacaccgatccttatttagaatccatcttcaaacaccctaacaataaccccccaccacaaccaaacccataaagataaaggatctgacaagccttggccataaaggaagaaaactaccactgatggcaactgactcaaaccctagggtcttaaaaccctagggagaaaataaatatgcaattctttttaagtatgagtttattaattttggtcattgttatgtttgatatgattaactctaaccatggttacattttttgtgactattcaatggtcacattaaaaatataattatgatatttataaattatatttttgacttattataacaagttactaataagtaaaaaattttatttttaaacttaaattaattataaacttaaaataaattgattttttgattaaaatatttaataaggtatttttactaattaacatttataaatatattattatttttttatttatataaaaaaaaataaaagcatgttactatcatttacaggtagtttattaattatttttaattaatcacaaacgttttattttattgatccaacaacaaaaattaaatacaagcatagtaattatatattaaacataaccattaaaacatatttcatgtgtatgaaataaactcaagcaatataaatataataggataggataatgcttaagtagagtcacacaaaacatctttacatacagacattttttttttcattatatgtcaaactattattttatactaataattaattaattccttttatatttttttttttgaataatttagtgactcctaataaggaaagttgctaatatttatcgaaagtcatattaatagagtcatacgaactgtgataaaaaaattagtattatttgattaattaattgtacaatcaaatatatttaaaactttagtttaatatgtccaatgtgttcataatatttaatctctaagtttcattatatatcaaaacaaaaatattgcagaagtgtttcaataaaaaaaaaaaaaaaaattgcatgtaaaacaccttatttaaagattttttagtaaatgaggtttaaggatccacaatattgaatattaactaactttccttattaggggtcactaaattattaaaaaaaataaaaataatataaaaggaattaattaattattagtattaaataatagagtgacacataatgaaaaaaaaaatatctgtatgtacagatattttttatgactcacgtattttcctctaatataatatatataaagaaagataaattatatatgttttttttttttttttaaaaaaaagttaaattatatcactcattataatttaaaaattaagatgaagttatgttcactacgcaagttttcgtgaagaataccaaaacaataaatgctagtcaaatttcttgagcttgtgtcaaattgaaaaggaaaaatagaatataaactagaaaatgtcacttgttattacaactaggtagtaagcacatgaactataacttttacgagaagagctatcacatttctttaaataatttaatgaaagagcttcataggacaggagggatccaacttctcgaattttgtatattatagggagtaaagggaaatgttatctttttccccacactataagagctgtctatattttcggtatttggagatattataatttaatttttatcttacgatagtatacatagtataactataattataatgtataatcatataagaaaatttaaattataatttctccaattaataataatagacgcagtagagaaaaaaagtagtacccttatttgtaatttttttttcatatatagactcattcatgtgtagaaactatacgtagacgcatctgtaacgatattccgcaggccacctattgtggaagccaacattatgaaaactcctatggatattgaagcctgaaaaataatattccaattaaaatatgtatatatttatacatctacttttaggatggtatttctgtttcatattggaaaaaaaaaaaaaagtatgattattacccaattgatgaaccacttggcactgaatctcttaggtttctttattatcaaccacataacgcaaggcagctgcaatcaattaagtattaataaaaaaaaaatgtagatttataataattagctatgttaaaaacatctaaaattcgtgtaagaaaattaataattaaatacttacaaaaaaagaagtgggagcaaaaccaaatccaccaaagaaaccaagaaggtctccaaagaaaggaaaactgactccaacgaataatgtaaatgctgcaatatagttttaattaagaaataatatttagtatcaaaattaacccaataaactcttgttcattgtataatttggtgaactaaatttttaattgacctatatatcattatagagccaccaccatctaaatttgtgtgtttttaattaaaaaagaaaaatcgtgtgcctatattacataatatttaatatatatatatannnatatatatttatatatattctcaccaacatatgttgttcgagcaaccaatctaagtaaaattcctggtgggaagttcaattttttcatcagcatcctctccagcaagtcgaacacaggcatagcaaaaacctataaatatatatgtatatattaaataaaaaaaaatagcttatattgaccatatatacacaaacaatacataaaaacattctattgtgattatttgtgagtgtttttcccatatacacaaacaatacataaaaaattctatcgtgattatttgtgagtgttttctctatttaaaatttcactaatgaattaataatctaaaaccaattttgatagatcagtctagttgagaaatgctaaatagtatgtgcatgttgagtattatgttgttccatctcaaaattaattggttataagtggagtagtccatgttcttatatatggctcaattctctactatttattttacatgggacaatatccagatatccacaatagtccactaccctatgtcattattagtgcaataaaaatgtatcatgtgtcttaacatttaaatttgaattaatttaagttgaaatatgttgaacctaatcgcacacatatgtcatgtctaagtggcttatagctatacgctttagtaaatagttagagaagtactattagtcaacttctaaacttaaaattatggaaaaaaaaaatttcaaattttttttataagaatattagttatagttataatataatttatgtaaaatttttaaaaatttcgaatagtttaaagtattgaaaataaacttcttaatattttagtttaatatatgcatatttaaaaaaatttaaatgtattttcggtactataaattatttaattttttaaaaaatttatatgtaatgttgtaaatataaagaacagtgccaaacaaaaaatatatatatattttaaaagataaaaagtttaataagtggttggaacaggtaacactcctctaatagttatactgtcaattttatatttttgaagggtctcatgatagtccaataattaaaaaatttcttctctgcactgtagcaggtaggatttccaaaagagacaaatatcattattggtcaaaacatgcatctattctatgatcaaaaacaagtcaaaaggcttacttgaaaataacaaaagtaaagattaaaaaaaatacatatgctgctcatcccttccacagtcctacacgtggatagtgagctggaggatgaatagcagatttcttagtcttttgttaataatgaattgtgtaattaatggtacctggtaactgccgatgacatgaacaacaaccatcaaatttgcagtggcgatgagccatgcgggcttttcaagatcgataagaacattatcatcaacatcttggccaaatgcccagtaaccgatcattgccactgggaagtaacagatggcgttgatgaaataggcccacaccacccctttccacatcggaaccttagacggcttttctggggtcgacggaatagtggcttgaatctccagggccacagcatggcctgcgaacgcaaacgcgaattggcccaaagcgttaaaggaatctgaacatgttgtcagctgggcccgtgtttttgtatgcgtagctcacgttctcaatttgccctttctttaagcaccctgcccatgctattgttgaatagctgcatacatatgtaaattagtagcttagctatgcttgaaaatttttgcatcaacttaaatcattttctcacagaaaaataaaatttaccttaatgacatgacagcagctgctaaagaaacaccagcgacggaattgaaatttggaagttgtgaaaggaagaaatggatgccaccgaaaatcaaaatccagtaagactgacggagccttgtgcagttagtacaagccatctccaagaactgtttgagacactttccaccagtcaccatatacactatgtcacacccaacctgtacgatcagctgctgagggagcacgatccacggcccaagtttcggcccaaatgcatgtctccctaaatccacgtaacggtcaaagcgagtccccggaacgcattcatggagttgtatcatctgccacatcgtgttcaaggtcaggcaccagcataacaccaatgccaggattcctggacccctgaaaattatgagtacgtttcgtaagtttaaataactatacatacaaattttaaaactaatatgtatattatacaataccatcctaagtaggccatggc

SEQ ID NO: 15931 - DNA, 9389 bp, Cannabis sativa
cactctttccctacacgacgctcttccgatctaaaaccaatgaacaggcattaagagaacttgataatgtcgaggacttgtacccaaatcttattgatacaaaaaccactaaagagtccaaagaaactcaggtttgctttatttgtgaattttagcccaacataaggtacatagctacacgtttgatcttctaaatgtaccaaacatcttgtttcctatattgcttttaggtaactactgaagtggagacagcacctccaagtatggaaagaaatgaacaaatcttatacgatcagagaactacagaactctcttcttcatcactattagaagaaaaagaagtgcttgaggaaagctcaaagaatatcgacaaggtactgatgcatttgaaagtcctttctattacttgatttaattttttttttattattatttttgtctactaacaattttccataatacagggagaagacatgtgccttgcactcaaagaacagaatgaagtgacagatttggtagaggatgtaaaagctaaaatcttagaggacagtgcaacgccaacggaagaaaaagttgcaggagaaaactcccaggagacaaaacctgttgtacatggatttgactctatctcaactgaaattctaaacgacaaaacaagcttgagggaagtaaagccagataacgaagacaaggaggtcataaatcatgacaatgtcattgaagaggagaggttggaaaacaatgtagatgttgaatcacaagcagtttctatattgccagaaattttgcatgaagaagcaaaaccagatatcgagaagcacgtcattggttacaatgatgttcctgaagaggaaaacaatatagaaaccaatgtgcaatctgattctgtatcttttggaacagtgagtggagaaacaagcttgaaggaaggtctggatgatgatgaagaagaagccaaaagttattatattgctcactcaactacaactgcgagagaagaaacaagcctgcaggaagttaggcttgataatagtgagcaagtaaaaggctgtgaaacggctccagatgagaataatcaacccaataatgttgatccaaatgtgcaagatgactctatttcaaataaaattatgaatgtagaagcaagtatgaatgaaggtgaacccaatatggaagaggatgttgaaagctttgatattgctcctgaagacaacgaattgataactattgttactagtggagtacaatctatatctgatatagagagtgaagattcatgcttgaaggaagtcacacaagagcaagaaggacatgtcaacggttccagcgttgctcttcaagagaaaattctgcccagaaatgtcaatctaggtgtacaagatgactttgtttcaactaaaattgtgaatgaaagaacaagcttgaaagaagacgaagtcaatatggaagaggatgtcaaaagctttaacattgctcctgaagagaagtctccggtgatcgttgatactagcgaagtgcaatatgtctctgtctcagctgaaatagagagtgaagatccttacttgaaggaatcctcacaagagcatgaagagcaggtcaaaggttccactgctattcttgaagagaatagtccacccatcaatgtttatctatgtgtacaagatgactctatttcaaataaaattgggagtcaagaaacaagtttgaaggaagacgaacccaatatggaagaggatgtcaaaagctttgatattgcttctgaagagaagtgtttggtaactgatgttgctagtgaagtacaaactttctttgtctcaattgatacagatagtggttctttcttgaaggaaaccatacaagaaaaggaagagcaactcaatgattctaagaatgctcttgaagagaacagtccaaccaccaatgtcgatttagatgtacaagatgactttgttgcaactgaaattgtgaaagaaggaacaagcttgaaggaagacaaacccatcatggaaaaagatgtcaaaaactttgatatttctcctgaagagaagtgcttggtaactactgttactagtgaagaacactctgtcgttgtctcagctgaaatagagagtgaagattctcatttgaagaaagtcatacaagaacatggagatcaggtcaattgctccaacgctgctcttgaagagaatagtccacctagcaatggagttgaaccaaataaagaagaacatggtattactcttgaagagaagagcttggcaagcaatatagatattgaagtacaatcagattctccctcaccagaaatcttgaatgaagaaaaaaaattgaaagaagaacttgataacaaggaggacagaacttataatgatgtccctacagagaagggattggacaacatagaaattggtgtgatatctgacattgcaaatagtgttgcatgtttggaagttgaagttgttcagaaccttgaagaaacctcaaaggaagaaaagaaagaagaagagacaaagaatctgaatagtacaactgatccagaaaaaaacgaggtatgcttataatataagtgtaatatatcagttttaactttttatgggaagcaaatgaaacttattatgaattatgcacctgcatttttcaaaagtaaatattgtttgagaccatctacatcataagtttttttgttacattttatgcaagtattttcatacatactacaaatgaaaatataaataattaaaagaaaaacggatctcaaaatatgtaaggatagttgcattaatttctttcctaattttctccaatctttggatataacatttgttgtgtcgaaaaataaaacaaataaaatgttaaggatcatgaaattcacatcaagcctagttccctttctaaaaaaactcaagattgattatctaatttgaaactcacttttggtagattgcagaagagttaaaaacagctagagcaagtgaaagtgttccatgcaacataaaagaggatgttgaaggatttgtcggtgcctcattagtgaatatagaagatcaaaaggcaattgataagaaactagatccagtggatgctttaaaggaggagaataaaagttgatgataattgctctaccaacttagtggaagtcgaagttgaaaacaatgttacagccatggaaagagatatgaaagtagcattaacaagtgaagaagataaagaagcagcacagaaagatgaagcaggagaaaagcttgataatttgctacatgttatgcatgaagaaagtgagacacaaccagcaaatgaagatgtcacaagtgttgcctgtacggaggtggaaggggtgattgaagaccttaaagaaacctcaaatttggaaaacagggaagatattgaagtgcaatctaactttgtctcggctggagttgaaagtgtggtagcttgctcgaaggaagtcaaacaagatcatgaaaagcatgtcaaaagttctactattgctagtgaagaaaaagatttgacagaaagtgtagacatcgacttacaacatgattttgtttcaactgaaattgtgaatgtagaaacaagtgtgaaagaatatgaactaggggataaagaactagtcaaaactactgatattattcctgaaaatgagggttcaataagcaatgtagatgttgatgttgtctcaggtagaaatgagagtggaaaaaatttcttcgatgaaaacaaagcaaggaacgaagaaaacatcaaaacttttggtgtaaacgaaggtttgggaactgaagaaacgagattgaaggaagttgatcaagatgacgaagttgatcaaaatgacaaggggcaggtaaacaattttgatgttgctcctgaagagaagggtgtggcaagcaatgttggtggcgatgtacagaataaggaaaattcggatttagaagacatcaaagagaagatcccaacaataacaagtgaatgtgtacaaaatatagaaaaagaagtgaaagaaatcactccttttgagaaacttcttgatggcttgtcgaaggataaccttcaagattcttctacagtcttgtcaaaagaaactgagcccatgataactgaagcaaatgagacaccagaggaaacaactacagataaaaccgaatgtgaaattgcaaagctgtcaattactgcaccagcccgagaagatgggttcttgcaaaaggaagttgaccgtacattggagccttgtgatactgagcaggaagttgcaaatgaagacagtcaaatgcaaatggaccgagagctggatattacctcggagattaccagtgacaaaatcaatactacatcagaagatgtagtaatcgcaaaaagggaagtcattaaggacctagaatctctgcaagaaaaagagcaatcagtaaagattttcaatgtgaaagagactggtgattcctctgaaagcagcttgaatacagaaggggtacatacattattggacttggaagcaaataacacaaagactgatgaacttcctagaaaccaggttagtcgcaacaatattacattcttgtaataaacattttaattaaaatgatcatttttctgattcattgtttccaactcatattacaaaaaaaactagagtagtcatatgctatttattgtaatttcatctcctgtaaaagctatagccaatattgttctctactctcttactaatttatcagcatggatccagaatcttgaaccaggtgacctgaatgagatgctctcatatacatctgaatcaattcacaaagatcaagttgaagaaacacttcctttgacaaagaagagtgaagtattgggagaaaacactgaagacacaaaggagataagcaggaaattagagcccacattgatggttgatgataatgtcaatgaaacacaaagcacagaagagatcatcacaactaaggtaaatttttatcttattaaaagtttaagcacctcctgaagtttccatttgttttaacattctacatttgataaaaaggtgcatgagggaatttataaagctaataaaactgacaatacaaaagaagaaatcattgatggaaagagcaacctggaagaatttcatccagaacccaatgacgatgaaaaaatctttaaggtcagctaaaatcaacatgaaaaacgtacttatatttttgtgctttgtttaactacatgtttgtaattaaatattaatttatatgaccattttattgattcaatgttttccaacttctattacaaagaagttaatgtggttatatgatattcatgtaatttgatctcctgtaaaagctatagccagtatttttctattcacttgctaatttatcagcatggattcagaatcttgaaccaggtgatctggatgagatgcttttatactcatctgaatcacttcacaaagatcaaattgaagaaacacttactttgacaaagaagagtgaaacattgggagaacattctgaacacacaaaggagataagcagggaagtagagcccacattgatggttgacaattatgtcggtgaaacacaaagcacagataagatcatcacaactgaggtatgtatttaccttaagaaaagtttaagtgtctcctgaagtgtccctttgttttaacactttatacttgataaaaaggtgcatgagggaattgataaagatatcaaaagtgaaaagacaaaggaacaaatcattgatggaaagagcgacctgcgagaatttcatctagagtccaatgaagatgaaagagtctttaaggtcagctactatcatcatgaaaaacgtacttatttttgtgctttgcttaacttagctacttcttgaaagttaactatattaaccagaatcttactaaacaggagacatgctctgacccaataatcactgaatttctcaaagctacagactccaaaaagaatacatcaagtgtggattcgcacacagaagaaaacactaccaagaaagatgaaacacttgtcacaaacccacctgacgaagaaagcataaacagacaaacctgcattgcattacctgaagaaaagattgaagaggaaatcaaagaggaagttggtaatggtttggacaagagtgacactttaactgtcaaaaagccaatggaaatgacaagtatggaggaagctcaacaagttgatgggccggcaaacgcatttgataatgaaccagaagaaaggaatctagagtttcccaaatctgagtgctctataccagacaaagtggaaaccatgaaacttgaagaaaggtcctacgacttggagtctcagcattcaaaacaaaaagacatggagatagaggatattgtggaggagaatttgaatgtaaatgatgttgaagaagccaaactatacgctgccattggagatgtagatacaattaagccaatcctagaaggggaaaatctggacacggataaaattagagaagatgaaataaaaaatggtcagagtcttgaagaaggaatgccagaagagcaactgcaagcaccatcttctacattacttcctgagcaccaaaaacatgaaacagaaatagaaaccactatcaagacgaatgaagatgtaattacagaatctgacatgcaaagtagcgactctattgaggaagaaactcccttaacaaaaggagaacacagtgtgccagaaccccatgaggtggctgaggaaaggctaagaacagatgaaagtaaagaagatatcaaagcagctcctgaaacattgcccgagtataataatcaagaaagcactcgagcagttgaagaagatgaagtcacatgccaaatttcaacagaacaagttgaagaagtgttgtcatctgcattacttacagaagagcctgaacctaaagctactgaagcagtcaagaagacagaacaagatagcacgagggagctggaaattcttgacaatgaggtaaacgagttgttggcaaaagatggaggagaagagacatacttgaagaaagagcttgaggatttcaaagttgaagaagaaattgtaaaaactccaagtacagtgttaactggagatgaaagcattaccaaccgagccatctctgatgtgatatcaaatgatcaagttcaaataccactgtccgaggagcaagagaatgatactacaaccacattcaaggatgcagatgaagaggacaaaaaagcattgaatattctagacagtgaggatataaaagactctcgtgctctagaaacaggtgaagtgacatgcttgcaggagaagcccagggagatcaaaatcgtggatgtgatgggttctgatgaaactgaagataaaaacaaaggtgcatctcaaatagtgcatgaaactaatttgaagagtactgaagctgaaccggaggaaaaaataatcaaatgctctgaagaaatagcggaagtggagcttgtacaagaagaaagcacaacagtggtggaagtgatcacaaaggaagatgaagagaagtgttcccaaaaggagaccagagagcttttagtctctgtttcaacagtggaagaaatcacagaatctattgagagagagtcgaaagaagattctccaaacagggaagttattaacagagagatatccaacgaccaacctctcccagttgacaaagatgaactcatcactgaccaggctggccctgctggtatatcaacggagcagcttcagaaatcatcttcttctactttgattcccaacgaacacaagcatgaggctgtggcaatagtcaccaatattgaagaagatgaagaggtgttgaaagattatggagttgaaaagactgttgaagagatatgctttgacaaggaacagcctaagaagattcaagtctctgaatctgagtcttggattcatgctggtgacgacatacagggaagtttaaatgaagagactaagaaagaaagcgagacccacaaggaagtgccgaaaacagagccacgagaaactgaagaagagaagggaaatgcagaaccaataagggcagccatggaagctcccactctcgatattggtgaacgtgagatagcttccgacttcatctctgaaggaacacagagccatgaatcgctcaccactattgaaaatgttgaaatctttgaaaatcatctcgagttagcaacaaccgatttgaccaatgaagagtatcaacgtgagacactatcaaaggtgattttagacaaagaggttagtgacagaaactccttttcttttctttatttttttcttgctcaaacacgttgttagttaaaatagtttaacgattaatctcatatgcaggcactaacaagtatagaactttcacacaagaaagagagcctcatcgttgaagaagcccaaagcacacatgaaacatgcaaagaccaaacttcaaaggaagcagacaacgcagagatcagagcagcaaaaatcacaaccagcgataaggattctccaccaattcttccagagttagttgaagaaacttcacagagagcggaatcaaaagacataaaaaccagaaacgaaacgtgggctggtgatagagaaatcaaagatgagcaatgtggaaaagaaaaagaagcagtggtttcgctatctgaactcatacaaagctcaacagaagaaaatacccaagtggtcgaacaattatccaaagaaaaggagccaaaaaacagcaaagaggtagaacacagtcaaatccatgaagaagatgatgaagaagaggaggaagaacatgaagatgaagaccacccagatgcaccaatcctagtacatgcctcaaaagacattgatgccaaagctgcacgcaagaaatctcaaggaatattttcaggggttgggtcaaaggtgaaacactctatctccaaggtcaagaaagtcattactggcaagtcttcccattccaccaccaccaccaccaaaacacaacccagcagcagttagaaagctcagtttgggttcccaaaaatatttattattttcgtacatatatgggtgattcacaattgtttgattaatgctttgaataaggtgaaagagggttgattgtgttttttttattattattgagtgagagtgtggtttaccagttttgcagcttgattttgagttttgttattttgtacaaaaacatctgaaatgttatatggagtttgcttaaaatacctcggatatattttttttgaaagggaactaataatatatcatatccttcttcaacaatccaaatatttacaaagttagttgttctgtaaacattcctagtggatacaagaatacccaataaagcttactaaactatattactacttgagagtgtgagtaatgctacagagaaagtcccaataataattaagcatgtgatcagcaggtttaacc

SEQ ID NO: 15932 - DNA, 21002 bp, Cannabis sativa
gacatttgcaaaaacacggtttttcaactttaaatttccaagcttaattgaaaaaacatccttcccatttcgaaaccaataaataaatgaaaatttctaattaatgaatgtatattctaaaaaaaggatcatatgttttatctcacatctttatctgaaatagtaattgattaaaaatgtaataacataataatcaaattttagtttaatatttaaaaatgtagaaatattaaattaaagacctctctgtcattttgattttatattgaattaattgaggtatataaaatgagaaaactaatcacaaaaattcactatcatataaaatatataatcaactaataacaattaaataaaaaagaaaaataaaagaagataaaggaaaaatagagcccaataataaatgtatatatagttggtttagtcacattttctcatttgtatgaagtttgaattttgtgttgtgtttattttaatagtagcatagttgtagaatgacaagaaacttgaggaactatattaagatgttgccttaaagcagagtaatattttgacatactatgtaacaatatgatataattagaaaaaaaaaatatttatatattgatgaaatatgcttcatctaaacaaaattattacagttctattataaggaagaatttaacatatacttgtttggatattacatctatttgtaaagaattaaatacatgcatttacataatattttttcttaatattgtatgataaccttagccttgctgtggtgtaactttgttacaataatcctcacaagctttttcacatgcagaaatagttacttgctctctaaggcacacaggcatgcactctttagcacattgagaaagagattcacttatttggaaagataccccaatgagtagcaccatcatgatcaaaaaggctagagtgttgatccttttgctagtcatatttataaaatacttattttatttcttcttaaattctttggtcttgatgttgtagttggtattggaaagattgatttagtttatacatgaagaagagagatttttatatatgatattagagttatttttagattattagttttgaaatataagatatatggatcacaactaattatttctcatggtgatcctcaatttttggaatattgatggatctaatatgttaattattgagattgtgcaaaaatagaatgaagagcaaatgttatatatctttattttaagaaaaaaagtttatttcttatctttaattttctttgatatatgtatgtattttcaagttatctacaataaaagcaaagaaatgatcatgctaaaaaattgagattaatgatgagaaaataatttatatatattagagattatttcacaaatacacaaaaataataaaaattataaaaatatgattttacagaattttaaatatttttaggacttttttattttatttataaaaaataaaatctttttatgttgtactcatgttaatttattgttaattttttgtgaacatcttaatatacaaataatttatttttatcaatattttagactctcacctaacctaaaccttggaacacagacctagaccccgacccaaaccctaacccagactcggcctcggatcccagcctcggacctgacttaaataaatcaacaaataaaaataaaaataaaatttatagaacacacttttattctttgttttgaaaattgaaaaataaaagtaattatcgaacacatttttgtttttcaaaaaataaattttatttttatttttatgattaaaaaatataaaaataaaagtgtttggcaagagggagaggagagatagaaagagacattctccctccaaactttcaaaatttaatcacttcaaatttaaaaggatagtaaaaaaagacaaaatatattttacaaaatacaataactacccttaaaaaaataataaaattttatttttgaaaaaacaattttataattttactaatcaattttttctctattattctcacctcacacctataccaaaaaataaaaaggagactaacaatcatctccatccctcttattccctatcctctctaacctctccatccatcctactgaactcttacataaccttaatcacctaaacttattaaaccatattattaactatgaaaaaaaaaccaagaaacttttgcagcattagtgaccgtgtaatttaatttgttgcattttaatgcctatgcaaaaaatgttacccttttagtgaagatgttggctgtattgagtacaagtgacaacaccagattagtgcaaattaactttaatttatgtaatatttcataaatcatattaaacataattcagtttaacaaataacttgcagcaaatcctcctttcagaaataacttttctgtgtatatataaaatttctttaaatattgttctaaataatgactacactagtcagtcagctttacaagatttcttgccagctaaatcatctagagtcaaactcaatgtatcaacacttccctttctaacttcctccccgcgagcagcgagaaagtcctcaacctttcccggttctccaaaccacccaagatgatcagcaatcaggtggagattatcacatccgccacagcgtgccaccaccacgcctttctcgtatgaatcccggcaaaatgtcttgaccgaccttgtttcgcagaccttgcaagtgaatatcatggcgaggtcatgcctagctgatgttttcaaggtagatactgctgaatattttactgaagagctagaactgttactttctattagggaaggagcacttcccaaatcgcagggcttcacattcatagaatcctgggctaccaaatcttcactagcaggtttgattggctcgttttgggtctgaattcctcttttattatatccatattgatagaaggaagttaaatgaggaacaaattgacaagatggatctgcaagcaataaattactcatttaaatggaactaaaaaaactgatgaaaaccgcatcaagcacagtttctttaattttaactaagttaaagcaaagcttgatcaacaatgtcattatgcataaaactgatgagcaggaccgtctaaagaaaataatggcagtcaagggtgaattagtctatagaaccacctttgaaatatgaaaagatgtcaaattttaaagcaacgggtcaatagtttcctccataatggtgttgataaccagttatccacaagtgtaaaatgaaaatatgcttggaaaatttatgtcctacaacaacaatgatacactttgatacactattgttccgtccaatattgaaagaattagaaaataggaatcttattgatatcacagaaaggattacacttcttccaggctttttgagtcacttggatatctccctgagtaaattttactctttaacaataaaaatcaattcctgatcttttaagattaatcagccccctatttagactctcccatccctactgttttaagctaatcccttaggactattaggacagctcacgtagaaacatttcgtttcaacactaaagaatttgaaaactcagcatctataatcctaatcaatcatatttgagactaatatcaaggcctaacaaacaagtttcatctaggcatagccaaagtgtcctacaagtttcatctgggcagccaaagtgtcctacaagtttcatctaggcatagccaaagggtcctacaagtttcatctgggcagccaaagtgtcctacaagtttcatctaggcatagccaaagtgtcctacaagttccatctgggaagccaaagtgtcctacaagtttcaacaatgaatatgaatagaattgatagggctctaataaactcaaccaatatctgaaattccacttctttattactcaagccaaaatcctagtccccaagtcagtcaataaagcatagatagcacgaacgctaattcgagatagccaagccactaacactaagaacactcactgatttagttgttcctagctgaacctgaacctatcagaatcctatgattatagaattattgaaccatttcttcactttatcttaaatattgaattaacttgaactaaattattaataagaaacaactgtacaacctgcctagggcaacaattcagttagaatcaaaatcaaagtcagcattaaatctcaactctcacttgggatataatccatgagagctgaacaatctaagtttaaagtgaaaaaaaccacagaatctccacatagctgttcaatgaaaatgctgtaccaaaacaatcatccacaaacataaacaaaaacgccacaaaactttacttgtgtttctatgagggagataaaggtctcattatcattaaaaagaattaattttttaggggttttcttcacgttctatactatttcatgtcgtccatatacatatgatccggatataataataaggacacgcatttcaaagggcgatgccagaaaaggaaaatttatcaggcacaaaattcttaatctagcattagaacaactattagaaaaaacaaacaaacagaaacatttccaacccacaaggaagaaagcataagaagctaacctttacgaaaatggggcgtaagcgaatagttagagcgtaagaatagacctattcctctctgcaaagcacgaatcgccatggccgatttggggctgtcgttaagaataaagtacgctgcttctgtcatacaaattaaaaccttgtatttgtacaacacgtgtttatttccaacactgacgacatgtcgttttggtttagaatggtgtagtagatttttgaatgggagtgcttcataaatacataaaaacaagattaatttgcggcgaaatagctctgttttaatttttatacacttaatttttttatattttaatttttatacatttattttttttattttttttggcaaaacctccttaaatttttttttttttttgtaaatttaaagtttagttaaatattatcgttaaatactaacattactattgtattgactttgaggttttactgttacgtatacataagtgtttaaatttgcaaaaaaaaaaaaataaacataaggagattttgcgaacaaaaaataggttaagtgtataaaaattaaaatataagagggttttgccataaaaaataataaaagagttatgtgtataaatattaaaacataagggggttttgctgtaaattgctctaaaaacaaatatagttgtatagaattttaaatatttttactttatattttaatgttgtatttttattattttatatattattttatgttgtttggatgttgtttttatgtgattttgctattattgtttttaaaagtgtaaaatatatatatttgaatgtaaaattgtaaaatttgtctaaatttaaaaaataattcggaaaattgtaaattttgtaagaaaaatagtaatttgtgtaaattttcaattgttttttttgttgaatcttcacaaagtggttattactttgtgggccggaccctttgggtgaagcccaatcctcatctctgagctatgctatgttcacatgaaattgggttcattacgtgttttgctatgcttcatttggtagctttaccagaaaaccatggcaacttcctgtgctacgtcgaccttctctcctctcctcaacaaattaactggcagaacctctatggctatggtgggtttactctcttatgctcccaaaaccctcactccgatatctccaaccagaaccttcaattttatatccctctccacgccaacgaaacctcttaaaaagtcatttcaaggtgatttcttttatgggtctgctcaagtttctattaagatttcagtttgatgctctttaagttttaaattttcaatttggttctctaaaagttccacatttggtatgttcgaagattactaaggagacaaaaatggttgagattggtagagataaaaggatattgattggtagagataacatattatataacataaaaatatatggatgaacacctttttagtaggataggaattgaatttcttgtggaccatttctttgatcagtgagagcagtggttgcacctacagaagcggtttctgagtttgatgagatggtttctgggaccaaaaggaagtactacatgttaggtgggaaaggaggagttggaaaaacaagttgtgctgcttcacttgctgttaaatttgcaaacagtggccatcctactctagtggtttccactgatccagctcattccttgagtgattcctttgctcaggtaggtttaaacattaattttgttgaaattactacttatagttctttcaactgattgaatgtactgatttttatacttggaaaattggtatctctgttatttttaactttaggatttgactgggggagcattagtaccagttgagggacctgattctccactttttgcacttgaggtatgtggagtttggttcttgtgagaaatgatgataatctccattgttctgatgattttttagttttatgtacttagtaacttaagtggatagttatgttgcagataaacccggagaaagctagggaagaatttcggactgcggctcagaataatggtggaactggggtcaaagatctcatggatggtatgggtcttggaatgattgcagaacaggtaatgcttacataaaatattggcttctcatttgagagctgtagctattaagtcctactttcgctgcgtctcattaagtttctaaatgcttaaaaacattggcctgcttgacattgttattttcctttttaagatgtgattttgagagataaggatagaaaatgatttttagttgatgttaagaaactaagatgtgtttggttaatgctttctaaacatgatttttttgattttttttagacaattcctgaagagataaattaacagatgtatttataatgagaaagtaatgggaaagggaaagtgaagagatagaaaaagtaagaagaagaaaaactgggaggagaaaaagttaagagagagtatagtaatttgtgagagaatgtgatgtgagatcaactgataagataaaatatgatattgtgacaaataaggagagaaaatgtgtgagagaaaacaaagggagtgaaattgattagagagaaaataatgtgagagaaagtgataaaaaactgacaaaaaaatgtttacaaaaaacaattttttgctctattttttttttaaaatgtaaacaatacccatgattgtagagaataatatttatttctataaacgaaaagaaaaagattttagcattaatggaaaataggatcatcatatctcctgccataggtaggattctatgtagagaccattaacatatatgaaattcattttcctcatatttgtaaatctcagtatactccctttctgtactaattataccagggaaacttattgaaagtaaattgcttgccattgggaaatctttttaattgttatgtgttttttgttgaggaagttaggagagttaaaacttggggaactgctagatacacctcctcctggtctggatgaagctattgcaatctcaaaggtagaaatatctcccctagtttcgcttgcaactatcacatctttaaatatttataaatttgtatgttttcccactttcttaattgttcaagtctctttccaggtgatacaatttcttgattcaccagaatacagcatgtttactcgaatagtttttgatactgcgcctacggtaagtatttagtcatgaactgtccttgttgcttgaactttcagatttttaacttgatgacttgtcttaaacagggtcacacattgcgacttttgtccttgccagatttcttagaccgatcaataggcaagctattgaaggtttgaatgtctacttctcttcctctctcttatttttcttcatactattatatatttttcctttttctcattgtttgtgctctggcccttttagaaaggttctcttgttttaccaatgcagaagaacatcttgaaattgcactaacttttatcctttattgttatattgtctgttacagcttaaacaaaaaatatcttcagccacctcagccattaaatctgttttcggccaagaacagcccaagcaggattcagtaagccagttgccgttcttagctgccgttatgttttcttttacacgagtttatcgactatctgaggttatctatggtgcagactgacaaactggagcgattaagggagaggatgatcaaagtgcgcgagctatttcgggacactgattcaaccgaatttgttattgtaacaattcccacggtaaaatctttagatatttggtaaatggtgtattttgcttgcttgctgatatatatagcatctttttctgaagtatacgctgaaactaatgaacataatttgtcatcgacaaacataactttatctgttaaaatcaaggacctaaaaatgtttctatattcttttccttctctcctcccgtaggctcaccagaaaaaatcatgctcgaaaagcttgctacgtgctactcttgagagttttgaatttgaatgatatgtttgtctgcatttgaaccacaggtgatggcagttagtgaatcatctaggttgcatgcctctttaatgaaggaagatgttcctgtgaaaaggttgattgttaatcagattcttcccccatctgcttcagattgcaagttctgtgccattaaaagaaaggtattgattaataatgttctatgtctgtaattgctttcgtgggtattattttactgcattttttccatgagtagaatgatcttgtgatggaacaaaagagattttggtggggttggtgctctagtttcgcgtaataattacattgggcgtacctttgaaaagtagattagaccagtaaatataagactgaaagagttgataaatatagagatcgagatcggatagggataggataacatttatcttaagattttcattaagcttaagttatcccatgcttagatcaattaggttgttaggattgatttgtttgaattactccttccaattccacaacaaattacatgaaaacaattgatctaatcctatcccacttttccaaacgtagtctaggatgaaattaagggtggaaatacttgaaaatcaattactgttttattttctttttgaaccattttcaggatcagatgcgtgctcttgatatgataaggagtgatccagagctcaccaatttgacattgatccaagcaccactagttgatgtagagatcagaggtgttcctgctcttaaattcctaggcgatattgtttggaaataattatctccatacaaactaaattatcaatcaacaatataacgttttctttttaaagaggagaaattcattattcatctgcaggaagttttaattataatggtaatatgtattgttaataatccataatcaaaagaaaaaagaggagaatgaatacaaaacaagatagattgaacattttcttgtttctttgttagattaggtaaatatcagtttacttcattgcaattttacatatgtaacttggttttcacaaatagtcaaatagtatgttgtctaattatgtttctgtagaatttgactaaagtgacttgtaactaatttatacaagaatgtgccttacgcaccaaacttgtcttgtatgagtagataaatcatctcagcttgaagtatagatctttacttagaaaaccctagggtttactaattttattttattatttttttttgaaatggggtcctgagtaggggtggcaaaacgggtttcgacacggcacacgaacacgaacacgacacgaattttacgggttagggttgagaaaattagacgcgggtcgacacgacttgacacgaaataaaaacgggtcaaacacgatacgacccacttaacacgaatgtgacacgtttgacacgattttcttaaatataataaaataaaaaattaataataatataattatataaaaatatatatttagtgattcaatgttaagttaaaaaattttaaatgtaattttctttaacatgaaattaaaaatattttaattttttcaatttttattatatatataacaaactatatatacataaatatatataagttttctaatggagcttaaatttattattttctctacaattctagcttcaataatagcaaaacgggtcacagtgggtcgacacgaacatgacacgattttttaagggtcgggttagggctgagataattagacacgagctaaaaaacgggtcgacacgcttgacatgaaataaaaagcgggtcacataaaatatggcacgaacacgacacgatgacacgttttgccacccctagtcctgagcggtggggggcttaaggcggccacctccttcatctcacctcaaggtcggccatggttggaggcttacgactagtgattgaggctgtcttagaggctattttttagcgtctccaagtgtacacctcaaacacattttaaaactatagctaaagagagagttagaggtaagggttttggctaattaggtacttgctctgggtttttatttatttttttaggtaaagaccatattagacctcgtgtttagcaaaaattaccgatttgactttctgttttgttgaatgaaaatttaaacccttattttttttttttataaaatataatgttaccctgagcttaaaatggaacattacaatagtctgagttcgacgtgttttgaccaggttgattatatttttgtacttatttgtgctgtaaattgtttgcaggttggttatattttagttatattaaaataatgactaaaatttgtatcagagtattattacgtaccttttcgaaaagtacaggtttgaattgtcatttgacaaaactaagggttcgataagttaacttttacaaaatacaaagtctaaaatggtatttatttatgtttttatgcacattaaattttattcatattcctattcatattctcattcctattcttgtgtttttgttcctgttgacactgaaaaatgaccaactttgtactgtctaattagtgatagtagcaagaaaaagagaactaaaagtgagacatcacaccacaattttatagtagttcactccccgtgcaagccagcaatggagctatgtctacttgagcttttattaatcactaaaatgcttatatctttttaagagaaagacttacaaagtcttagaatcaactcaaagcttctaaagaaagaaagtactaagtttagagagagaaactctgacttgtggagtgaatatagaatgtaaaaaatgaaatagaagggcatcctatttataagaatggagatctcataaaaataaaatattacaaaatatagaatatgtcagaaatattacttctcagcagatcaaagaccatttatggatgccatgccatgatctaagggttgaggttactcatcttgaatttggatggtgatcgtcgattttgagagatcaaatttggaccatcggatcgttttctgatgctccgataccaaaaattgcactttgacttggaagctaattttgagtatgaaatcatcaaacttttgatatgaccattaaacatacatagagagatctatacaatgcacttggaatcgtgtcaatccgagttgtaacgagtgagatatgactgaaacattgagaggtgttcaacaatgggcgaccaagttgactctaagagtcaacctaaatgcctataactccttttagcgtgactttagcatattttgagatgccaaggtgatggtagtgcttaactaagctgaattcttgattctggtgaagtgatttgccgtctcttagtgataaagctcgagtacgcaccaagtgatgattggtggttacctaggcccaggtatgtcaacttgggcatagggtgacttaccaaagtgataatttgactttccatgaatgctagaccttattcgtgatggaaatatagcacaatattcgaaataaagttgcgcttggatgaacaaaaccacacgctccgagttaaagtcaacatgggcgtccatagatgtcactaggcaatgcttgaggccaaactcttgtcttgatgatgaatttatctgaacacaagtcccacttcctgttttggaagtaaaactaaaattatgcccgagacagaattgccatttgagtaacgaaaccgcttgtgtcagagaaatagtgaacttgggcacccaatgtcagggtaaaagtcaacttggacgcccaatgtgagggggaaaagtcaacctagacgcccattaggtggtttggcccctaaacatttgtttgttccctgaaagcatttgtatcttcgtacttgatgaaaataaagaaaatacccaagaaatattttcagaaaacaagttgaaaacatcccaggctgacaaatgtcaacttgggcacatgtgctaggaaaaaagtcaacttgggcgcccatatcaggttgaaaatgcttggaattcatcttcttaatgtctaatcttctttttagtggtaagtgcacacgcaaatttagtttcgtctaatttgcacaagtgttactcgatgaacttgagttggtgtcctggtgcccaggagcttcacacaatcaactgggcgcccattgtggggatatgccccttatggataaagtttaaaaaaatttaagtctccacattgttccttgttggatttaaggaatcaaggtccaaataaatttttgaaattctatattatattgtgtgcttaagatgactgaatgtcatcttgattgctgctacctgcatgggcgcttctagggtaaggtttgatttgaaattggttctagggttcaggatttgattgtgacatgtctctcatgttctttgccatagttattaagttgtttgcttggactattgaaggatgaagtttataaatgattttgcgagatctaagcctttatttgggtgcccccaacgtgcaggtgacattgcactatcttgagatgtgggaccccaaagattgtttccttcataccacgtggtcgaaaataatattcacgtcatcaagtcaaaattttggataagcatttctttccaaccaaacgaatcctaagagattaaattatatttatacaaccccaatctctttagtaaaagggaaaataaaattttaaaaatgaagtgagaaacaaaaggtgatttaaacatagatttttttttttttttttttaattttttataaaataaatatgtgtttgtttttcatttaaggagagggaaagtaaagaaaaagtgtcaaaaaaaaaaaataattaattgtaataataataataataaaaaaggagagaacacaaaatatattataattttttttaaaaaaaaaaatttcttaaattttaaaaataattttaccattttttttttaaaaaaaatgttcactaaaactaaattataaaactattaaaaataagcgttactaaaggcatccaaaaatgtatattcatattttcaaaaaaaaaaaaaaatgtatattcataatcacttcgaatgtaatggccagtatacagcttgcacttaattttctcgttttctaatgcaatatttgggataacactaatttatatgaacaatatgaatttaattacaactccttaattaaaagaatataaggaatcaacatgtaaaaggaagctttgatcactacctataatcattaaatcatatagtctgttcactttcatctacattttgtttgtttgtcagtgtgttagcagtaatgtagctcaaatgaatcaaaatctcataattctctaatataaacctctcaaagttgaactttctgttggggttaggaatgtgtgtagatagaaaaaccgaaaaatgtaggtacgtatagagtgttcttaggtatcacttcttttgaaaagttatcatgcaaatgaaggcaagcacacggctaataacaccgatgaggatgagtactagtatgcatagaatccaatgatgaagatcatagtctgtctgttgaagaattgcacaccgagttatcagccagactccatagtgcctgcatttcgggtccagattttttcttatataggaataggatgtaaattgtagctaattctgtaatgttatgaaaagggttattgagttatgacatacctttcagcattaccaatcacaaatgcttctaaagcccacctagggtagcaaatcttagcaaaattcatgaccattttacttccacttgttcgtgatgagataagagtcagcacaactggaagaagtacagaccactgcaagaaataatagcttcattagaattagagaatgaaacgagaaaattcgaacaaataaatatattctctcttcttttcttttaccagttgagctgtgccttgatcgaagaagatggcaaacgcgtatgctataccagtaacacaataaacaagacagagaagaacagtatagttatctgcgaaagaagatcttggattggtgaggaaatagaatgttgagagatacaccacaggtttgaccactacattgaaaagatcaattgaatccttagctagaaaataagccaaactgctcatgccagaggaactttctctccagtagtgtaacttatccattgagaacgatctcagagccgaaattttgcacagaagagctgaaattagaatgaaaggcagtaaaagaagtcaatgccagaggaacttttcattgattgcttacagtataactatcaagtacaaaaaaattatggcgaaaaactttttctacttacaaactgcaataatggtataagtatatgcagctgcaccaaacttatcactcatattagcaagtgatcctaagcaagctccagcaagtaataaaatcaaataatcaacagcttgcgatttagcttctcgaagcctctgcttaccaaccctggaatgccattaacacaagatcagaagatgcaattttctagcaatatgggcagaactagttagacatcacagcttaaataaatacattttgttttccatagaagttgaatttttcaaaaaccttctaatatttgctaaaaatataataattcatgttgccttagatttttcttccaattcttacaaactggagaaaaggtttctactaaattatttcgatgtgtgcatggaagtggcgtgcgcattaaatggatccattccgtgacatgacatgatttatcagtaactcaacattggcaccgtataggatttgcaagatttactaataagattctcagtagcacatttagaaaacaagaaagataaaaaagaagaaggagaagcatttttacctcccaaggaagtatttatattgttggaatacatttggtgttcttcgtcttgataaatctttggtactcagaaaattgagccggatcttatcctggtgcagcaccacattatttttcacatcttgccataaatcttcggcaaatgactgttcttccacctcagcatcagtaggatttggttcataagactccacagatgttgaggatgatgcaatatcaattgtattccgcctcaaatcagggggcactctgtaccctttatgaatcatccatctgacaggaagctctttataatctacttttgcacctttatctggaactacaataccctctaagatgtcgatgaagtgatcaggtggatttacacgatcagggataattatcccaagccctgcaaagtagtcttccactttcttcacgggtccatgatacacagtaagaccaccctttgccaggaggatcaaatcatcaaacatcttgaacaaggcatagctgggaatagaaaaacttctattagagacagtgagaatacaaaaagtgagagactcaaataaacttttggttttgaaggactgtcttccctagaccatagaaaagactgggagagtttcctgtactagaaagtttacattcttgttaaagattgctttcatttaaatgtattttctgggagaccaaacttcgtattcctttactcatcaagacaaagttgtttttcattttctctgaaaaaaaaagtatgaagtaacttcagctaccttggttggtgaaccaccatggagacattgactccctcaagagcttcacgtctaagtgctctaagaagttgctgcgaggttgcactgtccaaaccagatgtaggttcatccaagatcaaaagtgaaggctccataaccatctccaatccaacattaactctttttctctgacctccagatattcctcgcttctctactgtcccgaccaaggaattccttactgcctggagccccaaagactcaataactctttcaacaactaaaactttatctggtttctccaagtccactgacagtcttcacaatcacacacataagcaaaacattacagaagtcagtcataagatggacatggacaagacagttaccatgcacagtacatttaacctgagcaatgacaataattaccagaaacacatatactattcaatgttatctaacaatacattcacaaaaatagttatatcaaggcatagattttaatttaaacaacttttagttcacataactcaagccataaatcgacaaaataatgcaaaataatcagcataactatatgtcaagttagttgttgagtttgcaaagagctcacagtgacattgcatacctgcattttgcactgaaccatagattctcttccactgtcaagtttccatgaacaatatcatcttggggcacaaaacctatgacttttttataagaatgaattgattcgttttttccatttattaaaattaaaccagacattttgcatccaatcgcctttcctgctatagctgaaagaagtgttgtttttccagcacctgatgggcccatgacagatgtaatgcgaccaggcttgatattaccggtaacacatcttaaaatatgtttgtcttttcctttcaaagtaagggttagatctttaaaagaaatctccattaaaggccgtttcttgattctgttatctgtagccattttgattacacctgagaaggtaagatcattgttatcttgttgctgagctttctccttttcaagttgagcatatgcatacttgaaaatttgactgttggtacttatttgctttcccttaggcagattaaccgcacttgctacatcaaaactaaaaccttcaaacttctctggattttcttcaatgtcgcgtattctatgcatgagatccttatgttcctttacctttccttctgattgcacagatgaggtcatagatataccataatcagttgattttgcaggtgacatatcctcatcacttttgggattgtattgttccaaaatcctgtccttctcgggatctgttgcatttcttgtaggagaaaatgaacgggataattgagcttgcaatccacttgcatgcttcttgacagcatttttagcagacgtccacctctgtcgtgctttgactgtctcttttgcacttcgggcagctgcttctctggatttagtcaacctcctttgtctagtacttagaacttggtcagaacagttgtaaataactagtagaataatacctagagctgcctgcattagtaattgaagaaataagctttgctactcataagatagaatgagaattgaagttgcgaaatttactacaatcatataaaaggtgctttatttagctagcatagtgtgttaacatgaaagagtcaaacatgtttgccagtgcagcctccctagaacaagtactaacttactataattatcatcccatatgcttcgatgtcttggctttctgtatttggatcacaacgcgccaacttgaagcaatctagtagaggaaaggtcgttaggtataaaccgagaaataagtacaccaaacgtggaagttgaaattccaaatttatggtggatgattgtacttgtagcacacatagatgaacaattgggattattaatgaatacaaatgaaataattccaaattgagaagaaaaatttaccttgctgaaatgtagaacccatcctacaataatgtctttattatacatagcagaagaaggaaaagaaaaatgttagcattgcataatgcagattaaatcaagtcaaaatcaaattattggggaagtatgatactcagtttgtagtagcagatgtatagtgtatcattatgtgagtagaaagatgtcattacccactgctgcaattagtcttttttgttgttgttgggcaatacgatcccgctgaacaaaacacctcactactacccgaatcatcagcccaaacgttagcccctccacaagtatggtttggctttagaggaggtagttggtaatggtatctgtaaaacatttatcagtgaagcattaaatatccaagtcattgaaaaccaatgaagaaaaatgaaatggtgattcaggaaatggtggaatctaaacttacgggtcacatacaccggttgtcttattaagcgttgcaaggggacaataagcacccaatggacaagctgcaagaaggcgaaatcagttggtaacagagaatcaattgatcatgtttcacactaacacagcagaaaacaaagcaaggaaatacttacgtatcatacatgtaataccatgaggacagaagaagccctcacaacaagtgttacacctaagagttcttgctggcatgtcttctgaattactaagttcagaaggctctttggaaatttgatcaacactacaggcccatcccggttcacaaccagaaacccaagatgttaaattacagttcttattgggttttaaatagttatcagtcaatgcaccaggaaacaaactgttaaagtagaacttcatttctgctaaagtacacaaacgatttgtaatatcacctgttaagccaatacagttactataagtaaaaaacataaactaaacaaaaagataacaaaaatttgagatagttgaaaaacaatgtcactgaacaagataaaacatgaattgtggcacttgtagcttacatatctataaaagatactattgaaaatatcaactttctcacatttgaacatgaaattaaacaaaagtccaaatcatgaatgaaattctttcaacaacttaactgaacattaatgtttcctctggctcaccaataaataaaacttacttaaataccaaacaaataaaagaaaagaaaaaatagaaacttctgatttacaataacaagtacttttattataccttcggtttttaaaatgcaagaagataagaagtccaaattgctggaaaaattaaacgcccgattccaatcaacctgtctgaaataacaaattcaagttcgaaatattaaaagcaaatcattagccactccatttttttttttttgcaaaaatttctaatttgaattctgactgatacccagaatttgattcaccacttttcttatcttttctttgtttttttcatgcattttctcagcaaccaaacaaaaaagccaaagtagaaacaaaaaatattgactcacggatccttaatgcagaaactaaaccggttgccaagatcacgactaagatgatcagtgaggttggagagacgtttattaagaacccgtgtaatttgaggaagaatcaaaggattgttgaactggtcaaagtctccaacattttggcactgcccaagcttaagaaagctcaaaacaacaacacccagaaagacaaggataccaaagttgaaagctttaagcttctgaaagctcatctgagccaactataacttctgggttatgaagtccaagtgggaaaaaagaagtgaaagtggaaatctttgatgaagatctaggattgttcagagcttggagtttagaagattgtggctcataataatctaacaatgtagtgttgtcatacaaagttgataagtcagtcaaacgcgggagaagagaagagaatagagtctgctgttctaactcattacgttaaattgccgtctattggtttcggacattagtttttagttttcgattggttcaatgagacaattttatattgtgattctttcttattttcttccttgttggccttacctcattggttcttctctatgttgatcttaaattatgttttattgggtaattactatataaatggattcatgactttttttatataataaatactaataattacttttcaacatatgactttgtccatgccttcgtttttgaatactaaattttttaatttgttacgtttgaagatatgttttccataaacaaataattatttattactatggtgcgtgatatccttgttagagatctatttcaataaaaaaaacattattcaagtaacaagaaaacacactggcaaaaaaaaaaaaaaaagtaacaagaaaactcacaccatatattatgattacttcatttaaatttttaccctttttataattcgcctatacttcttattttattttatttattttcaaacgttcctttccctttcctaatattatatattattttatttataactaaatataatatatggtgtcagctatagtacacaaatggctaaaaacgtaaccaaacacgttacactttgaattgactctaaaaatgacacttattttttctagctttaaaaaatattttattgcatttataaattactttttaactggttacttatgttacacttaccggtttaatatttaactaaatttttaagctacttaatatttttattctttaaactttaacatatattagattataccgtctgaatttttatttccattaaaaattttccatgaactatgggtagagatggaaattggtcggttaatgtacggggaatgcaatccccgcccctatccccgctacctatttatacccccatc

SEQ ID NO: 15933 - DNA, 4886 bp, Cannabis sativa
taagggatgctgttctgcttgtgtttgctaacaaacaagatctacccaatgctatgaatgctgctgaaattactgataagcttggccttcattctcttagacaacgccactggtatatatccctacatgttatattcagtttcaacatttctcttatcctaatcctattatgaactcagtcatctttcctatgaatttaaacatttccaggtacattcagagcacatgtgccacttccggggaagggttgtatgagggtcttgactggctttccaacaacattgctaacaaggtagctaccttagcttctgcactataaataatctaatcttattataataaataatgcaaactcttctcttattaacttacatttgttcaaattgttttcttttatcaggcttagatgactctggcaatggtcatttgttatacaggtttttcatgccacagaagctattgttttttccttcttcttttgttttactcatcagatgatattcaaagttgttttgttgttactttgtaataattcttcattccattctgtgtaccttgactattcttattattattattacactactatggttttttgatttgatatttcattgtagaatatcaacatgtattaccaacatataaattcataaactattagccattgaaaactctaaattccagtcaaatggagcagagtgagtgagagttataataaagattctgaagctagtattactgcaatggtgtgcattttattccatagggggcaagaagagaatcttaaaggtttgattttgacattggtgttggggtagtactacttgttgtattcattcactattcagtgtttggttggttagattagattgccaaaagaaatggggggtatcccatcccaattcccatcatccatttgggacccccctctatgcaggcatacaatgcctacctatatatttatatacatgtaaatataaacctgaaaatacataccaagtaaagttaaatgtcatacatagccccattagccctcagtggaagagaaaagtacaccacccatcaccttaagtgacttcaaaaggagatctcaaaagacaaaaaagcaatccttggaagagttaaacttgtattttcataatagttttgtgaccttcacatacctaatccctacaccactagcgttccctatcaaaatttatgagcctaaagggtcactttattttgtatttttttctcaaggtggtagctttttttttctttgtggcagtagccattagttggacaccataagtttgataaggcataaggttccttcactacactcttcttaatgcttaagaaaagaaaacaaaagaaaaccattaacaacttggtatcaaattatttgaagtacttcatgtacagatttatttcctatattgtcagtgtcaaagttcattagtgataaaagggtatacaagcaaacataaattccaccttgatagcctatatatttatgaatatttcctaatacaatatggtatatatattttttaacttatttaagaattgattgacaaaaataaaaaaaaaaatcagcagacattgaaaactatcatcatattgttttactattcatgatgttgatctttgtggtgcaaattctttctttgttgttttgaacatgtctagcttcttattattccaagtttaatttataatatttttctgattttaatatagcaatatgtattattatataatgtagctgctgctattgttgttgcaaagaatataggaatataaagccagaaagaagaaaacgtgatagcaaaaaagatgcaaccaaacccaaataaattataaaaaaaaaaaaagaaaaaaagaaaagaacattaaattggtatttgtacgtacttcattactactttgtggttcttgtactaataatgtactgtagcactttgtgaaatatcaaatatcatatatattatataaagataataaatatttaatattactaaacatgtgaatgtagacatgaaagaaacacttaatattcttaatgaaaaatgtaccatattatacatgaattttgcactcaacaatgtcataatttttagtgtttaaaaatcttttttacttaccagtgatgataataattctaatatcttagaaaatatatgctttaatttgagttcagttcagtcccatgcatgaaaaatacctgtttttgatctgtcataatatatatatgcatcttattatgtgttctatgctggtttttactctttcacttagtgatgataattttcaaactgggctgtttttatcttcaaatttaagaagaattattaatctaggtgtataattcaaaagacaaacagatgtatatatatgtatacaaagaagaaaatattgcactcttttagtgatgatatatatcaaattgggctgtgttttgtctctaaatttaacatggtataataattcaaaaagacacaataatagattggaaaaaagaaggtgtactatttttattattaattatgtctgcattattttgaagaacaacttgcaaagtaaaaatataacatgaaaaagaaacaaaagagaaaataaataacaataaaattgggaagcataaagctttgaaaaattatgagattactacattttctaagtgggaaacaatacaatatgatatatgatcaagtgataagattttcaagtagggcagagagtcctctgcctctaatgattttcttataagagtaatgatatgtatgcaacaaaattatgaaccaatcatatttatttgagacgatcacattactactgcgtgtaatgttttggtgcataattttggtgcagatatcattactcaaaaaactcttctcttaattaggccgtcaaagtttgcctctcggggtctgaaactcggctttcatagaatctagcaatgaaggccgaggcctttcggtcgatgccaggctcagcaatccacccaccgcggtcttcctcactagggcatattcttctcctaatgtaaacaccttcttcagagtatgtatcatctctattaccactagaaaaacatgcactaaataagctgcataatgagaatagtgatgatgatgaagaagactttccatgcttccccataataataactttcttcttcttctttttcttcaaaacttttcttaagccctaagaaaagaaaagaagtatgtttttgagtgaatgaatgatagttattattagtacgtatatatttatattgttgttatggaaactattttagatgtcatggatatttatagtactagagcaaagcaacaacattggacaactgggatccagctatagtgttgtgatttgtattaaatggacggctaggatctaatgatctgtgacttgtagtattgaaacttaagaaaagagcataagtgttattgtcctctacttttttgtgaatttgactcaaaatagatgggtgagttgtgttatgttgttttgtgttatagtataccactatatattataatacaactttatatacattagcttattattattctattgttatactttcttttaaccccaaatcaaagatgctctctctaactatataaaataatgcctacggaaactatttgttgtgatggatctcctctttactttttcttgttcttaccctcatgtggtacatcattcaaaatatttacttatatatataagatatgctttattattaatattttcaaacatcatcaagttcttagtcaaagtaaataaaagaaaggaatgctagttaaagtagaattccaaactccaaatatatataaaaagtatagtgttaattataatttttttcttactcgcattcgaaaatatatacaaaaatatttttttcatggcggtattcgttatagttataatgtaattcgtgaaaattataatttttttttgaataatttatagtgtcaaaaacaggtttgaaatttttgaacacgagtgacaaattgtcaaaaattttattgtcatactataaactattcagaattttttaaaaatttataaggatgatgttgtaattatagttgtacgccatcgcttacaaactaacatgagtctttccagcaatgttttgtcttcacttgcacatttttcagatgccatccatcctaagattgttccataataattacgctaattttcgaattcttaagagatgactaccaaaaaaaagatgcatcttgctgatataggtagttcccatcaatttatttaagtcttctttaattctgtagtcttatacctatatagttttagaatcatctcacttgacatttctaaagcaatgcaacccctaaacttttcccttgcagatcacaaaactcttattgtcacaataaagaacatcgttataaaaaaattaattttttatttttcggcatgtgtttttggacgcgtaagttgtaacaagagattgtaattaacacttttcatatataaaatatataagcattgctatcttattattattggtataatttaataacgaatcttacatatttcaatataagttgatcaaatatgtaagacacaatattcatttaatgctatttactatttctctattttatatgatgtatatagtgtcctttactcaaattgtttaattatcccataatattgtaattttggttcatatacattgatatgtaatataatattatgaaaatatatgctttattccatatattgtagctttattcatacttaatgtatgtgtaaattaaattgcatgtgttactaacattattcaatgttactagtcacaatcccttatttcttttaactacattaagtagtattataaataaatatatatatat

SEQ ID NO: 15934 - DNA, 5207 bp, Cannabis sativa
ttaggtacattttttgtgcataaaattttagaggtgcaatatgaggatttcctaaaaagttacccatcatattactatttttacctaagcacgtataactctaaagttctaataggaatcggtgtggtaatactactataatcccactcattccgtatattacatcaaaacaaatattacctaaaaaatttatgtataatctatctgttcacttatcctaattcattttcatttagttatgtaaatatttaaaagaattgttattaaaatttaattgtgtaatataaattataatttaataattattaaattaaaataaataaaacccaatattaaattacacttttaactttttaacattactctatttataatatacaaatcttgaatttaattattagatttttagcgtttcttttcaagtatagtgtggaattccagatgtgaccttttcacattttaaatttgatttagtaactttaaaactaatgatataaggcctgataatgaacatatgattaatcaattaactaaaaggattataatgaaataatttatatctgcaggtaaataaataggttgcccagccctagatttataaatataaagtaaagcaataggagcaatgaacttagacaggaataaaataagaggcataaactagttttggacttgaaatgtcttctacaattttgtttttactaaacaaaattctaattctcagtcctattcttcatctcttttattttttggcctttgataatggggataacctttcatattatatcatctttcttatcaaaatataagaaaggaacattatagtacccataaagactacataggatggggatagtataaaatatatttatatatatttagaatattatttgtacttccctttctttcttctttttgtgagatgggatattaaataaataaggccaatcttggcattgaaacattcttttcaagctgaaaaaaaaatgaggaggaagttaataacattgatgataataaattctgaataagaagaagaagaagagggattgaaattggaccaccatgacataaagtttgcgtcacacttttattttgtttctctcactgtctttgcactttgtaacaaattgatattgatatagagttgtggagcactttctatgagaagaaaccaaaaaaaaaaaaaaattgaagtcctttcttgaattgggttttgacatgtaatgctcttagtttgattgaatagttgaggggaataacaatcgttctagttcaacctccatttgatttggtcaaccatacaacatacatttatagatacatatgcactggctactaatgccctcgagtcaatctagttaggaatttagattgagatggccaagagaagaaaaaaagagagaaatctttggccgtatgggtcaatagcgactagaaaagatacggggatatattacaatcatgaattaaccccaaaagacgtaataatagtagccattgtggggttttaaaaatcttagcacttgtgattcttttgggtgtgtttattttgttggagagagagaaagagagagagagttgtgtgtagataggcccatcctacgagagaggaaagggcatttataatgggtttggcacaatgccatgtaattgcaagtgatgggtaactttgctatggccatccattaacagccagatccactaaatatttcttcttcatcaatcatctttctgtccaaccctactgagagagagagagagagagagagctttttaaggtaggaaatgacactctaaacggcaccccaccacaaaccacaaggggcatggtcatgtgtcccagtcactagctttactttttttattatctctcccatttttcttctaatttatgatttatgagctacacatagagtatagaaaacttgcattttggacctccctttgtgccttcattattggaactaattagtaaacctttgacagtcccttgaaaagtaggaaaaaacctttgttcacaggaaattgctcaaattggtaataagttgtgagactgaaattgattgactaactcagaattaggtcaaatgctttggccagtcttttcatttatacaatcatggtggtattttcaaaagaaatttgcagaagccttccataatttaaatttttcattttgtcacttgagaaattctgcaacaccacaaaaatgaaataaaatgatttaggctccgttttttttttttttttaaattttcaaatttgcattttgcatattgaaaatgcagccattttagtaacttcaaattatttaaaccagtgagttccctgcaatttcaatacgaatagattgttgtatctaaggaataattcactaagcaacactactttaattgttatcattaactctccaaagaatcatttacaaggagttcaaggacacaccagaataccatgtctatgaattttcaggcaaataatatttggcaggaactagggacataaataaagctttcgacgttcaaggctataaatctatcacatcttcctacttgtacctccacaaatatacactcaacaaataggagaaatcaatataggaaaaaagaagaaatatgaagtggggcaaggaagtaatatatcgccgccggcaagaaaatgaactcttaaattaattctcaaggaattatcaaaacttggtctttaactgccagcttcctcatcaaatgagctgcttgatctaaatcagcacactacttcatcaactggaacttggccacaaggaacttagcctagcagccagttttgcacttttgtagtcctctctcagttgaataaacctgagtggaagccaaattaaaagtttgtcacaatgtaaggaggagggaaaaacacaatcctcataataccaccagtaatacctttgtgcgtctttccgaatacttggagtaccctcaaatagagtggagagactctcaggagcaacaataaagacattggccatgctggacatagaaaattcatcaggaaatttgaggaaagctaaaaaggtggatataaaatggaacaagtggagggaatagaagtacttacatgcccagcaactcaaacttctcatcaacggaaggagcattgaaactacgcacaaattctccatactctgttatgtcacgcttcagccgcagacctccacttcagaattgagaaacaaagacaagagcatgaatcagcaaaaagaaaatagcaaaacacttaaatgactccatatgtggacataaaaaagtttggggggaaaactctctttcaactaaattatcagaatgtttgacatgtctgttacctgggattaaaagtgaacttctgccaatgattaagcagccctttatgcaagcggtttccctgatcagcaattgcaagaaaaaatccaattcaaatgggaaacgtactctaattcagcagaaatcattaaagtacccaattcctacacaccctaatccagtaatcccgggcccaaaggcaaacaaaataataatgagaaaatgaatggcatcacataagcacttaaaaatgaagtttgttcggaacaacatcatcaagtatgaagtgctcagagaaattgcagtgtatcaggttaagaactgatcaacgaagctatggagggttaaagtgaaattttttgccagtgttctagaggcactgttaaaggcattaaacagatcagacattatcacatcccaaaaatatgaatgcttctttttgaatacaaccatgaacaccaaagaaattatctatcatatgcacaagaaccagcataactaatcacaaccaacaaagtcaatagatgagtcaagagaaatagtaaataaaacccgtaccagttcagtgagaaatgcttgtttgttaaggccttcaagagctgtgaatgcagattctagtacacgggaaagataagctaccactctagcaaaattaagagagaacacattatttgttgatcatactccaatattaacaatttattttgcagcttgtaacatttttgaatcatatataaagatacgcaaccatatataaagtcaaacaattcaatgaagactccaaagcacttctctgtctctatctctattttcttcttattttttaataagaaacagaaatacaagctgaagggggaaggatgtagacttaggttagcactaacagcaacaacactcaaaagttcctacggtaatttttttggcactaactcattattcacaaaagaagaatataaatgtaaatgagaattgggaaatcatgaagcaaaccaatttctggttttggttcatgtttccataaaatacatggataactccttgattgtaccttgtgcaagcatttgttggcctatgatcaggagctattccatcatcaggtgaacgataatccgttgtcttttgttcggctgaaagtaaccgctccacctgcacagaggggtttcacaagggaaagatacatggttcaagaaaagagacaaattagcacaatagaatctaaattctggaaatctgtcaactagaaataacagaaacccttcataaagcagcagttgacaatcattttatatgttatgatggtaaagggaaatagagctggtgattcctgactaaatgccaatagcaggtcctcagggtgatactaacctcagccatgacagtttcaatgcattgttgaaggcctttataggccgctccttctgcactagacatagctgttgccatttcttcacaagaagcagcatgcgcaccgtccacaggtaggagaagccgagatatagaattggcaaagaactgtagacaaagttcagaacaaattaatctctaaacaatatgaagccacccattttatgagctgaattcaacacgatttgggtacagctcaacgtacttgctgaactatagccacactactgccacaacgttgcacagaaaccataaaagatctaaagctgctttccccagcagcagcagcagcttctgcctacacaccaacaataaaataatctttacgtcagccaatttttaagaagtctatgaattgcttctaagtaaaacataaggatatatgctttacagaatttaaaaaatccagtttttgttgttattaagaataaggaaaaggtgcttagctaatgttttctaaaaataattgaatatatatatata

SEQ ID NO: 15935 - DNA, 8003 bp, Cannabis sativa
acagaaagtgaactactataaattgctctgtctctctttacttttacttaacaaatatttcattctcgccaatctagcgagcggatgtggcttggaagtccgtgtcttggttttttagtcaacagagtatttgcccacacatatcaaatacttaaattagtgtggaagattgtgtagtctttcacatctcgtaggagaatccaaatttagttcttgatcatactctgcaacagattggatcaagggttagagaactgaacggaaagagacattaatttctgctgcgatcattgtaagattttcttgaactccttatatgtttatttcaattgtttttaggaatccatgttaggttgttagattagacataatttaatatacttgaatagcaaataaggtcctaattaaataagttttttaacagacaaagcatgtatgccaacaggggagtaattgggaaatgcaaaaatttcatatgtttttgacagaccataatttttccatcaaccatcttaaggttttccaagttttggttagctcagattgtgtcaatacgcagaagttgatgtcatcgggaactggatattttgcacaaatctcatcataaacggctttgtattcaatcaagaagtcttgggcagtcataggtgaagccttctcacttgttgacttggatttatccttggtattgcttgaagctataattgtagaatagattgaaagaaagaaggaagtgaaagtaaaaaacaagagataatataaaagaaagaaagaagagaaactggagatgcttaatacaaaaggcaaagaaatcaaggaagtatctaaatttggtagaattcttttggttgaatattattactataaacttaaaataggaaaattagggtaaattggaaaggcaagagcagtttcccaaaaatttgaaatgattaccacatcaaatcaaatacgactcataaagacacgtgtgaataattttgggtaactagttccacaacatccaagcttagacctaatactcacgagctcgaataatagaattgttttactctttacgatttgtaaggataaaactaaccttgacggcatacggcataaaagtaatttcactttaataatagtataactaataaagttatgagacaggagtaatataaaacacattgttttactaaaaagaaagaaagaagaccagagcagagctcgatattattaggaaaatagagctggactagcaaataagagggaaaagtgtgcaaagagatagagagggtagatccatgttgaccattctgaacagaagaaaaggatcttgcaacatacattcgcgcctataaatatgagaccccctcatttaaaaattggagaattcttgatcacaccaaactaatgaaagtcttcctaataaattttcaaagtacactcgagcttaagaccgaaagtcacaatcaatttacggagaattatataatctactagagttgtgttttacgattggatcaatcttagtgtaaaaaattctaagtaaaaatataattttgttgttgagctaattttcaacttaaactaaattttaaaagagttgagaaaaaataataattattactattatcgtaaatcagttattgtgctgcgttattggtttcattagtgaaagaaaaattatacatgactgtttaatcagaagctgcacaagtagcgatgcgggatttgcacaaaagtgacgagcaaaagaagaagaaacatgaaaaccacgaacaccatttcccagctcagataatcacatttcactaactaaaatttaaaatatcactgctacttatcattcatcactgtgattctgatggatacccatatgtacttttacaactcggaaaaattcacttgtattcaagaggcaacatcaactccaactgccacatgactcattccaccaacaacacttttcatactcctcttcgctctctcattgccatttcttttggcctcagtttttgactttctgtccagcactctctggccttttgacaccttagtagcagtctcggttacgaggcgatcaacttttatggtatctttctcagtcgcattcttcttcttgacaacattgctttttcttgtagattctcctgaagttgttgtgttggttggagttacaaatttccgtaaggaatcactgggcgtacaagcttggtcattttcacctttcaactttgattccagctctgaagcagctccacttcttgaacttgttgacttcttgggtcttattttggtcttagtagattcaaacttaatgaaaagaaatataaaaagcaaatgaaattagtaacgttttcatactaaattcaaaacagatcaaagttcatattcttctagaagacaacacttaattaagaagaaataccattgtaactttagacagattagacattgcttcttagaaataaataaataaaaaaaattatgacttgattagttttagtctcaattcaaattcaacaagtgatattgaaaatctacaaaccttgttcccatctacattatagaaagatggcattggtgttgctttaaaattgaggctttttcggaatcgtctgatctcagcttctgtcttttcctgcagtaagagtaatataactcagtgagtttatggtatagtaagtagcatcaaaggtaacataaattttaaacacttttcctatattagcagtaatttaatatccaacagattttaaacagaaggtagtaaagtagtaactgcaataacataccaagaatcaaacagtggtctctaatataatgatctagttgggacctaagagcataattggtcaacaattaaactacaaaagcaaatatatatacctgcgtttttgcttggatcttattcatttcaacttccttcgcatgcaatttttcttccaacttcatgtagaactggattgcagaagtgtgacaagcaaatgaaacgagttaagttccgatagcaaaaactttattcagaacatgtaaaaagaaaagaaagcagcatgttgactagcctcttttcttctttgtgctcgttcgtaacatctgaaattaaatcccattgccctttcatccagcattgttttttcttggttgcgcctgcaaaaaggaattagaattataattctcacgctcaagagattaaacaattaatcgacgcttgtttgtgaacttgttaataaacctgtcaggcatttgatgctctgtggcttcatctttcacagaagaaggacgtgacacgctaactttctttttccttgattccttttcacccctgtaaatataagaaattcaatctgagattttccatttctagaacatgacagaattcttcttcaaaaaataagaaagtaccttttattattactattattatcatgaacaaaattgtgattaggatctcttgaatcctgcaagaaaaaatcaattaaaaaaatgagttgaaagagatcaaaagaatgttcaatacatcttatatgcttctcaaaaatatattataacataattattatacatctgatctcgaatgtgctgaaatggcaggatttgattgttggcttgccttttctgtccttcctacatcctttccctttctcctaacattttttacaggatctttagaaacacctttcgagatgtttctttgaactagtgacagattgttgagtgaaataactttggatttggaaggttttgagtccatttcaggcggcaactacaagttagtgtataataagtattagttttaacatacatttctaacaatctagaaaaaacaatggggcttgaatttttcacaaaccttctggtgagatgatttctgaatttcaaagcaagcttcctctactttcattatttgtggaatcttgacatcagtctcgacagcattaacatcgagcagctgattaatgacttgtcccgaatcattgcttgatgatgtaaacttgtcacagctagtttgggaatgatgtgcttcagaattagcaccaccaacaaagccaaagtcaagcaagacatcactatcattcattgcaggttcagtcaaaggcttcgatagcaataccccagaatcctctccttcgtattctgtaacttcatactcatcgtgattctccgaatccccatgatcagatctttcaaattctttcacttcataatctccatgatcctcctgctcttcctgatcttgtatttcagattgtgttggttcatagccgctaagatatgcttgatcacaaggaacttgtctgtcatattcggtgtttccatagtctccatgatactctgacccttcagggctctcataaaagtgagaataatggcccacttcatttccatattcatattcctctctgcaatcgcttctatctgaaacaccattttcgctgccatgattttctgtaccgctatagtactcaaatgaatctggccttaaaagacctttcttcttaaagtgagcctcaaagtaagctttcttttccctaactgagcctggttttgagcatttctcaacctcctccagatatctattgtgtgagaaagatgacctcctttcccaagacaaggactcgttttcgaaccttccaaatgatacagagcctgagtgtaaagaatctgcctgacaaattggaaaaatagggctgctgagtatgacatttaaactaattattattatgatagtcaaattggcaaccaatttttctttggtttttaattccacttactacatttattttcaggtaatttgaaagacaaaaactctactattaagaccgatcattgaaatcgttttgtcaactgagagagattagggattttgaaagactaactattattactcttcttttccatattattggtagtccaaaatcaagtaacaaagtttagggaaagaaaggcgttttaacattggagtgattgctaaactatgctatatcctatttgtgccatataattgataggctaaaaatcagttcagtacccactaactaaaaaagaaaactataactacatatataaatatatatatacatatatatatataaaaatgcatctacaaattaacaaattcattttggacctaattaaagaaaatccggatctcagtaatactcaaaaattaaactattccatttgaattctattaagcaaagggatcaagaggaaaggtctctacttttctggacgagaattcaagcactattttttctaccaaagctaaaacgtaccaaaaattaagctaaagagaaaaggataactactaatatagacaagtactaaagatctttaaagagttgatatataaggaataataataaaaaggaagtaggtttacctgaaagctaatgctaaagggctcttcaatctgcccagccattttgtttattttcaatctcttagaattagaagcttcaaggtgaaacaccaacccaattagcacaaaaccttcttcatcttcttcttttaagatataaaaaccattagctatgagaaatgaagtaccttaaaagaggcgaatggatttcacacaaacatatagtaaataaataaataaaaaagaacccactgcattcacatcgaagtattcctccaaattctcttcagctgtagaggatgcaaatctcaaaatgacttgttttggagttcaaagtataaacctttaagcctttggacataattctgaagcaaaattaaatcttttcaagatctcatgataagagccaaaaacacatgcttctcttgctccttcagatcttacattatttttttttctttctttttggagagagaaagtgcttgtgttgtgtgggggttacttgacttgagtgtactctctcaaatcttgaaaagcaaacgctatagaaattagaaaggttcttctcatcactgatcacgtgcacttgccggttgtcttttttgtcatcttcttctatctaatcacgccgttaactcggttgttatcatcagttaaccttatggctttcaccgttaattaacggggtgtttacaaaattaatatgtaattggatttccaatatagtttaattaggagtaattataaacttagcatgtaattacatactaactatataattggatgtattttgctcagttgaccgttgccatttgaaagtaagaatttataagtattaactaattattatttgtattttaaaatacaatatagttactagacttataattaccatccaaataatctaaacgcatacgcaaaatcctatcttcgcaaaaataaaattatctacgaaaaaatcattgttatttaaaaatttaaacattgaacaaagttttccttttttttctttttcacctaacgattgaaaaaaaaaatcattaatatacagcataacaatgggatttcatgtgttcgtaaaagttgcgtaatttaattatgcatatttcacgtctctgcaaaatcagcagtcaaaactaaattaagaaatttgagcgttgaatagaacgtccaataaatgggcggaactgctatttcttaatacacatttgacggaatcgtcttaaaataacggtgttagcaaagtcaacatctaactgttgacttgaactactatttctcaattgataatgactgcctacgtggaagtgggaaaagcttttggagacaaatatatatgtgcttgagtaaagctatattataagagattcacaaaaaagaaaaaaaagactatttataagagatcattccatccaaaaaaaaaaagctataagagatcagatctcttcgtaactctttttcatttcccttaatctaatggctgggaccaaaaacttttggattaatgattgggttaggattgtcctgaatgcgtccagtttcataggttgatttggaccgttcgattagactatttgaagctcacaattattgggacaattttggacatccactcaacttttaataattcattttttgtataatttatttttatatatttcaattttttgtccacataactttaatgtttttttagttttatcatcagatatgatcttcgcgttctttcataattgttctcatttatccaattttatcattataaaatttatatttttttatcagtgcccttttgataaaaaaaaaaaataaaataaaataaattcacccctaacatttgtggttctgggagtcctgctgagcacatgcatgggccatcgatgcctcagaaagccaaacatttttatcgggccgcccacgcattctggaggctgataggcccacaaaaacagcccattggcaattgctagccgaattgtgaaatttctgcatacatggcaggtaatattccttctcgctcacataagaccaatcttttacctacataaagaagtaattcattggaaggtatttttataaaaaaacgaaaaaatcactttaaaattcttgataaaagcattgctttgttgctgagattaataaaagggtttttacatcgcatactgaaattttaaattttttttcttttttacttttttcttttttactgtgggacggaatttttttactgtgggacggaatttttttactgtgggacggaattttttttttcaaaggacggaattttttttttcaaaaaacggaattttttttttcaaaaatattgtgtaagtttcatgctgtgtactgtgttaagttttcactgttgttttacggatgtttttttagttgttctactgtttttttaattgttctgttttgttgttttaagttgttttatgaaaagacagtatttttgtaaaaaaatccgtataacagtaaaataattgtaaactttgatgaaaaaaataatctagtatttttataaaaatcccttaatcaaagcatcattgattgataaatggtaaccatttgtgtagccaaatcacatacaacaagcaaaacttacaatgcaacatacaaaaattacccccacaaaattacataataaatatat

SEQ ID NO: 15936 - DNA, 6926 bp, Cannabis sativa
ggctacagcagcagaaaccaagagccaggtgcttgatgtgaacgtgtcctccccagtagttgaggcactggaaaccaagccagaagaaccaatgaaggaagaggaggttgtttgtaagggaaaggagtcttgcaaagagtacataaagaacttcttggctgcaattcctctaagggaattgcaggctgatatgaagaaaggattaatggcatcccttcctcttcatcagcggttgcagattgagttcaactacacccagtctctacagccatcacctgatatttcatttgccgaagcggtgtcagttactcgactagctgaagttcccataactgagtgtgccacctaaaatgtatattgttaggaagtgtgattactctaacttgttttttcttcactcttgttttaatcacatgtatgttcttatgtgagttggattaactgagaggaaactgtctaaaccttattcagtgtaatgaagaggggtaatagggttgagtctatcttaagttagaatggaaatgaaaaaaaaaaacatgttttgtaatatttccaattttgaagctttgttcttatctgtatctgcctactaagtgtggcaacttccttcaatctgtaaatgaacaccttttactccaatttaagcaatgcttacttctgatatttacttttgtttggtattctcactctcaaaagattctcttttacttttgcaagagggtcatgtggataataagtccaaacccatatttttgaagctccaatttcccatggctcttggatttgacacaaggaatctcaattctcaacagggcttccattccattggattctggcttatttgaattgatattccatccaccatttttctgtatcctaaaagctgtaaaggtaaactaacttttcactttaagtaatgaaagagaaaagagcagcaatctttccaagtttggtgtacaaagtatataaatcaaaagattcttttacaatgcacacttgtttggaaattttttaaaagccttgcacgttcagtataactttgaatatatctcaacataaaaacgtttctattaggctaataagatatctccaagacgttactgatttattcccatgaacatgcactagtccacaattgtgtttgtttgtttgttttcacaaaccaagtatgtccaaaaagtcccaattcattttctttggcctaatctccaaaattgacagccaaaaacagctgtggacaaatcatattaccggttttttttttttttttttgttgaaatagtctttatttgttggctttagtgacttgtttttaggctaattaagatttttgccacctgaattttgacatgtaacaaattatgttccttgaacttttaaggtcgttaaaaatgtcccctaaactattgagattgttagatttaagaacttttgtctaattgcatccaattttactattccagtgattgtttatatactaaaccatactctctaaactttgatatctaccaaatcactctcgaactttgatatgtaataaatcatggtccctgaattttcatctatgttagactttttcatttaaaaagtccttaaatctaacaatctcaatagttcagggagtatttttaacgactttaaaaattcaaggagcatgatttggtacatgtcaaaattcaagggtaaaaatcctaattaggattgtttttatttactaacaagtattatgatcattgttaagggggagaaaaaaacttactttgacctcctcaaagttttaacttttaagcttaatctaatctatttcaacatcttaagctgactttctaaagtggacctgaaaaggaaactccgtttgtgtatatatatgaaagttatgtatgtatgtacatgttatatggatggtgttaaatcatgtctttaagaacccaccaaaaagcttttaatttgattttattttttaatataatagtttttcattcctgtattcttattatataaactaacaataatagtcaaaaatctgaactaaagggacctttaccatcattttagttttggccgggttccctctatttgactttaaatgactcgtatgagtaataatcaattgagataaatgacaatttggtgatgtttactgaaaattgatacccggctttgtggggcccaaattcagttattatgttgaaaagccctaaagtcttattaggggaggctaaatgaagactaagcttgcataagcccaaagggtttaatccttaaacaaagatttcaaccacttcttgagtttggtatctgaattaatagtggatttgggttcacttaaccctacaaaacaaggagatttttcatttttatgtttttttagcatagtttacacaaatatgataattttcaaaaaaaaaattttttgtggggaaaacttaaaaaaatgttaaaaaaaaatatgggagaaatattttagagtaattgtgacaagataattcgaaattagaaagattggaggaaaaaagagtaaattaataaaaagataaatatacatataaaagataagaaggttcgaccaggtaactatcttagggtaacaggatgattagccaattacagtaaccaattaacttaatatgttgttattaaagataacttatggaaaagaatgggagattctccaacaagtcagcttacttgattcaagtcttacagagggtggtttattgtgatgttgccccctcactttgaaataaactatggaatagtaaaattctagagcgacataaagtcttgtggtggtgtattttgtctcatgcgttaccgatctgctcgattcttaataaaagattctgcttagtggagacaaggtgtccaatttatgggatggaggaagaattaatggaacatctttttctcacttgcaacttggccttccatccgtggaggtcgtccccttagggaatttatccgattgcacgcactgttagttgcatgtgggactaggtaaagtttctctggggtttaaaagttcaaggcatcaacactgatgaagttttttttttacgcttcatcgattgtcaacaccatatggcaggttcgaaatgacaaggtacacaataataagttggataatgctaattagtgcattaactctattcatatatcttttacagattaccgtgcttcactgttccctaatcttgctccgattttgttggatgactggcacctttctctccaagagtgactcaaactgaattgtgatgttaggataggactgaaaagcatgtgtattgcagtagtgacaattaaccattttggagaggtgctctgggtgcatactaaacagttggatttcgctgatactttgtgtggggaagcagcgcctattgcttagcgttggatgttgctaaagataaaagccataagtttgtaattgtggagaacgactccaaggtggttgtcaatactctcaaagaaaaggatacttgttggaggtttgttgattatgcctcattttgtaataggttttttccgttgtattatttccaatattagtagaataagtaattttgcagcttataatgtggctaatttacgctataggctgtgttaagcatgcttctttgacagaaaacacactctttttccatgacaacaggactggactataaagggcggggcggtaagctctctatctttaaggataattatacttgtaacttatggtataagtaaattatttttgaaaaatatgcaaaatataattaatgaaaatatttgtaataatttttatattatcgaaaaaatatttacaataaaaaaattaagaaagataaatgttttggactttggtaattaataattaataagattgggtaataatttcttttaagaaacaataaaaacaaataaatttttgaaaggattaataataattcaaaaataaccattgtgaaattattattatgatgtaattatatgaaaaataataaataaagaaataagtcataatagttggcttttgatgcaaaaaaagcgcattggcttagaaatggttagaaagaatgaaacaattacaacagagaatatggttgtttgttaagagaagaaaaaagaagaagaaccaaagaagaaagaagaagaagaaccagagaagaaagaagaagaagaaacatagtcagaggagtcaggggcaggggaaagggctacctaaggccacgggcacgggcacgggcacgggcacccaagcgccacatttccatttttctctctatcttttctaaaaaacaaaaagaataaagatacaatttttaacaaaacactcctttgatcttgtataattcccaatacccattacccaaaacatccttaatcttatgtttatggaattttttttaatcagattgaaagtgggtattggtgaataaaggagaattttgtatttgttattgttatcaattttaataatataaataattgaaatttaaataattaaaaaaaatgagaaataataaggaacaaggttggagatgctcttcccatggtaagaatacagctatagctcctccaaagcccaatcttcatcgcctctaccaagtttggaagggtaacaatgtaatgttcttcttcttcttctttcaaatgttttataaaaatctcatctttatttgtatgatgattttgttgttttgtttgtttttgagaaatgaaatgagaaatgcattcatttctcataaactttgatcatatcttattttgtcattgcttttattattgttgaattgtgtaaatgttggaaatgattgaagcatggatttgtttatgaagcattgagcaaaatctagtacattgttaggtagatcctcttaaagattcaaatccttaaccacattaagcaaatttttcataatgtttcattgaatgtatcttctaaagggatgtgtgcctttgtttcttcttcaaaaatagtttcatttcatgtttcaaattgacttgtatgcggaaaaacgagtgctaatgcccctagatttgtattagtattgtgtgtttcttagcatgattcttattgcacctaggttgcttctaatgactgttgaatgtgcttgattgtacatgttaagttgctcaatctctattaaaactgacataacttcttttcatgctagaaattcatgtgtggtggaagattagtcttcggccacgatgctggatcattgttcttaacaacattcttaattggaggtcctgccataacattctgcataagaatgattgtgatgagcaaaggacaaaatccattctttttctaccctgtactaattggagggattgtcctcactcttttggttggtaaattggaactcttcttctactattcatttaagaaataattgcggcataagtacctaaaattttatatttgtaaccggtataaactcaataagtatccaatgttcgtcaaactgtaatttttattcagtttcgtcaatacaaactccattttgagtttattaaaagaagatttagacgtaattcataacacatgtttccgtttagaccaatgatttagaatttgggccttacatgtttcctgtttaagataataacgaagtttgtactaacaaaacttgtgaaaaattacacttttactaatattgagtacttatgttgcttataaattcaaaactttgggtatttatgttgtttacacttttactaatattgacttgtcaatggtttttatgcaggttttttgttttctgttcctaacatcgggtcgagatccaggaataatcccaaggaacacacaaccacctgattcagaagagacatttgaaagtaccccatcaatggaatgggtgaatgctagagtctctaatctaaaaataccccgaataaaggacatgaaagtaaacggtcaaacaataaaggtgaaattctgcgacacatgtttgctatatcgtccaccacgagcttctcattgttcaatttgcaacaactgtgttcagaagtttgatcatcactgtccatgggttggccagtgcattggattggtaacttattctttaactcttctattttaaactgttatgttattaaaggtgttatccttgattgactttgccatgaaactaactgcattttttcaccataatcttgtcatttcagcgcaattatccttacttcataatgttcatatcaacatcaaccattatgtgcatatatgtatttgtgttttcctggatcagcattcttcgagagcgatccaacatttgggttgtcatgtctcgtgatatcttatcggttatcctcatagtgtattgctttatcgtcgtctggtttgttggtggacttacatttttccatttctatcttatttgcactaatcaggtaaaccttctccttcccttattggtcatgttttgttgcattggctcattagttggagaagttcattagcaagtttacttattttctaagaactcaacttgactgattaagcttgaagatacattttagtgtgatattagattctgattgtttacttgtagttcaagccattcgaagttctgataacttcttttgttaaatgttttgcaaataaagttatcttgttataatgctaatcgtattattagtaggagatgtccctattgatgttttgcctattttgttgggcgatttccattaatgaagttgctataatatgatagagtaaactagtccaaaaatttcaacagttgttaccataggatcattcatcatcttagcctttactcattcacaagatcattttgttttatctatctctaatgacattatttatttcataataacatgatactcatagaaccatgtttttgataatgtagcttgaaaatttcggtttcaaatgtactgattctgttactattcttttgcagacaaca

SEQ ID NO: 15937 - DNA, 11579 bp, Cannabis sativa
attatattgaaatggtttttatttagggcacaaaacccaacactaccaatccaacggtgggggttcatccttgagaaaatccacccaagatggcccatgcaaggggatcgacctataattatacctgaaggcacacagggcaagggattcggattccaatccttgacttcttctttttcgaattttctcctaaaaactaaaggggtattctctgtaaacacaactgtaactccattatcaactctaaaatattcctactaagcttgttcttcttcaagaggaacatagtaaagtggagttaagtccatctctttgtatttgtatgcacaatcaccggcctaagagcctaataaaatggactcgtggactaaggataattaacgcgtaaaccacgtaaaaatgtcttgtttgttatttttttatttacaccttcattgctttattaagctctaatattattttgttgctaaaaaacttgataaacaatgtctaatagtttgttcaatttagtggtttttggtcatgtgtctgatatagactagtggttagtccgatgtgaatacaatgtgttattattttatatttatatttttgttcattttttgttattttcttataattgtgtgtttattttttttttgtggatgacagggtcaactatctttgcatttttaatgtataatggtgtttggcagcgtgaaggtagatattggagttttaatggagtagaaaatttgacattcaagatttatacgaacataaattactcacatttggttgagcttttgtataaataactcgaggttgaaaaagtatagtatgacttgaaattagaagtgaatgtcactcagccatgagattgacaatgtcactcatccttgagagtgacaatgtcagccgaccatgacattaagaagtcactcggcaatggcattgagaagtcacacagctttcatgcttgagaagtcacttgcattgcacccttgagaagtcactcggccatgcttgcatgcaaagtcactggccatgttttcatgcaaagtcactcgaccatgtttgtatgcaaagtcactcagccatgcttgcatgcaaagtcactcatccttgtttgcttgaaaagtcccttggccatgttggtatgcaaagtcactcggccatgcatgcatgcaaagttactcggccatgcttacatccaaagtcactcggccatgcttgcatccaaagtcactcgaccatgcttgcatccaaaatcacttggcacacatccatgaatgtcactcggcaaggtcattcacaatgtcacttggcaaggaaattcacagagtcactcgacaaggacattgtgaatgtaacttggcatgcattcacaatgtcactcaacgtgcactcttgataagtcactcgaaatgcaccctcgagaagtcactctaccatacccttctcgaggtcactcggccatgcccttcccagatgtcactaagccatgaccttcccaaggtcacttggccatgcctttcctgaatgtcactataccatggctttgctaaacttagtggaatttccccaagtaagaggaaggtgaagcaacaaaggtacagtcacaaggataaggtacgcacgcgaggaatgcacgaccacaccttttgcaagctttgaaatctagagggaacaagtagttggagcatcatttcagcataacctggaaatccaagcaagggtacactgcaaccactaccctgtaacccgggatcacctaacacatgacaaaggtacagggcatgaggattccacctgcaacctccagctcttgtttgccaatttgttccttggaaccaccgtgtactctaggccattagagcctataaataccccttccttagatgtgagaaggggttggaaaattattcttgtaaccaccatattgagagtaatagaaggttttcattttctctctacattgagaaatccacttgaatttatatttcatatttttccctcatcttagttctgagcttaaagtagagtttgattttttggctaacaagttagttaacgagttctcaccatcaacaatttggcaccatctatggaaacgataagcttaggccaagtcattcatttatactctatcaccttaacatgtctgggcgcccccatcatcttttagatacgaaagttcatctggacatggttagcgaggtcctccaacaccctttgctggagaagaaggtttctctggtcaaagagcccgggtgtaggaaggaaatcttcatcttgaaggacccctaggggggcctacaacaaagtggatccaccacatccattgtactagagggtcaaggcgagttgaggctagataaaccatcaccaataaggtaccctacaccacctgggaggagggaaagagccgagagaaacctggataaatattttcaataccatgtgggtatcacacgtctcacaaaagaatgtgagcatcttaagaccaagattgaaaagttagtgcatcatgtatacttggaaaatgcgtacaagaggatcagagacctaatgagtatgtgaaggagaagtacacaatgaggcacctagagaggtgagagacattagatccattattgggggacttggcatagaaggcaaaaatttcaaggggagagataggtatgctcatgaagcaaggcgagatcctcaagtcttcagcttagaacaagagccgccaaggagcttcaaggaaaagaatgactcaatcactttcacaagggaagatgcaaggggtgtgcatattccccacaatgatcctctgatacttcaatgttttaatgaatgtcgacagttacccatgattatagtaattgattcataagcctaaagtgctagttcatgtgttggtgagtttatcaagttgatcataccacacgtccagattatatctgtacctgaaaaaattttagaggtcaccatggctacatgataacaaggcacctacattagattgactaaaaaaaactaaactataaaaataaaatagaggataaccaagtcctaagaagctatcaactatctgtgtcaaaaatggcatcgactgtagcctcagtctctcctagttatttttgcacacttcagttagtatttttacaattgcataaatttttgtggtcacctgtgatttttgtgatcgagtttataaatctatagtgctagtgctagtgcaattgcccctccatgcagtacacaaatcaaaaataaaagaaacacatcaatcatagaaaactctttggaatcaagacactgcatccaccagagtttttctccatgatcgcaggaatccttctaggagtgggatgttgcccaagttgtggtcttcctttggttgctatactcctcctaagtatgggacattgtatttggcacatgtttaccctaatccattatatctaatccaaaaattaaagatttgattatgtaattctttccaagcttcatcatcaagaggagttagacaagattatggactttcaagtaagtgtatcaaaaaaattatagggatcgattaaagttctgtgtagaccatgttgagcatcatcaaagatagggatcgattcaagttctgtgcactgcctgatgctgcaattttccctgtggttatggagttttatgccaatacaatcaatcatgtcaaatagaaagtcaaggtctagggtaagaaattgtccttttcatgtgaagagataaatatattctgtgacattaaagacattgataatgttgagtatagccaaatagttcaatagccttattatgattttatcatccaatgtctttggaagccaggtactcaataggttcatggtgatgatggggagttaaaatattttttctagcatgatatggaatatgagtcccgtgttaggcttcaatttattggtgctaagcaccttcccacaaagcatttttctactattgatacaacttctaccaaactcctttatgatatacttcatgaaaagtcaattgatgtcggcagagtcatacaacattccatcatggaccatgttcaaaatgtcaggaaagggtttgctcatccaaatttggttttggcactttgtgttaaaactggagtaatgtaatctaaatcgaaagaaactttgcaacctcaacatatctttgataaaaatattattctccaatttgatgacaccaaaaagaagaagaagacagtggtatcataatctagggaagagggtaagaagatgagtatgtcagagcaaatggagttaatggaaaatgagttggcttttgatacttaagaaatgaagcaacacctcaaagagatgatggagtgggctatgtatcaagatgcatgtgccgaaatgaatgacatgagttttgggattgacgtgtccacttatcctcaaccaccaatgtggatgcaacaacctaatccatatacaacacaaaaagatgatgaggatgctacagttaacatggatgatgagcaaggcactcaagttcttaacgatgaagatggcgtggatgagtgtcaaggaggtgcgatggggtgatggagtgcatgtgtttagggagtttttcttttcttttcattttttttgttcaatagattttatttggacaaggtcatgtttaagtgtggggggtggtgtgaactccttttgttttttttcttcctattttgttatgtctcttatatttatgtatgttgtatttggtatttgtagtagttatatttaactgttatgtctagatgtgttttaaataatagttaagttaacagtgatggtcgatgatgagacttctaattttaatggagataatactaggaaggtgatgaactctacagtgtacttaactttaaggtaatgacttctcaagcttgatttttaaatttttgcacaacaattgaatcattatatttgctaatatttgaaagataattcatgtttgattgttgatatttgatctcaaccgctctagaacttatatttgaaaattattttagaggcaaaaaattgataaattacacatgattttgtgatatgatataggcaatttccttagatcgattaagcttttcaagcctaccctgtttgtaaattctctaattttacccaatttgagcctaaaatattgaaatcttatttttcttttgaccctataggataaccttttgagccttaaaaaagaaatttccttcttcacaccatagtacactgatgtttatgtttgtgtaaaggtgtgagagttttattgacgtgaaaatattgatgggtgtgtataagttgtgaaaaaatactattcccttagaatatatatttgtaagttgcaagtatttcattaaaaaactaactaaaaaaataaaaaattccttgagaaatatatgaatacttgcaacaatttaagtgtggcagaatagtaagtttcatgctgaaaggaaaaaaataagatacgagattgaattgttaaaagaagtgatcggagaatataaacaagaattatttgagataatatgttgtatatgtatgctatgtgtgtgatttgagcctaaagtaaccttctgatctatctttcaccctagcattacattataagtcttattaatttttggatggtgtgtaattatattagtggagagtattttgatatctaagcttatggagtttattttcattctaaatacacatttattttgagataagtattgattgttgacatgcatgagttgatttaaatattagtaataagatgaattaattgagcacaaacacacaaaaaaattgaatttgaaaagttattatgttgagttgaaattctaaagattgtggaattaagaatctttatagtattatctgtttgaccaatttttgagactaaaattactgtcgatgaaaccattatttgatttatttgtttgtttggttgtttatttgtatgttgaatttaattagtatttttgctaagggactagaaaaatttaagtgtgggggaatttgataagagcactttaggctataaaattgttgatctcttcatatttagagggtggtgtttcttaacattagtgtttttcatcattttatgaattttttgagttttgaaagtaaattgaattttatgagagaaaattaatgaatttgttgttttaatgactatgtgatgttagaggattgaaagactcatcaaaataatattttcttagagtatgaaaatccatgaagacccaaaaccctagctttggggttgtagcgaaggttagagcttcgtcatagcaaacaaatgaaaattgtgcttgcagggggtcgtggccacgacaaagggagaagcttgctgcagctaggactcgattccatctttttaaatttttatctttttttttttaaattgctaatttttgaggggatatatataggacctttagggtttgattttgagcacttttgaactatgtttttgaaagagaagtccaaaagagaaagagaagaagaaggagattgcaacaccaattgttcatcatcattgtttctttttcttctccttaatctcgtactttttattatgatttttattaaaatatctagtttaaagtagttttcatttagttaagggttatttcaaaacccaagacatgaattcctaatttctatgatgaatgttattagtttccaatataatgagttgcttctatttttctattttcaatgccatggttattgttttaaccttgtttagatgatcactaaattaggttttactttaatctattatcatcttaggattactattcacctaatagtctatgattctaagtgtatgtgattaattacaatttttattattatcaaaagtatttttaattgtgatgaagaatagaacttaggttaaatgaattatatgctccattaatttattgtctagattaatctatctccattgaattcaaagctttaaataagtcaaataaattatatgcttcataattagataaaaagttaattatagagtgcttcgccttgattacttgcaatagatagattagaataattgactgctttagcattttttgcaagattaataatttgattgagaaattgaaataacattcgttataagaaattaaggatgattattgagggtagatattaacccttaactatttctttaatatcatagtataacattttattttccttctagtttatgttatttaatctttatattacaaaccccctttttaattcttgttactaatttttgaataatcggataatatagtcctcgtgggatcgacccttacttgcttttatactaaaataattttaagtattagaatcaaaataattagtaaatttgatacgacacacgacatacatcaggaatatattttagcaccatatttttgaagctgatcctctatcattttgaactttcgttccataaaattattatggtactgcctttgttttgttgccatccttaaaaattttaagtttgatacctaaacccgtctcttcaacaatagaagaaaaatgaaggtccaaaaacacccttgtaaactgaacttcgtccacccttagaacgtttcacttaagtaccactctcaaaaccaaactcagattgcgaagaaaacacaacaaggaaaatgttggtacctctctcaaaataaaactctaatggtggggtaacaatccccaacgttttttactagccatacccacaacaccgaccacctaacaccaccacgtgcattgttctttggatagacttgaaagtagcaaattttctactgagcattcattgtggcattggtcgaagatcttgagaactagaactacttaggcaaatcctataattggagatcgatatgcatctagctctaggcttgggtctcaaatggtaaacccaagggttgaattaaaaactgggtcgttgtaatgattgagtgatgggcccaatttattatttaattaaactgccccatggatcaagtcgaaggaaagaaaacctatgcttagggcccaaaatggattaagtagagaaaaagacccatgtgtgggggacccataaccataggagatgagtgggaccatttttttaattgattgggtctgtaatgaccgcatagttagattatggattagtaaaggtaatttgaattagctattggcattttatgattatatacgattgtataattattgtggatcccacttttagaaatgggcataagagttgtaatttctcagttttatagattttattaaactgtaagtgtaccatttatgtcatatgcaaattttacaatttaatgatttttcctttgtgacgatggaaaatgcaacgaatggccaatttaatcacatgggttagcttagaacttttatatttagcggggtattcataagttgatatttgaaatttcagtattaggcggtgttatggtgttggaccattttacccctaagcaactttattaaataagcttttatgtgagtgtattttagacattttgactttgtagataggtggattgtccattgagtggctggccactaaggagataagaaaatttagatttatctttgtgtttaggaaaattaagaaataatcaaagaaaaagacaaatttgaaaattcatattcttgctctctctctctctctctctctctctctctcttgcttcagctcaaccaaaattaggggagaacttagctttctttcatcaattctgcagtttttagcaagattccaagtagtgaaaacctaaggtaacaaccctaatacttttcccttttgtttttggtagtttctctttggttcaaaccctagctgttcttggactgtgttctgagttaattttgatgtttcataagctcttttgaagttatttgattggttaattcttgagttgggcaagtttgagttcaagaactcaaactttgcccattaatggtggattgtgtatttttgtgtgatacttggttttaccacttggaaatggttcataatgatgattttacatattctagagcttatggtaaagtttggggtagttttgagttgaattggagactctttgtttttctacagtaaaaaatggtagaccgtttctataccatttttactggtgcaaacccagaaaaacagcctgccattttcaggcagtttccctattttgttgattttctcgtgtttcctcaataattaaggctttgctatgctatttatcgatagagaaacttttaatttcaagtttagaccccaaaaaggttttagaaagttgtttaccgatttacgtgattgtggcatagggccttcattcagcacgtaattttccattcaagttaaccagcacacttgaatttggaaatgagataagactagcatagaatgtatatgtatatgtgtatgtattttatatgcatgctattatatgattcatacgctaccaacactagtacggtagcggtatggagtgcatgtggtgtagcatatgatgtttaagagtacattctggtgttactaacactagtacagttaggtacgtggtgcatgtggtacaacactcagtggtactcagagtacagttcaaaccctaccaaccctagtacagtagcattacgtagtgcatgtagtatagagatcgtacctttgttaagaacgttcttaatcatcttgcaagtcctgtggataggtgtatgggcgcctaaatgcaactcggtaatatattttatgttatatatttttcttactgagtatgttgactcacagttattgcttgcatgtgtaggtaaataaaaggctaaggctaagcaacaatgagtccggagctcgaagatgattatacatgtcaagatggtacgacctggagatttcagtctcgggacgacttggtcttattggagtcgttgtgcgacatatttataaagttcattttagttgtataaatgagtttaaaaaggggatcccaacccttttgtataaatatatatttattattataaaagtttaatgttaattataagttaaatttatcacaatttttgataaaactctttgattagcaaatgtgtgcacactataattaaaaaaagtcactgtgtagtatgcctaatcattagggcattacagagcctttttataaaatggattaaaagaaaaagggcttcgagaaacactttcgagaatccatgcgtctaatgcttctccaccagtgtccccgttcttttttggcatgatctccaactagtcaaccttctccgtcgacgtctccacctattgtttattctctgacgtggtcttcagtggctggcttatcttcaccaccgtctctaacagcctttctggcatcaattctagtagaagaaccgagtcagcctctcctgtagcttctatgtaagatctctgactcttatttcagtgttccagcataggtgatgatgatggagccaccttcccattactgccaaagagtctcaaatttacaaagtcgtagtcactgtcacccaccaccatttgttcatgagtttgagcggaatccatggagggacaattgacattctgattgcaatttttattttgtacaaccagaagagagcatcgattcagaatccaaagtcaccttagtcgactccaaaaatgattgctcaaccaaattgatcgaagcattattacttccattaaatttctgcagtgatgttttagtaccacggaggagtctgagcagcaatgtttgttcgtaaagaagctgatccattttgtctatcacgaagtagatttccatggcggattaattgctatgataccaattgatgtaacccgatggatatcacttaagaattatagagactaacaagaacaacagagaaatctttgtattataatttgatattgcaacaagaaaatccgagaggaatggaccctagggatagcaaaggcctaggctctccattatgcaaagagaaaacctctaaattcattggataaccctctcatcttagtatcttatatatattattctactttctttccaaacactaccccctaatagaagaccaatttactcttttatttgctattctctctctaaccctattaatcctggggtttaacatattacttgttatttgagacaaaatcttaggtagtgtgtgtgcttaggaatatgatgtagacaatttttttttgattcatttgagcctttctagtcaatccaaaaaagttgtatcattagctaccccattttagtctaagcctatttgttgtttgaaaccccaaattgttgaactttaacgaaaatcttatcaattatcctacctagggttgttcatataaaccaaaaaatcaaggtttaaattcggaccgcgaaaatctgaaccactatagaccgtaaccgaggaaatcatttttggtggtttggttaattcagaccatttacggcgtaatagtttgattgcggtttgtaataaatagttaactgttgaaccagaccagaccgtttataatgaataattgatttatatatatattttatatatgactatgtgtataattttaaacttttttgt

SEQ ID NO: 15938 - DNA, 6913 bp, Cannabis sativa
tatttataagatgcataaattacttttttttattgttaattaattttgagatgaaatttgtgcattttttgtccttatgttggatttttttgctgtattaagggttggattcagatatacacttaattttaagctaattaggatttttgtcccttaaactttaacatgtatcaaatcatgcctctgaacttttaaggtcgttaaaaatgcccctgaactattgagatggttggatttaagaacttttgtccaattttagtaaaaaaatataacatggattaaaattcagggggcatgatttagtacatgccaaagttcgagaaatatgatttggtaaatatcaaagtctggagaacatgatttagtacataaacaatcacttaaataataaaattgaataaaattagacaaaagtccttacatctaacaatctcaataattcaggggacatttttaacgaccttaaaagttgagagcataatttggtgcatgtcaaagttcggggtataatttagtttatgttaaaatttgagagagattatttagtagatattaaagttcgagaagtataatttagtataagaacaatcacgtaattaataaaactgaataaaattaatcaaaaaaattttaaatttaaaaaaaaattaagagttcgagaagttcagaacataattttgttaaaattgccaagcaaaatacggagtgcatatcgagtcagatttaagcacattgtaataactgtcactgttctgtaaccatctaaaaccctaaaggtccattctttacaatctttaacctctacaatggcgttctccttacaagctccagtcaaacccgtaacctttcctctatccaaacctctatccaagaggaaaccccttttcgtttgcaacctatccttacctttaagatacccactcaccagcatcgaacccgaacccgtttacgcttccgtcaaggcctttgcacccgccacagtagccaatcttggtcctgggtttgactttctaggctgcgccgttgatggagtcggtgattatgtctccctcagcattgacccacaagttcaccctggcgaaatcgccatctccgaaatcaatggcgataacgccaataagctcagcaaaaacccactttggaactgtgcaggcatagccgccattgaagtgatgaagatgctcggtgttcgatctgttggtctatcgctttcgcttgacaagggtttgcccttaggaagtggtcttggatcgagtgctgctagcgcggcagctgcggcggtagcggtgaacgagattttcggagggaaattgggggttgaggaattggtactggctgggcttaaatcggaggagaaggtatctggataccatgcggacaatgtggcaccggcgattatgggaggtttcatattgattcgaaactatgaacctttggagttgattcggttaagttttccagaagataaagaactgttttttgtactggtgagtccagactttgaagctccgactaagaaaatgcgggcagctttgccagcagagattggaatgcctcaccatgtctggaattgtagccaagctggagcattggtggcatctgtgttgcaaggggatttagtggggttggggaaggcattgtcttctgacaagatcgtggagccgaggcgggctcctctgattccgggcatggaagctgtaaagaaggccgccattgaggccggtgcatatgggtgcaccatcagcggagctgggccaaccgcggttgcagtgactgataatgaggagaaagggaaagtgattggtgagcaaatgatcagtgctttcttgaaagaaggcaaattgaaagctgtggccaatgttcagaggcttgaccgggttggtgccaggctcattggtagtattcccagataattgatgaagggtttttgttgaatcattataatcttccatggtgtttcggtttccagttgaatttgacaacaactcataacttgatagatatggtggtgtggccgaaattgatcactaaattcaagaatttgacttgggcttgttttcaaatgttgttattaggtgcagtgttgttctactttcttcaattggttatgaagaaatgtctattttaaacatgtagctttcttttgctcatctcggaaataaaatggtgtattaagcacctaaattcacagccccaaaatgggtggttgcatctctctgtactctgaatcttttcatgcttttgtttctatgcagtaaacatttgctgtcggtgttatatttctaatgatgataaatttgactaggacacttgaggttaacagttctctgaagaattgtgttgctgtggccaagaaccttttttgtcctcacctactggttgagaaattaatggtctgataggaaatttattttgccctcaagcaagacacgtccttttaggactgagtctaactgtgactaaacatatatttgtaaatatgtaatccattattttatagctgttgaagacgattgagtgagtgacactcaaaatattgacttcaattgggaaaagagtgctttttttccttttcttcatcttttgatagcttgttgattggagtcatcatccccttgattgtggatctcgttcaaatcgtctaactgaagctaattttccacttttatggctcttccatggtttttctttgggaaatcattcttctctgttatcttcttgactatatccttatccatcttaagctgtgttatcatcatagtcgttgcctcatggagaattgctttgattctttggtgtcatcactctgtagaaacagctagacgatcgacacaatctgctttggtggaccgaggttttgacagaaagatgctgcgctcgctccctaaaattgcatacaacgcagaagtttacgggaagaagctgaccgagtgtgcaatctgcttgatggagtttgtggatggggatgtgatgagggtgttgacgcactgtggccatggcttccatgtgaattgtatcgataagtggctcgagagccattcctcctgcccatcttgccgtgatgttctggttcttgaagattgtcttaattgtaatggggttttgagaaaccatgtataggagtatctatctacacatgccacaaatttagtgtaagagttcatcatattgagaagatgttctggttgttgaggacaatattaccaacaaagtaaatgttaattttgtctatgctcttattaagcttaatggaaatgagtatggagattatagtgtccattctggttatgatccaacttggattccatcctatgaataaaattatgaacatactgattttattattgataattatgcttaatttattatcagcaaatttgatgtttcttttttcttctagtaccaaatttaaggtatcaaaatacaaactttgcagctttctgacattcccatgtgacccaactcccaagacacttttccattttgccttttagcaatagaaagatatttgaaacaaaatgccaaactgtcaaactcagaactgtgtttaataatcgattattgttttcttaaatgtaatgcaaattcatattgagaattggttttcatttatttgtttggtgaaatgaaacttaacaagcatttgataagaattttatgccaacatccattggtatatacaaaggtaatttcacatacaatatcccctttttttaccgtttcttcacagccctgaggaaaatacattccatcaaaactaagctagcaaaagccaaattttcacaaaagcactccttgtcttcatctagatgcaaccaggaatgaggaatctgcatgatttaccttccataatctcaacccaactcaactccaaaaataggatgatacaccagaaatgacctcaaagagttgaactttttgttcataccaaatataagaaatgagctaagcaaagaaaataatcctttctacacaaatcaaacataccatttcaaagacccccatggaatgaaacaagaaaatatcaaaacagaaccaagaaaataaacaggaattgtcaaaacttttttctttcagaaaaaatctgtcaacggcgaagaaaatcattcgtgcttggcagctgcaacctgcttggcaccaacggagaagaactctgtgatgacttcaaggggcattcccttggtttctggaactttcaagtaaacaaacacccatgaaatgacgcaaacaattgcatacatgccgaaaacaccaccaagaccaacggatttgagcataacgggaagtgagtaggtgacgatgatgtctccaatccagaatgtgagagcacagatggcaatgcagagtccacgaactcgggtagggaaaatctctgcacataagatgttaggaatcggcccgaaccccataacaaagcaacagaagtaaaccacaacactgactgttgagattgatgcatgaagaacattccccaaatttattatacttgaaaggactaggaccacaagagtcactatcaagattgggattgtgtacagtagtaaactcctgttttgtcaaaaataaatagtaagaacaacaacaaaaaaacaaaataaataaataaataaataaagcaatttaaaatatttgattaccttctgccagagatatccataagcctcatggccactgctatacaaggaagcatgagtagagttgttactgcactgataagcaaagatgcagaagatgaactgattcccaagtttgaaagaaggactccaacacctgcctgctcaaggatttgaggtgtgtagtagagaaccccatttatgccagagaactacacaaagcaacaaaagaacttaagaggcaagcaatagtgcatagtttatataacagcaaacaaatgacaaaaaacaatgagcatagggggcaccatggtacctagtacctcttataattagttaagcggttttctataatctttattaaattaaaataagtggaatccgatattacacctcacagaagtgacttttagcatttctcagacagaacattgctatgggacaccaaggtgcctgacacctctacaaagtaacgtcttataaatggttctctataaccctttagcattcctcaaaaagaatattgctatgagacatcaaagtgcctagcatctctatgaggtaacgtcttataattagttagcggttctttataatctttattaaattaaaataagtgggacccgaactccaaaatagcagttctctataaggcaatgcatagtaggttctatgttttacctgctgaaggatttgtaatcccactccaacaactaaagcatgtttgactccaggttcaaaaagatctctccagcttggccctttagcagcagatgggtgaaccatagctggtccaactggattctgattcacaaggtcctgtgaataaagagcaggttggctaaccagggctgcagcctgaacaaactcaccatctgcctgaacatcaccaccagcaagagaaactatagaccctctgcgagatcccgggataccctcttgatgcagataaattctcttaaatcctccttcctttttaccatcagcgccttctctttcggtccatttccatgccaattgccatcctccaccaattccagtactgcctcctggttcaccagcagtaccatgaactagactgctttgtcttatgcttgagagactaccatgagcaggtgcaaccatgtctttctccatactcgttgtctggcgagatatcaatggactatgcaaattgtcatcagaatcagcaccagctgcatctgaattgtacccttccccttctctagcaaggctctcctcatcccaatcttcatttctaggctggtttcctccaacactgaacatactaccaaaatgtgggaagagcatgcttctcatacttccactttcagggagcttttcatgaacactgccaaagagagtgacaagaggatcaacaaaaccgctctgattcgccatgcttccatgcctagaaacaagcccaagtgcactttgtccagtgacaggtttggcaatccatgaaagaccttgatcaggtccatataacttgatttgatccttctcatcagatggatcaacctcgtcagtaagctcattggctggaccaattatgtattcctctatagatgtgtcacctccaactccaagaccctcaaccaacaaagccatctcacctattatacatatgaatatgagattcaaaacttgcaaaatcatatatataaaactaaaaagaaacagatcagaatcttaacctgcaacatcttctcttcctctcaacctctgaagaactttcttagcctcaatcatccgacctttactcacaagccaacgaggagactcaggcaagaaaaataaggtcaaaaagaaataaataacagatggaattgaaagaactccaagcatcaatctccagtttggttttggcataagggacatggcaaaaaccatacaataagagagaaacattccaccagaaccagtgaactgtggaagggtattcaatgaccctctaatctcaggtggggctgtctcagatatataaactgggaccaaagtaacagctataccaataccaaaaccatccaaaagccttgccaacaacaaaatatagacattaggtgaccataacattacaagaccactaacaaagtaaagcatagatgagataatcaacaagggacgacgaccaagagaatcagctatggctcctgaacatgttgtgattaaagtggctccaattagtgatgtagcaacaatcagtccttccaaagtgggttggctatccaagttgaaatctttctttatatacaaaacagcacctgaatcaaaaacaaaaactcataattcaaatctaa

SEQ ID NO: 15939 - DNA, 4466 bp, Cannabis sativa
cattctaagagaaaatgtttgtctatttaatgctgataaactgcatttcgggcagcataaagttttcatatcgaccattgtaatgcaactaaacatgtgactcgtggtcacataagccaaaaaaaatattaagaaagagcggaatgtaaagttagggggaatttttgcaatagaaaaatgtttgaggggcgaaaactttacaaggatcatagttcgggggcaagacatcctattcatcttaacattaataatacattattgaagaaattttacaatagtaaagttattgaatccaatcaagaaatcagtttcaaagcttactgttcatattcaagacaaaaaacttatacaagttaaaaaagaagagttaagagtgtaagaataaaataacaacgaaatccgcacattcacattaggtactcatgagtttcattacctcagagttagagatatattctctgatgatataccaaagttgtgcatttgtatccatcagctgtcattagcacagacaaagaatgatgatatcttgtaagaaacatcataaagtgaaaatgatcgaaaaatgtttacaattcataccaagaactggaaaccactttcggttaatcgtggagcttctttctccctgtaaaaacagcaaaaaaaacaaaaagttgggatcagatatggaaactacttctcgagtcattatagttttaactcaaaagcacctttgactcaaaaggccgcgctggaaaaccttcatcgtagaagagctaatattggacggcctatcagcttgagatgagttaataagttgcagcaagaagcactgggattaacacgacagcacgtcataagaaagagaaacctaaagcataaaacaaacttgtagatatttgtatcattggatatcatatagataaccgattaaattaagagcctgaacacaatgcccggaaagggaaattgtgaaacaaatgtaaatttcacacctcccactgttcgactgcaaaagcattaagttcctccgagcttggaagccttcctattagattggtagccattggttctcttggcaaaacttcactgcaattatcagtgaaaccaaatatttaaagtaagaacagaaaagagttacaacactccatcaaagagctatttcccttgcatgaaacccgaaaaaacataagaaacataacatcacaaatcaaggggctgcgattgaacacaattgaaaattcaaaacttcaagcaaagctaatacagaatacagaagaaaataaataacagggctagaacattaaaattaaaatttcaatggagaaggaactatttaacttgagaagaacaaatccacagcattatttgattgttggattcaagtatttccattaaattttatttacaggcgtctgaagaagacggaagttaaggagaaacaatttggtacatgtcaaaatttaggagcagaatttggtacatggacaatcgctacatattaggcatccattagtaaaattatctgaattggactgaagtccttaaattcaataatttcaatagtttagagataattcttaacagcccgaaaagttcaatggcacaacttggtatatgtcaaagttgggggtgaaaagaaatcctaattaaaataaaattaaaaaaaaaaaacttacccattgattaaaagcttctggagattactctgaaacactggatttaatctataagttatttcccttttcctgtaagaaatatattagcctaaacttaactgtaattcagttgaattttgatcaagatcattgctttttgttctgtaattaactttatataatacctgtcagaagtttcagtaaatactctcaactgaagtaaacgatcaatggcaactttatgcttagaagctccatcaggaagtacccattcctccattgatttagcacttacaggaccttcaatacataacatttgcaaagcatatttcttggccagaggtggcaaagacctatattatacataaagatatataaaatccccaaataaatggcaataaaattgggggaaatgagaaaatgaaagctgacctgagaatggcttcacagatgaatgcattggcgtagagagaatcgagtttcatggcgggtaaggaggccaccatgtccatgaaattcttggctatgatcttcacctgaggcattgtgagtaaacccaaaattggtcttgtcaattctagggttttggaaaaatcaaaatcgagtcttttgggggggtttttgtgagtgaaaatattgggggttggggttctaaggttatggatgataaactattacactctaatgagaaaaagaaatttgtgtcataaaatatttaattttagaataatttacgatataaatatttaaatttaattctcgattataaataaatatttaaaattaattttaaccgtaataattttagaaatttgtaggtacttaatttaagtcattattcacgtgtcattatcttattattatattgaaactatttttttaagtttcaaaaatataacttaggtattatttttgctaaaaattaaatttatgtatttatttgcaattaaaagttaaaataagtaatttacggtataaatacttaagtttaactttcagttgcaaataaatacataagtttaatttttggcagtaataatacttaagttatattttggaacttccgtaggtacataggtgttaaatgtcaagtcattattcacgtgttatttttttatttgtatacttaaattattttttaaataaaaaaatacaaatttaatgatgtgggccaatcagaaattgttacgtagcaatttacttgacaagtatctataaaaattctagaattataaattagatattattatcgcaaaaaattaaacttaagcatttatttacaaccgagagttaaacttaagtgtttatgccataaattactctcctacttaaaacaaaataaatttcatgtctttatttatttatttattttaataaatcatgagattttattaatatcaatcagttaaaataataaattgcaatccaatcgggatatctctactgttaaagacacgactaggattagaataagaaaaacaagctaaaattattgaccacctgattcctggatcatttgacaaaagaaactaaaataaagtcagatgaaaaagattacaacatcgcatataatcttaaaaacacctatcgaattcatctactgctccgaagacacaacaatagattatgttacaataggttcattcaacctcgtaagcttgagcattttacttttgtgcaaggtacataactatactactaataacttctttagcccggagaacttattatttccaaccactaacagtgatttggtggcgagccatcaaagaacaaacgatgaaaaaaaaaacaaatcaaaatcatatcacacagacaagactaaaacattcaaactatgttacaacaacaagactaaaacacacaaaactatgttacaaagactggatttagtgtgggatcgatgttgatggatggtttgttcttgatgattgtgacagttactaaaatctacagtggtagtgtttggttttttcttatcttatttggttttgttatttcccttttctattttaagagggtgtttattttactatttttttatggtgtatttacattcttgtttgatttccagtcatttttggattcagatgcacaagttattatgatttctttcccgatttcttttgacaccttattttatggttcatcaacatttaatgtcaggaattttgaacaggatttatcatgttatttttcattattctagtttgaataattggaatgtttttacccaattttattgactcgttgtcattgatagatgtaatctatcacatgttcattcgaaataaaaatctaatattcttcacagtgttttgatgcttcccaactgactactgatgaatcatttagttaaaaatgttattaaagcttttgtcctatttaatgtaaacaacttgattaacctatttttgttgattttgctcaatgagcaatatctacatataatgaattatgtataattacctattaatggaaattccatttttcttccaaccaaccaagtaacttcattttatatctgtaatgcatatcttttgtcaattatatgtcgaaaatgttgttttgtaaagaattactaaaaaaaatctgctaagatgtcatttgacattaaaagccaaatgttctgtactaagcttttcataccctttgataatagtcaacagaatatgtatttgctcatatctgtcattttaataaattagaatctaatttctgtttcggtttcgctttctaagctatcaaaatctggtaaaccgggatgttaaggcgagggattggctaagatcgaaaaacacaaatctttctcccccccaaaaaata

SEQ ID NO: 15940 - DNA, 8189 bp, Cannabis sativa
ttacctacaaggtagacttgagacttttcttctaagaaatgctataggagaaaagataaaagttaaacaatcttagagaattcaaccaaagtagatctaaacccaaaaaagtaaacagaaaaatctataaaaattcaccatacaaattatcaaaatatatgtatgcattatacatacaagaaatgctaaaaatctaagagaattcaaccaaaatatgtatgcattaacatagtcctaaagtgtaatattactattggtaaaatttaatattagttccaacttattttactataataataattataaaaaaaaaccactaactataaccatgtagtactaagcagtgcctcatagcaaattagcaatgctttgaggaaagcgccatgttcattaatgtaacctaagaaaccatatttattttccaaagggactcactcagcccaacaaaatcaatttgagattacttctaacacttgaataaagattggatataattttaaaaaccaaaagaagaaaacaaaaaacaaaaaagacaaagcatataatacaaatacagagcactgcagagagcaagaaaatataagctaaaaatttacataataaagtactacaaatgctgcattatcatatattactaaaaaagatataaaagctccaagtttgattgagagtaagaccctcgatcaccactgtttttacacataagataatgcaagttttttaaacagcagcagtaacttcattcttttttactcctgcccatctattttcttctgctcctaaattcatctttcctcatcataacttagatttcctaacactaactcaccagtaagttggggttgttctttagttcttacctctttattaattcccatcatcggcagattttaagtaaagggtctcacccccgtcacctccagagctccctcctcggccttcagccgatccagaacttcccatatcttgcttactaccgccagccattcctctatgcatcccttctcctccagagccacggctgaaatcaggaaatcctccacctccaagctgctgcccactgcctccagcgctacccatgtcactttgcagcatgtgaagtcccgagtttccaccagagctcatgccgagctggttgtgcagtgcttgctgttgcaaagctgtaaatggctgctggttgtacagcatggacgagcctcccgccatgagtgattgttgagttatctgctgagcttgttggtgctgttgcatgtaatgtgctccaggctgcataatactacttgaaggatactaaaagaggaaaagatgtaaattagtgttcagctgttgatttattgaagttaatccaacagattcgctagctagcataactcatcataatgtttagtgcttaagagaatatgcaaaagagaaattttacataacttgttcaaatcataacttgtgtaaagaggaaagctggataatctaagaccagtgttcacaataaacaattaagtagaagactttgaatttaaaacttgaattaggaaaggtgtttgtacctgagaatgcattgtaggaggctggggctgagaatcagcaatagcagccaggtacatgaggtttcgctgcagcctagcttggttcctgatagaatgcacaagaattagaccacttctcccattttgctaaatttacaataacaacaatatctcaaagtatgatatcaaaaaccattccttttctttggtctaaatttcatttactgcacaaaatgaaaaatgaataagatatgatgaataacaaattatcaaaagctacagcagaaacaatctagcaatgggcaccagtatcttacccataaccatcatgactagtgaaaagtaaattattacaaagtacttttaaaatcaaaagataaggaaagtgagtctcacataaaagcctaaaaggaaataaaagtaagaaaggagttagaaaatcacatactctgcacattcacccaattttcctgaattctggctctcaacaatcttcaggatcagtgacttgttttcatccaaatactgccataataatgaatgaacaaaatcataaactagaaatatagcatcaaaaggcaaaaaataaatctagttttgggacaaacatgttttacttctccatggaatatattcatacatcaagtaataacattcttaagtacttctcatactatcactattaacaaattcctcggtagtgtatgactaatactgctgcattttgctcacaaataaataaagtttgaaagaaacattcttagttacatgtaatgaattcgacagatgtgatgttaattgttaaaaccaagtagtagagtttcataaaaataaaggcactagactagtacaacatcaatgtctcaacttttctgagcaataccatggtttgtagtttttgacatctggtgccggcccaagtcaaaaattaactcattaacaactcacctaaagcctcaatttcaggagactttttgcaaaaacacagtataataaaggtagggttcagcaacatttaatcaccagtcacaacttcgaattcaataataccaagcaaagttccactctttttaagtactaaaagggagccagaaaagacatataacagctttaagttaaggtcgtaggctgatgccacccacggaaactaagctagacaaacaaatagccatgtgacacaaaatatccatattcacaattgcactcattgctatttactacagaaaaagcatcatctttctaaaatggaacagaaaaacgacataaaataacattgaacacttaatagtatatacattacaaaaagagagatagtgaaagactagcttcctccataactggggtattaaattattgaacaataactgatcaaaaaggcgtattaaagaagaacggacaaaacccatattggaataactcatttgagaaagtgaacagcaacatcaatccataaaatacccattaagcattattatttacaccgacataatattcatagataaatttgaagctttttcagagcagtgaaatgcataaaacaataaaatacccaagtaagaaaactgattaaacgataggaatggttcaaaaagaagttaaaaaaagaaagatcaggtactagagcagttacagaaggcaataataatcgaaagacagaaaacccagtaagaatcaccaatcaaaatcttatcttgaaaaagaaaaagagtctcagaatattgtacacaaaagaataaaagtaaaaacaagatgataaccgaccaagataaacagaaagaaaaaagaagatgaaggaaaaaagaaatgaaaaaaaaaaaaaagtgatgagaatagagaatagagaacctgttgaatgtgatcagtggtgacgttgttgggataataggctgccatcatgggctgcatctgcatcaggtgctgctgcattttttcgagcactcttctttatatacccgactctttatacaacacacaaaaatacacacacactatctctctatctctctatctctcactaactttctcactctaaaaagtgtaataacagtagtcttcagagagaaaaacagagctgagaaaatactctctctgcaaaagagtgcaaaagagaggtcagaggcagagagagatgccttcactgctttttttctttccttctctgttttcactttctctctttgccttatacaatgacactaccaccacacacagatggtattaggggacactgagtgagacagagagaggaagaaagagagagtaagatattatgagattaagacaccccacaaaataaaaatgaaaaaagatttttccttgcaagtttttttgtttggttttggctatctgggactgggtgatgtctttttcttgcttctctcctcactcactactcactatatatgaaattgaatgaatgaatgaaggggtcacgtgatagaaaagagagagaaaacctgagaaacctatagatatatacaataatgaatctacatgtatagatgtttgcatgacaatatctgtctgctgtgttttgaggggtattttggtccaaacacattttggtctcactcactttcttttttcttttatttttttctgaaagtctcactcacttattgatgtgatgacgctcttgcttctgtcaagagattccccccaaatggttttgctttggttccttcccacaaactcactctactctctctccctctccaaagcgcgtgtatttcaaactctttaatacactcactcactcataaaataaataaaactcaactcatcaaaagtgtttgatttaattaaaaagcatggggttttgagccaaccccattattagatcatcattatcatcatcatcatcttactaaatgaaaattacaagtctaaccaaacttaactttttagatcagtgtactgagtactaatcaaaaatattgaatttcacccacctgcattcatattatattttcttcttaaatacatataaatgaattataaaggtacaagctactacaagtctagaacgagtagacttatctgtataaaaatgtatgaccttaaaaaaaaaaaaagttatgtactaactagcaaatggtgtgaaatgtactaatacagtagtcccacaagactagaccaaaccaatgctatatatttaaataggtaataagtcaaatataccttgctttttaaaaactaacaaaaaaaaaacacttatgatactcgaacagagtaaaaaaatggagttgcatgctacaagaatctttgtcagcatcagaacttttatttatttatttatttatctgctaacacagctatatctataataatattattcttttaaaaaaatggtctgaaaagattttatattttatcccatggctgcatggatagatagctctcttgtaagttgtaattatacttatatattctctatatagcacattcttgatttctaaaggctaaatttagctctcccccactagggagtatggaatcctattactctgcaaattgcaaatgaagaggaataaagtgacctattgctattgacactgacacagtaaagttatatattatatatggcactttctcatctatctcaaggtagaatttatcatcttaaaatacattgctagagaaaaatacattgctagagagatctatttattaattgtatcaagtgaattttttaattacttatatataaaaaaaaaaaaaaaagtaaagtttttaatttacacgattgtgatatttatcttctaactaatttatcaagcgccatcaattcttgcattaagttcaatataaatctttcataaaaaaaaaaaccagtaaatgcattgttttttccaataataagataagtgtagctaatttattttttttgggatgcagatattgacataaatgttccattcattacatcttgaaatgagattgtttttctaggggacccaacagaagagagagttcacatgcccctgtagtggtgatgtccagtccatttccaactgtcccaattaggtccctccaaagtcaaatgtgaccccaccatacttatcctgcaccagcacattatccaatagacttctttcattcatacattgagaaagagctaagcttaggtcaagccataataataataataataataataataatatttttgtttctgtattgtttaatcaaatatttgttcatgaattagatcactcacaaattcacaattcatgaactcacattagctcctaaaaaaggaagcaattctttgaaacgaagaataaaagtgtaaaaccaatgctagacatgtattttaaagaaaaatttagagaatgctagctagaaccactattcatggtttaaaaatatttttttatctaactactattttattcattttaatttggttaatatatattatatatattaaaaatatgttattttaatgatatatagagaaaaaaaatagaaaatctcatgtactataagatataaaaatttgatataaaataaaaaacataaaatttgggtgaaatattctaaaaaataaggtattgattttggctttaaaaaaagtagagattttgtcggaaatgctcttagttttttatttaagaaaaaattgttcataatttgaacaaatttatagcaagagcaccctattattttttagaggttgttaggtttctagtagtttcatatatgcagatactatacaaaattttacatttaatcgtaataaaatttgtgattaaaagttaaaaaaaaaattgtgactaattataaattattattattgtattgtaactaaaaagttcgtgactaaaagtattagtcacaaaaattacaataatttatcgtgactaaattaatgtgtttttagtcataatatttgttgtgattaaaattaaattagtaacaacttgtaattaaatactatgttttaattacaagtaacattttattgtgacaaaaagtcacatttaatcacaaaaaatttatgttgtaactaaaagattgtttctaaaagtaacaattttttataataatagcagtatatattacagttatagaatgtaatttgtaaataatttatatatagtactaaaaatatatttaaatatttagttatatgtgtttatttttttagatatatgtatgatatttcaaattttaaattttattttcaaaatcgtaaattatttttaagttttaaaagtctgatgagattatatacaatgtaaattatcattaaaaaagattataaaaacaaaattgctcctatcaatagaaaaagatatgggcaccctcactaagtactacagttattctctagttttataaaccccattttataatagtaccatggaccaaggtggttgaggtgaggtatgccttgcagtggggtcacttgtggggactgaaaccatggtctcaaaatacaacaacaaagaacagttagcttcactcaactcatcactccccccaaccccacctcttgtgaatagttttttgcctttttttttcaaaagactagtccatattatcataaatacactgggtcctaaaaacatttcgtaataatgatagcaaagaaagatgatgtgtattgtaatttgggtgagagtggtggagtcaaatctttagcaaaattaaaaggttggtggtgctcccggctccccaaacatgatgggtggttggggtgtctcaattgatttatgtactactctctactcactcactcatatcatatctatgttatatattccaatagtgtcttttccttcacctcctttttccttattgcttttgttgcctttgtatgtaggtgcagtgcaggtgctttgtcactgtgccaattgctaaagacagcggtaccttagctgcctagctacctaactagctacttagctagctagctatctccacgcgcttctaccaatgtatatacatatacatgattaaataatctcaattatagctcatttagcatgaagggtcttattatcaattacaaagaaaaggctgaaagagtgagtgtaaattaatgttaaatgtaattatcaatttttgagaaaactacaactctcgtttcatttggacgtgtttgacatgcagccaaggagaaaatggactgttgaaaggtatcaacggttactttttcagttctcaataataatatgagcctgtctttagctagaaattcatgatggtacacgtaggagggtactgtttatcccacgctctttttgcagagacaataattcaacagccaacgaaggaaaaatattggtaaataaaaaacagtttgactttctagatggcatctatagatatacgggacctcatgagtcatgaatggctaattgttaataaagatttttttttttttttataagagaaaaaataactgtaactctgtttccagaaaaaagtagcagaacaatttaaagaatctgagctaaatgtttaataaattatcaattttaattaaaattttattataatgataatatattataatcataaatatataaaagtttatattataaaaaatttgtattttttatatttttatttatttttttaaaagtataaattcatatgaatttaataaaaatactttataatatttttaaattattcttataacatgtaaaaaaa

SEQ ID NO: 15941 - DNA, 1939 bp, Cannabis sativa
ttctgatttgagtttaaaccatgcaattttccagccgacatccatctgttaaatgggcacaaaggtctgataaactttacataaccatcgacttacccgatgctcaggatgtgaaacttaagctggagcctgagggcaagtttttattctctgcaatcagtggggcggacaagattccttacgaacttgacctcgatttgtttgacaaagttgacgtaaatgtaagtttttcccaaaatattagcatgctggctttggaatatgctcaaatatgtcttcttttttgtaataacattaagaatggcacttgcaggagagcaaagctagtgtaggcttgagaaatattcgttacctcgtgaaaaaatctgaggacaaatggtggggcagactgttaaagcaggcaggaaaggctcccgtgtttctgaaagttgattgggagaaatgggttgatgaagatgaggagcatgagaataacaataaggaaggtatcttgtatttctagttcttttaattgttactaaacttgttttcctggaaaaacttatttttcttcttatgatttttagttgaaaacgatatggactttggggacttggatttttcggtaagtaacaatatcttaagcatttgtttttcttcatattaacagaatctcataaataagtacagtttggctctctgcacatttttaatagggagctttccatagtaggaaagacattatatggctttggataagaactttactgtgtatatacttaaacctcttgatcccggtgtggcatttcagaagctgaacatgggagggggtgaaggcgaaggcgaaggttatgatggcttagacggcgctgaagattttgatggcttagatggtggtgctgacgatgatgatgatggtatgctttacatacttgtttccagtaatattatgcagttgaaaagtattgaaatttgattgggaatctataacactttaactaatgtcttgcagaggacgatgatagtgacacagacgatgacagtgatgatgaagaggcatcacccgctactgatgaacttaatgaaaaggtttcgccggttgttgagactgcacctaaagcttgaatattgtcatgcattaaagttgggatacctaaactgtcaaccttagaaattttctctcttttttggggtgtatgatcaatggtgattggcatagtggtttttgaacagagaaaactacataggtaattcaatgaatgtctccagtctcttctgatgtgaatgttttctttactctctaagatactaatactttatatcactgatatcaaagaattggtgtgattctgattctgtaaatcttgcaaaaatggatcatgttattaatctttaatggtctttctcatgaaattttgatcattcatcttgtgatgacatgtttgtctagaaatttaaattaatttatgtgaatatattaatctgacaacatatatattttgaaaaaaaggatagaaacaacgaaaaatcagatagtggactgcgacttaggtttgtagaacaaaacattttgtggacctctcttttctagatctgtgtcgtcgagagtggaatacactgatttagtagatctagaagagaggtttttcttttttgtatgtattaaattgatatgggcgtctctttgtgtcgccttttagtttgtttactacgatttttcttctgccacaagtgagggtattaataacataacgggggaaggtcggtctaagacaaacaatctctttctctttttcaaaaaaaaaaaaaaataaaataaaggaaaggatagaagtgtataagaaacggttgtgcgagtccatatgtttttacagggaagtaaaaactaattatttcactgcatatgttgtgtaagagttttatggtagattttagttcacatgcaaaactatatatttaa

SEQ ID NO: 15942 - DNA, 8909 bp, Cannabis sativa
  modified_base (1725)..(1740): a, c, t, g, unknown or other
aatagggaaaccatatcaatatatgccagccgaaatatacaaagaataataaaatatttttgtcaataaaatatgccaaaaatggaattaacacatagaattacatagattaggtaagttgattggtgaattttgttttagcaaaatggtctttatatatataagtttgaataagttggtccttaaattaatttttttaacaaattggtcccttaatatataagtcttgataagttgatccccaattttttttagcaaattattagtctcccaacttttgattttttagtaacattaagtctccactcttaaaaaacagtattttttttttattaatttttcaattttttttaattttaaatatttatatataaatgtacatattgtcaaatatatatatattttttatttataagtattttttaaaatatatctaaaaaaagtatttattttaaatatgttgaaataagaaaaaaaaaatacatataatgatccctaagaaattcaatgaatatatatatggatttaatttgttcaagatttcaagagctcactaagagatgtgaatgacataaaaacgtcatgcgggtcctcatgactaacatcctgcaggtgctcatgaccaacatcctgtgctcatgaccaacatcctgcaggttctcaacgtcccacaagttctcaatgtcttaaaggtcctcaacgtccaacaggtactcatgaccaacaccctacaagccttatgaccaagtcttgcgggtctcatgaccaaagtccctgggtctcatgaccagcgtctcacacgtcctcatgatcaacgttctccatgccctcatgactaacgttctgcgggtaccaagacgggttagcagggctgaccccaagatccattgagggccaactcttaaggtccatcaatagggccgacccttggggtccttaagaggttcggccctgaaggtccatcaggagggtcgaccctctatcctcaacacctccctgttgggatttatgccctaaacaaaacctatttaaatataattatatttcctaagtgataaaataatagaaattattttatgttgcatggttcacatgattactttcatgattatatatttaatatgtaacttcaattaaatcctgaacatgtagttattcatgattatagtgttgtctacataatgaaaaataatcataattatatacttcaaagtatttagtctcatgatttatcaatgcaatgaatttacactaatatgataatcaacgataaaatttacttacacagtattatgtggaatgtcttttctaggacattagcaaagtatactagtattagatgtataaagcgtacatcagactagactgttattgacagtgaaaaagatatcataaacttatgattatatctttttaagtcaatatcacttagttggtcttaggtcaatggatcttaatcctgagatggttaggttctagcttaaatatatcatttgtgctctttgacttgttcgttaaaattgacaagatgatcattgcaatacttacatcttgaaacatggtagtgcaattgagtgagagcgctaatcattgatacataatctatagcttctataacttttagaagtgaaacaatgatttccttcgagcttggcttaacacgataaatgattgagcgctcatttcagtaattatattaatttactgaaatatcatttacaagtnnnnnnnnnnnnnnnngataaaatatattgaagggtagaaagataaattttaccatactcgatgtagattaaaataatgagtaattcaaagagcatctattttcggtatatagagcgttctatcaggagtataattctgaatctaaagtggagtcaaaaggaattaataagttaagaaatttacttggtaaattctaaatctacatattaagagcttagttacatagggccatggtccatgcattaactgggataatattgttttgtaatctcaattaattagttttaattattaatcaattaggattttaaataaatgctatgtcttatttgtgaattttaccaaggaagggtacaattaagacaaaaagagaattcaaggtttatttattaattaagagaccttagaaggtgtaattaataaatatatgtaaacagtaattttctttgataattatttataattatcaaatagatagaattaatatttaaataagtagagcaaaaaaatggcattactgaagaaagagaagtttgtttcattaagaaagcaaaataatggtaaacttctaacttatgggcttcataagggattcggccatgatggtccattctaagccattaggtctttctaatcagcccatttagctctaactctaaacctaatgaagccctataaatagaacattgagggttttgattcagaggatgactctagactctcttttgtcatataaaaatgaatcaaagaaaatctaatattttctatttgttattttcagatttctctttatttttcctcttaaaattttgtggtccatgatattaagagtatgcccacacatgtgaaatcattagctagtatagtgaggaagactgtgtcgaaccaaatcaaccaaatcaaaggagaaaagattaaggttcagatcttgattatgttctgctacagacatgaattaagggctagagatctgaataaaagaggccattatatattgctaccatcaatgtaataattttttaatctcttatgtgtttatttcattgttttaggaaattcatgtttaggatattagattataaatttataatcgaacatacattttagtaaatctagttcttggtaaaataagtttcaataactgaccttagagccatggtaataatttgttttcatgaaatatggatttaaaacgatgtttgattgatttgaatgtgttcatgttggtttatgtgattagttgataattgattgtgtattacgaaattttctataaaaaataatatgattttcaatttggaattattttatttaaaaagttagtaaaaaattaaataaattagccttttacggaacttaatttggattgaaattgaaaatatatgattttttgaaattttgaatatttggctaggggttaaaccctaagcatgtgcgaaaaggggaattttggccactttttattttttattttttatttttttaatttttaaaaaacatgttttaatgaaataaaatctaaattatagtagatttttgtgtaaaatcttatttttctacaaatgtgctattatggctgttttttaaaaatctgattatttattattttatttattgattttaattataagaccagatagttacatatttattttataaaatatgaaatgatcttatttttacattaaaatgatagtaaaatttgaaaaataatctagatatcttttaaatatctaaccataaatatcgatttttcaaaaatttattattttttaatatattttattaatttaaattataagattagataaatgactacttaattggtatattttattttatcttattagatattttgttaatgtaacaagatatggaaatgttgttaagatatttctatttttaataaataaaataatttttatttattgattttaattataagattagatattaacaaaataaatatttaaattataagattagataaatgactacttaatttatgaagatggatttttttttttttttggtgtttactgtataaaagaaatttttttttggccaaaacaatataaaagtaatttctgccgcttggtagtatttttgtaaagattaggccaaaagtcagtatttttgtaaattttcctaaataaaataatcactttgataagtttaatttaagcccaattagtattgagtttattcaattcataacaattatttatttaaggttatagtagtgggtacgacaaaccgaactcaatcctctctcacatgaactactccaactgtgaagacccatttgctttatttaaatgattgtcttaggctaattatattagtttaacctaattaaaatttattagcaacataattaattttaaaataaatgaaaattaattttttattatattattttaaaattaatttgcaaaaacacacttagtttaaagatataaattatagataagctatttctagaaaactaatttgtattttttctaatatttaattaaataaaaaatatacttaagttaaaaattaattttaattaatttcactaatttcagaccaacttaatttagaatatttttcttagatattaaactagaatcctttctgacccttcttatgtcttttgatagtattaagacactcaaacccaatcataggcgcattgtcagaaataagcctaccaagaataaaggcactttgttcttcagagataatatcattcaaaacttcatgtagactattagtaatcatcttagcaacaatcttgtatagcacattaggctaataggcctgaaattactagtcaaagttggtgatttaaccttggcaattagtgtgatgatagtctcattaatagataccgccgaactagacccatcaatgaaaccaaggcaagcacgacacacatcggaacccacaatatcctaaaatttttgataaaaaccagcacccatgccatctttgcttggaattttactaggatgcatctgaaataaggcctttctaacatcggcttcaataaagggcctcatcaaaatattattcaaattgttagtaactcgagattgaacagaattcaacacatgatttatagtatccaatgaaggttgatgggaagtaaagagagacccaaaatattgctcaaaaactatggctatacgagaaggttcctcaacccataccgagttgtgataaaaaataccacgaatcaagttcatctttttccgatgagaagcactctggtgaaagaaagctgaatttttatcacccagcatcatccaagaattcttagccagtgatgcccaatacttctcatctttatacataagcacatcaatctctttatctttctgttgattaaaatgccacccagtatctaaatgcgccaattcatattttttcttttttatagcaccaagcgttcgcttatacacatccctattccaacccttaagaatagaaatggcttggcgaatattatcttgaacaccatttatcctgtgaccacttccagagttccaagtaccaggcactagttcgcgataatcaaactcatctgcccatgccactcaaaataaaaatgcgacttagccttaggtaattgatgaccgtcattagcttggaaaatacgagttaataaaggacgatgatcagaaccccaaagcttcaagtgagtaacaataatagagtatggaaacataattagaactaacaccatccggtccaggcgttcttgtagcaaagagccatttgaatgcttattacaccatgtaaagcgggtaccctcaaatcccaagtcaacaagaccaattttagaaagagttcactagaaattgtcaatacacctttgagcccaaactggcccaccactcttctcatactgatgaagaatttcattcaaatccccaccccccaaccaaggtcccgagaacccatctgcaagctactccatcaaagaccaaaactgaggacgtaaactcacatctggctgcccatagattcccgtaaatctccaccacaacacatcatgagaccgtactatcacattaatatggctacgagagtagccttttcaaatgacctacatcattggcccaaaataaacataaactaccactatgactgatcttctcaacaaccactttgccaacaaaacccaaccagacacgcacgagttctagaaccaaatgagaaaccaaggtttttgagagaaaaacgagagcagcacagtttcttgatgagagaatttaaaacttgtaatgtcttgtcattccccaaaccttaaactttctatgtcagacaattcataatgctcggtggccctgaagatcagggtccaccataccggaaccatccatgtccactttcccaaccccatcgggtaaaagaataaaagataccacaccaatttgcacttcattgccaatagctctgaagctagatccgtcgataagactgaaatagaagcttcatcgccaaccaaaattagtacagaatctgaaacaaaaccagaactagaactcacctctaaaacattggaaaccactaatacaattgagtcgtccttagttttacgcttcactgtacgtaaaatatgagagaattatagagagaaaaaaatagctttgggatatttttaaatcgccatgttaccgactcataattcaattttatatatatatacttagttatatttttaatttttatttttgttatgtgtattttcaaaattttataaattaaaggaaactatttaatattataaatatttaaagatttaaaaatttgagaaaaataaatataaaatttaaaaatattaaaatttaacataatctcaataattatagtaacaatattataaataatatatattaatatctatatatatttaaattaatttaaaattggtgtttagttaaccaaaaacaaataatattaatatttatttatatttaaatttaaattaatctaaaataaataatataaatatttatatatatatttataaaatcaaccctacagacactgttggatttaacaaaatattctgttaaacaaataaaaatggtcagatagtcacattttatatattaagatattaattattattattattatgattattattttgaaatactttcaatataattaattatgaaatagatacattagctaataatgctccatttcaactattgattatatgatgatagcccttagatgccactgcgaaattattattaatattattattattattgtaagcatgagcagcatcaagtgattagagaaaatgatgtaagaggagaaatagtgcttcacctttatgtcaatcatttatgtattatatatgtcattattatactatattgtaacaataagattattagtataaatcactattttttttttattgtcatcatttgccatgctcaaaagttgtatttcttcgttaatatgactgagttttatatagggaatttttgtcataacacaattggagtttcggaggtttttttttttttttttttgaaatatcatgagaataataaaataaagcaagtgatatcacgacttcatcacttatatatatatattaatttatatatgttagtaatattagtaaacatattgtaaacatatatataataaagcataagcaagcaatatcacatcgtgtacagacaaacgttattttcatatataaaatactatttacttatatttgtacatgcatatatatacgttttcgcgtatgtattttacctttaaacaattcatataataagtactttgtgtttgtgtgtatagatatacatatgtgatgcacgaacaagtaaacggctatatcctatatattattctaaaaagataaaaaaaaaatatgtatttctagaacaagagtgtgtaaagaaaattcagaagtcaccatagatttcaaagttgacccagcttttcctttcctttttatttattaattagtattattattattattattatttatcgtgcaatttggctccacaatcctccacactgttgtttgagctcattttcttcaatttaaagctaaacctttatattttgtcaactcattctaataaaaggaatatacgacacttgtaaaatgacataaatatttatttattcctctatatatatataaatataaaaatcaatgaatgatttgagcgctgtctttcttcatttgcaggcaaccaattaaaggggttttagggacatttcttagagctgattttattgacgactatcgtatataaatttagtcctatatataatacatctctccactcattaaatatcttgaataatttgatcctaataattaatattataataataaccttataattaatttctctattaattgccatgagcccccaaagtttcacttgaccacgctatctctaaccacagtactacgtactcactacgaatcaatgcaacttttattattattttaattaaatcccttttcttggtattattacattaattaatctctctatatatatatttagtttacgttactatacgtacgtaccacataccagtatagtagtatgaatgatcaatgtatataattagagataattaatttatatataataattgaccattattaaattttttaatatataactatggaaatactagctagatttttagattttgatccaattaatggagaataataaaaaattaatttaagttattatatatttagtttaccttttaaattaaaataatatatataaaatattttttttatatatatagtatatatatatataaagaatatgtttatataaaatataaattaaacgcaatttttttttctcaactgatagaataaattcggcttatataatataaaacttaatttttttgtaaaattatattataaacttaattttttttaataagtaatatttaaataggaagtctctatcagcatgacatgataaaattggatattatatactaatatcaaacattaacccagatcttttataatgtagttgggttcacaattaacatagataaaaaattaataatttaattacttaaatttagtccttcgttaattgttgtacactatatagtttggctagagctcgtgtgtaagacacgtgtgctcgcta

SEQ ID NO: 15943 - DNA, 5584 bp, Cannabis sativa
ttgttggttttttcaaccacatcttatccgatgtcttgaaatttagtgttgttgaaggacacttgttgatcaaataagttacagtagacacaactaccgcccataacacttcaggtaaaccaacactcaatagcatgcaccttactccttccagaatagttctgttaaacctttccacaagcgcattctgctgaggagtcttcctcacagtcttgtgtctaactattctatcatttttacggagtttaaaattttcaagaacttctgtcttactcttcaaaaataagcacccataattttcttgaaaaatcatcaactatgaagtgaaagtacctgcttccggagtgtgattctattctagagggtccccacaactcactatgaatgtagtccagtgttcccttggtactcttttttccagtttcaaacttgactctacaagacttaccaataacgcaaccccctttcacttacatgaccaagtctcttgtgccatattttagtttaatttctgtgtttgcttaaaacacaaccctttgtgtttgtcatcatggtgtcgtccagagaataaatcccgtttgattttcttcctctcatcaccatcatagaacctctacaaacttttatgaatctattcccaaccttgacaagaaatccttgatcatctaatattccaactaagatcaaattccttttaagattcaacactaatctgacatcttttagtaccctttccataccatcatgaagctataatcttatagttccaattcctaccatcttacaagacttataaaaccaagttacacaatctcatagtttccaggtttgaattcttcaaaccaagatttatttggtgtgatataaaatgaacacccagaattcaagatccattctgaatctaagttctcagaggtaacaagcaaaacgccagccgagtcataaccgtcactcatcactgatgtgtctccttcgaatctcgaattaccccaacttcagcctctttggacacatccttgtgatatgccccattttcttgcaatgataacatttaacattattccgaccttcagactgtgatttagatcttaattttccttttgttcccttatggttttctctcttttcacttctacctctcgtatacaatccatcaccattttcagagttcattaattcactcctttaatttaactcttttgaattcaaggctaacaatatcgagtgtaattggctatcttccatataactttgtatctttagaatgcccaaatgactacggtaaagaactaagtaacaataatgcatgttcttcatcttcaatggtaaccacaatgttttcaagatcaaggatcaacttgttaaatttgtccaatctattctcctacaaatttgtcctccatcaacttaaacgagtacatggcttgtttcagatataatttattcaccaacaatttagtcatatacaaactttgaccaatttagtctcactccataaaaatccatacaatcaccaatttttttctttttgaaaggtcataccataacaattccttttctaaagagtaaataagtggaagattattctttgtaatgataatgtgttacttttatttcagcagcaattagagtctttagttggaattattagtgaataaaattgttttgtggttaattcctcatccattagtacttgtttatggctctataattattattatacctgaaaaagaaaaagaaaatgattgcattcatcctcacctttgtccttgtcgcaatttaccaaagctgtctccattatcgtgcaagaaaaaaactactcataaattaaagattgttagttgacattatatggtattatggttgttgctgtcaaattgggccctattacttccttatccgatctgcattaatactgaaagcagtcttaaatttaatatgaataaacaacacataaataaaaactcataatagaaagctttgaaagaaaggtgttcaatgacttggcctatctaataatggaatctcatctcaccagcaaactctcttctcttcttatagagaaggtcttctgttcaatcaatcccctcacaccccacaacccctatttatatattatatctatacataatgatgatgatgatgtaaagccttaaatgtttgtgaattttctctttcactttttttctatggaaccaacaccaattacaattgaatatgatatcatatcataacttttttagaactataaagtaagaattacaagacacaagtcacaaactaaagagtaaaatgataaaagaaaacctttagagttatataactcataatactatactttcccttcattaccagccaatatgatatacttatcttttcttgtcaagttagtgcactcaaatcctaaagcctcagcaatctttgactgcacataatttgctacttcaaacttggttttaccaccaaccccacaagaacactcttttggtaactttttttgagcttttacaatacatgatgttgttggattcaatagtaggaatacagggtccaagaatttgtaaccaccagctgttgttccatagaacatactcacttgataatctaaggcaaccggtacaatttcgtcggttaactcagcaaacaaaggactaaacctcagtaagtatggttctctacaagtagttccttcaggacaaacaacaaggtcactttggcttaacaacttctccatcatctctgaatctttctccctatttcttgttaaccgaacagtctttattggcgcgagcagctcggtgattctacttaagctgtaagtgactgctatgacaggttttcttatagccattgatacatagattggatcaagcagagttctgtgattgcatacataaagggtacctttaagtttttttctggtgttggtttttgatgtgagattagagttttcgattggggtactatgggttgtgccagtcattccagtgaaagacaaaatgggtacttgtaaattattaggaaggaaaagggcaacacttaatctgattatgaaaagaaaaattccaaaaggaagccatgtaaacatctctaaggtggctataaaagtaggcttgaaagctaatcttccatcatggaaaatcaatggttttaggtactttttccttggaagaacattccagcttctcttctcagtttcacttatcaagtaaaccacctagtagaatataaaaaacatgattagttttatcattaaacacaatgaaaatgaaaaagaaaacagagaatatgagatgaaccttgcaatgagaaaggagttgttgatcaattgatttttttaagctagttatacctataactgaagaatcaagtttttcttcaccaaatatcttattcaaaacaatttcaccactttttttctcttccattagaccaacaaaatacccaaaaacaactttcaattctcttcccaaaactgcatcaacacctaagtattctacaaggaagtcttctaccataacacttggcaaattggtaacacctattttccttctaaacttcatcaccatatcaaaaccttcattcccaacatcttctaacaaaaacttaggcaacacagctcttccaactctgaagtttttccttttcattgcgaaaaagcatacgaataccataagtttcatgccaaattcctcactaaccaaacaaacaaaagggtatagaagaaacaagattagagctcttaagagccctccagcttcaaaagcaacaagcatgaaataaggaaaaattgcagatgactttaacaatgctccctccacatcaaacactgcagcctggtttgaaacatctgatatttggccaagagaagagcaactttggtactttcctcgaggcgggttcgcgccgttgagcttccatgggggattgaattggcttcctcttcttgccagtagtgttttggacctgaaaacaaaatgctttaagttcaaaagctctgcagccatatttgttggttgttacttatgttttggtgtattaacaaggctttttatacagaatggtatgttgtcatggaaaaaaaatgaaagagatattaatattaaaaaaaaaggccctgtatagttggagaaaaacaattactcaactcaatacattcccagataagaatatactcaattcattaaattagtccaatcaaaagaaaagaccaaaagagataaacttattgttacatactaggataaagaaaaacataaccatattgataaatagtaaactcaatcataacaaaggaagaatctacttaatgtgaaacatgttcttaaaaaccattgaaagaagtttcttaaaaaatatgtgtttggtaaaatttgaaaaatttagaataatttttaatataaattaattgtaaaatttaaatattttattttacatgcatataaaataataataaaaaaaatacactcataacaagttatttgaatttattttaaatttcttaaaattacaaaaaaaattaaataactataatatacaatgttatataaaaaatttacgattagaaatatttaaagatggaaaatagaaatcagtgcatcaatatacataatttttaagtttgtaccataatttttggattagtatatgcttgaccaatatttctcagctgtttttagtaattttttcacagtaaagtgaatttgaggctgaaaatctcaatcataacaaaggaagaatctactttatgcgaaacatcttcttaaaattaagctactaaggctagcttagtggtgagggagggatggaaaaaagggaaaggtcagttcgaacccagaacctttaaggtattgagctaatatataattgtaaaatactacactaaaaaaaaaagaaacatcttcttaaaaccaccacgtgtcaattaaggggagggtttatctatttttgtatcttcatgtttccataaatacatacataaaagtgattaccatcatttgttacttctacccaatatgttactgtttttgtacaatgaattttcctttctttatattcaagacaagtatggattgaattgcatgcaaaaatacatatgaataagaatttgaatctaataaattcaagtcattattaagaaaagtcattaatttatcactttaaacagttcaacttatctacggaaaattggagatataaacaactcaaccaaagttattaatagcttcttttaatcatattatgaaatatcatctaacactttcttaattattatcattgtatatgtgtaaccatccaaattttttcaagaaataaaaccatatattatatgataattaatttagcaaaaaatttggcctagaacgttctattggtggagccaacccaactaagtctaattctaaagttttcacaagtcaaaattgtatagtcaaatcaatcagtttctaaattaagagccattgattttatttccaattctaatgagcaattaattacttcaacaacaagtttttttaatcaaaccccatgaagatgaccctgtaactatagctatattatacataatattatatatatatat

SEQ ID NO: 15944 - DNA, 7452 bp, Cannabis sativa
gtaatttcctcatatttaaaaaggagatttattttcactaattagtcttagactgtgtgtgagtacatataacctcttttttgaagtcattttgcactttcacctagtttggataattccttacaaaaaaacctttgacactaacaactaataaaattcaagtgaagaagtggagaacatttagacatctagtcgaacttttaccatttggtaagaaaatatcaaaactaggccaaaatggaaaatgactctaaagagaaactattttgccaattgtttctttatgtttatgtaagttggtaagtataatagtcatttagcatataaatggtctttttcaggttatttgccataagaggaagatttcaaaagcttctacttgagtttgttcaccccaaactgattttacaggtattgcataattcactctttcattcatcataattggacattaatacaacacaacaatgattttctttttctctctctcttttttgttttgttaatttattgagtaatgtattttgaatctgcagaagcttgtggaacaatttctaaaaggaatagatgctaatattaaaagggaactttattactggcatgcttattatgtaagttcaacctcaaattattctaaaattttcatttttatgatttttaagatacaacttgtaaaaatataatttttttaaaaatatatatatattttatgagatttttttaaaaaataaaaacataaaaatatatatatatataaaaaaaataaaaaaaaacataacataaggtaattggttatccttttaaaacaactctagtgctctatatatcaaagttgttcatcagagcatgtcacgggtgggctacttttaatagtagctattgcattagagtaaaataattgtacaactgccataacttgataggaccaatgtggtatttgacttttattttttcttcttaaataaaagttctttgctgaaacaaaaaaaaaatatatatatattataaataaaatgaatgatatattaaataataatgaatttattattagtgaagttagttaattatagctaggaatgatagttattttttgttagttgttgtgcctttaggtggagttgttactccttcatagctataccttttgtaatagatttatgttactcttctttgtactctctatgtctatatatatcattatcaagagcctctattcaatacaagctcatttttttttttcatcttctcattttattctcaatttagtatcagaacttctaggctctcttttttcctttctttgttcgactcttcttgaagctttcttccatggcgtcttcctttgttgcagctggccttcggcctgaaggttcttcatctgccactatccacgctcctccagctcttgccattcaagttatcccaaatcacattgtgtcccttactttgcgtttagattgcaataatttattctactagatctcaggttctctccacagttcgagcgcatcaactgaaaggattttttactgtaacacgcgcaagacccccagcaaccatcactgatccaactaacgaatcgagaaccattcccagcccagagttggttgattgtctacgattggatcaatttctcatcagctagctattcatctcaatttttgaaggcatgttgggtcatgttgcaagatgtgcttcatctgcagaactttggaatgttctgcttgaactttaatttttttcaaacacttctcctactcgagttctacaacttcgtggcatgcttcaatcaacagagaaaggatccactcctatagatgaatatattctcaagatgagatgtcttggtgatgctttaatggcagcaagccataacatcactgatgataagcttatattctacattctttgaggtcttggaagtgagtacgatcctgcaatcgtgactctaacctccaaagaatctgtcactatgtaagatgttcaattgttgccatgaatctgcataatccaattgctaactatacagcagcaaccaagaaaggttctgcaccacctccttaaagtggtaacaacaccaacaaccgtggtcgtagttttaatcgtggaagaggaggtcgtaactcaaataattgaggaggaaataggcctatctatcaagtttgtggtcgatctgatcacacagctctcaagtgttatcatcggttcgacttaagctaccaaggagaaggtacctcgaaccaacctgagcaaactactaaaggacctcaggctatgcttgccacaacaactactgttgcagatccacagtggtacttagacagtggagcctctcatcatgttgtctctgatgatactgctctcacagataaggtggattataaaggcaagggaaaattgacagtaggtaatggatattctcttcctattcttgttattggtcaatgctttatttcctgctctaaaacacttctcttaaatcgtgtgttacatgtccctacaattcataaaaatctcattagcatctctcaattctccattgacaacaatgtgtacattgtttttatgctaatatctgttttgtcattgataagacaatgaagcaggtccttctgtagggaacccctagtcaaggtctgtaaaaaatctccaaacctctctcaagtctatctgcagtttctttctttcaggatcatccacttgtgtatcagccaaatgtgaattcaccatgtctagaatttgtaataaagttgattgtaatctttcctctgtcaataatgatttgtgtaaggattctaattatattgttgcactttggcacaataaattcatctataattcttgcgaaggttttacatttcgatgaatacaaaattttctaataaagatctatctttttgtgatgcttgtcaatttggtaaaaattatctaatgcatttcagcagctcctccattaaaactactaaacctctttaattaatccatgcaaatgtttgggcccctcttcatatcccacaactaaaggatataagtattacattctctttattaatgattttacaaaatatagttggatatatccaatgaaaataaaaccagatgcctaccctatatttcaaacttttaaaacctttgttgaatatcaatttgaccacaaaataaaaggtctacaaattgattgggtggggaatgtagaaagttacagcgacttctacagaaaccagacattctttttagacatctttgtccacacactcaccaacaacaaggtagagtggaaagaaaatacatacatgttattgaaatgggcttaaccttgctggctcaagccaaaaagccattgcattttcggtgtgatgcatttgtttctactgtttacttgattaatagactcccaaccattatcaatgcttatatgtcaccctttgagtgtctttacaccagtaaaccatattataccttcttaaaacatttggttgtgcttgtttccccttgctcatgccatataatcaacataagtttcagttcaaaacatccaagtgtatgttttttgggtacaatccctttcctaaaaggtatagatgtttgcattcctcaggttaaatttacattgcaagaagtgtaaatttcaatgaaaaagagtttccttatacctcattgtttccccaacagatcactcaaacatttcacaataatttgcttgctccaacattcattataccaactatatcctctcatgatcacattcctccgaaactttggctctataaatattaatcaagatgaaacagcttaatcttcaccaacatcaccttcctcaaaccaaagtgctcatcctgctactcaatctacttcaccaactcctacaatatccctaatttctaataccgactccacttctggtactgacagtattgaagaagttgttatacctgttgttcatatatccccatctcctctaccattacctataggtcatcccatgcaaaccagattgaaatctggcatctcaaaaccataagtgtttcttgtcaaagcttcccaacaacaattgtatgaggaaccaaaaactgttcagcaagcccttagtgtaccacattaaaaaaaaaaaaaaagctatggactaggaaaaacttgctctagttaagaagaaaacttgggttatggttcctagaagtccaaacatgaatgttctaaccaataagtgaatatccaggactaaatacaataaagatggcagccttgacaagtttaaagctagattagtagtaagaggatttgagcaagctcctagtttggatttcaaaaatacattcagccatatcacttaagcttctacaataagggtaatattctaactgtgacttatgcttgggacacccaacaaattgatgtcaataataccttcttaaatggaaaattaaaagaaaaagtctttatgcaacaaccacaaggttatgaagacccttccaaacccaattatgtgtgtcaattaaacaaatctctctttggcctaaaagaagctccaagagtgtggtttgacacactcaaaagtactctacttagggtttctcaacttccatatctaattcatcattgttttataacaatactcaaggttctctactacttgtgttagtatatgtgaatgatttgttaataagagttgccaataatgttgcaatttctactttgataacagcttttaatcaaaagtttgctcttaaatctttgggttatgttagatatttcttggggtttgaagcttacaaaaataatttagggttgtatctcactcaatcaaaatatgcagttgatctcttagccaaaactcagtttgaagatgctaaggaatgtgacacctatgattttggccaataaactaatacttgatgataatcccgtttttgacaaactagaactatatcgcagcacaatagaagcccttcaatatcttactatgacaagactagatcttgcctattctgttaacaagttaagccagtacttgaagacacctactatcaattattggaatgcttgtatgaaagtgttgcgatacattaaaggaactattcatctcggccttcattttagaccatccacattactaaatctaaaagcttactcggatgtcgattgggcatctagtcttgatgatagaaagtcaacaagtggtttttgcctgttccttggaggaaatctaatcaattggagctcaagaaaataaaaggcagttgaacggtcaagcaagagtctaaatattatgctcttgcttctgcagcaactgaattggtctagataagttctcttcttggtgaacttggcataactcttcaaaagacaccgcctgttttgtggtgtgacaatcaaagtgcccaagccttagccttaaatccaatctttcacacaagaacaaacacacatcgagttggatgtgcattgtattcgagaacaaattgcagagaataagattgaaattcgctacattcctactcaagatcaaactgctgatctatttactaaacctttatcctctctaaggtttcaatttttatgtaacaagcttcatttggttaacaccaactatagcttgaggggggtattagtgaagttagttaaatacaattattttctgttagttgttgtgtgtttaggtggagttgttactccttcacagctgtaccttttgtaatagatttttgttactcttctttgtactctctttgtgtatatatatcattatcaagagactctgttcaatacaagcttattttctcatcttctcatcttattctcaacttgtatgagacaatttatagagttgcttagcattagagcgtattttagtaagaagtggtcaataatgatgtggacgaaagacaaaataaaatattatattttaaaatatagaattttatgacaactttaaacattagttgcattgaagatactcttaagggtttatccccttaccctaaggatacttgtttttctatatttttaatttttttcttgaacttttttcataattttttttttaaaaaaaaaaaaaataaatcatatttttacacaaaattaataaaacccaaaattttgtaattttctcttatttcatattattaagttactcaaattgtgaaacataactcttattattgtgacaggataagaaattaccaactggaccaagtgctttgctaaaacttgaaggtaagatgtaataataatatatagtttcaataatataaatgaagtaatttgtcattttagcaacaatcttagcttagttaattatgacaatagcttttttatttacttgcagaatttgtggccaaattcatgagcatatacagaaaaagttcaaataatcgacagtgatcaataagtgtattgtgtaatttttatctgatccgttattagagctagaagacttttttcaaattgtgagataaatgtttgctatttaaataaatgtaaaataaataaatctagaattatttgtgaaaaaatgttaatgaatttgcccgtgttgttttttttttttaatataataaagtgttatcactgttacgttttattggggatgttagcataaatgccttgaattttacactatttagcaatttagtcctttaggaaaaaaaaaatcaaaaatcaaattgaaatcttggttaaattggtaaccactacaatgtcagattttttctggccatccacacctgatcggaatccaaaaccctcacctcacgccagaaacaccacatctttaacacatattagatgtggttgaaaattaattttatatatcaaaatttaaatgaaaatttcagcacattaattcatatttattagctcaatccatacatatatatatatatcactaatttagtgtcattataaaaattcatttatccaattcaattttttatttgacgaagtgattaaaatcgctcatgaatttacgacacagacatccacaacttgaaacattctcgaaccaggatagttcatcgtctaaccgcagagcatgctttgtcaaaccatggaccgttaaattctcaaagcgagccacataagacaaaattgccttaaaaaatttagacaataaaactatgatatcttcaaacaacgctcgtagtattgttattaattatactaacaacgataagatactaagaagaataataagcaccaatcatattttttaacaattatttattagatattatttaaatactctaaatcattattaggcaaggtattcaaattcattttctttcattcaatggtaataaaaagaagaaatattaaaaggcactagtggtgtttaacacccttttatgtgttaatatcgctattagtctaactaaatattaagtcttatatagtttaatataataattttaaaaagtatcgatagtcaatcgtaatataacatataatgctaaa

SEQ ID NO: 15945 - DNA, 6233 bp, Cannabis sativa
ttgcattttaaaatgtagtgtaattaccaccctagtaattaccatacctagtaattacacagttacttctaaacacaccctacatgttgttgacatgggtgaatctacatagaggggagagtgggcactctcctctctctaaaaacaaattggaaaaaaaaaatccatatatattttaattagttaatattatatatttgtaagtaaaatttaaaagtgatatagccattagaaaaaaaaataattttatttataacaaattttgcaagtgaaaataaaaaagttatgactaaatatgtagtcacaatatttgttgtgagtaaattaaattagtaacaacttgtatataaatagtatgttttcgtaacaaataaatttttattgtgactaaaattcatatttagtgacaaaaaattaatattgtacctaaaaattataactaaagctagttattttttgtagtgagttctaactttagtataatagttagtttatcttatgcatataataataaaggttaataatttaaatcccaacaatattgacattttgatattttaatatttaaggtttactttttagattttttccggatttatatttagtacattaataattgaagtcaatttttttgttgttattttatattttacttcaaattagatttgctattaaaaaaatataagtttgtatcaaatttttaacatgatatatcatgatataagaaaaaaaaaaaagcacaccctcctcaacctaaattctagtttaaccactgattgttggtgcaggtacatatcattgaattttaaaatacatttttcgaattaatgtattttcatgtgtgtttatatgttgatttgttatatattgccatgcatgatcactccattaacctctagaaggaaaagaaacattgtgtaattaaatccaaaaattagtatgcatataattataaatttctctatacactaatataatataggaacaatcttttgtatagcaatctctgtttcaattatcgttaatgatggccaatcttacgttttttctcactttctttaattatttcgtttcactaaacaattataaaaaaagccaataaacttaataattattttacatgtgtacgcaaccaaaacccaaataattaatgaaaaagtaaagtaaatataaaaccggtgataaaccaaaaaccataatataaatatatataattatttgtttaattcggatcctaatcagaatcatcaatcacagccaaaatataattaatagctaaaatattaataggtttttgaatatatttggaaaatatgtaatatatatatcatcacctctataccgttggatttgaattactgcatgtagtaaagtacgtgagaaaaaaacaatacgatttttcttatttttgaacgaacacgccacaaagaaacaaaacgacataatatgatgcatttaaaactgatgaattagtctgcattattttttcttctttattgtaggtaccttatccattccagattcactttaatattttacaattattcattacaaaaattaagaaagaaaactagtagccctgctgccccacttttccctagtttcttttttttctctaccaccaaaccgaacaactcatttttttcttcattaagataagaaaatcataatcatggatgacaacaacttcttgcgaaaaaaaaaaacaaaacaaagggaaaatgaaaaggaagtgacaaattagagcaaaaagataagaatacatcgtaacttgagaatcttatcgcatcacactaggctccacgacgctataataaattttgtatgggcccaaaaagtatcattacataaataataaataaataaaataaaatataaaccattctcttaccaaaagtgagacactatataaaatccacaaccaacctcaacaacaccatcttccttaccattcttaccaattcatttatagtttcagttatcgatcttaaactaaaaaaaaaaaaagaaaagaagagcacacaaaaatgttggccatatttcacaaagctttcgctcacccacctgaggagcttaatagtccagcatcttacaagggttcatcgaaaccaaaactcccagaagaaactcttcaggattttctctctcatcatcctcaaaacaccttctccatgacctttggtcatgctgctgttctcgcttatgtaagaccagatagacctttctccctaaaccagaggtagtaattaataaaccatttcgttttccgatctactactctttcacttgattttcttaaagatcctatttaattatttgttaatttttttgtacaggctgttctgtggttttgaggatatttactgcctcttcttggggaacttgaacaacctgtgttcacttaataaacagtacggactaaccaagggaacaaacgaggccatgtttgtcatcgaagcttaccggaccctccgtgaccgcggcccctacccggcggatcaggtcgttaaggaactagacggcagctttgcttttgtcgtttacgacagtaagaccggttcagtcttcactgcactggtaattaattattatttaatttcaattaattaattagttagtaacagttcttggccgatccttaactaacttgaactaaataaacatgtatatttagggatctgatggtggtgttcaactgtactggggtattgctggtgatggatccgtagtaatatctgatgatttggaagtcattaaagccggttgtgccaagtcatttgcccctttccccaaaggtaataatttttattgaatatatatataaatatatagtccaaataataaagtgggggttattgatttggttttgttgcatatgatgaatcaggatgtatgttccatagtgaggggggtttaatgagctttgagcatccaatgaacaaagtgaaggcaatgcctagggtggacagcgagggagtgatgtgtggggccaacttcaaagtagataagtataccagagtcaacagtattccacgtgtcggtagcgaaaccaactgggtggagtggccctcccattaatcaataccttaattgataccataattactcatatctctcactcctactctcactgatccatacttaaaaagagtgtttctgttattatttaataaataacgtcttggttgggttaattcctttcttctagatctatattactcctcttttgtttttaggtcctttctttaataacattgtattactttttctctctgtaattatatgctccagaatccagatatcgaaatatgactgcccttttcactttttcaccacaatacaatactattaattaaagtactatacaattaatttaggtcgctgtaggaaagagatattgttttgggattaagtctacatcataggcataactgacaaatgaaataaagaggcttatcttgctatccattccagtacgtaatcgataggtgtaactgttttattttcaaatgtggttagtcttgacgttattcatgacaacaacacttgcgaaaaagaaaaaggaaaagggcccttcctatagggatggataggtgttacctttctaatatatcttcattttatttttgttatgataaaatataatcatatttctttttttttttttttccttttgtgaggaccacgaagttaatatagtttgaaaataacaatattattatcttacatacaatttttttattttttaatgaatatctcatatacttttaaaagtatatacataattacttatatcattttcttcaatctttcactaacaatttgcaattacctaatcattataattgcagaaagtgaatcaagataaacacaagaactacaaagttcatcagcactgaaaacatattccaaactaactagcctttaggttccttagaaaatcaggtaaatgtaatccactaagaatcaaatgtaatttgtaaatcaaaagaaaagaacaacgatacaacaaagattcctaatacattttaccctataatctggattaaccaaccaaaatacaaatctaattccctttagatgtgaagacaaactctccttttgataagctaaaattcctttagctatgaatctaaactcctttcaaattatatactgtctctattaccactttaccactgaagcttgaaacttcaacaatgaaggaacttgcaagaatataaacaagaaaaaaccaagttgaagaaagaaaaccaaggcgagagttttctctcaccatcaaagtctatgaaagttaactataatcaagaatctaattatttatagtaaccctaaatggtctaacgtagaaaccgaccaactaactagagttaattcttcctcgattaactcgaatatgctgacgtgtaaaaataaccagtggagttccaacaaagactgatatagactaaccattataaagataattgtagataaaacatctttacatataatttgtcatacaaaatgtgactgctacacatattaatatattattatatatataacaaatagattgaatctactttttttttttttttaattctacttgtaggacaatttttacttataatttagcaactcataattttttattctacttgtagctagcaactcataattttactcagatttaatttggtttattcgtacattctttttgagttggctaactctaagcaagtctagtaaaatgcatctacgccgtctgggtgttgacccttgagaaagacggtccaaataaagacagccaagttttcgttgtatatagtattaatataataatttaagcattctgatttttgacaacacattataattttggtcctcctcagcccatacttgccgcaaacatcttcactactctataccattgacacatatatgtaattaatgatgatacaccaaacttttggctcaccacgtacgatacaattgcaacttacccaatacaactatattatatgttcccgtcttgtttagttttatgtatatatttttaacacctactatactgctatacatatttaaacaggttttttagaatttatatttttttattaatattttagatctgatcactgcccactctacttcgatccaatccctgaaactggactcggacccggactgatagtataattgttgatatatataattttataggtaccatctagtttttttttttttttttgaaattatctagtagttaattatagggacaaacatttagattgaatttgtttcggacccggtagaaccaaccaattaagcccgcaaactgaaaaatgcccgtttataatactaatgggtcgggttcgacccatataataatactctaaaatattaaaatctataataggctctgaacgattaaaagtttgtgtataagattctccaataaataaaaatgaaaattttattttaaaaagtaattaattaattgtgatgattgttagaatacggaaatgcttagtatataattttttcacacactagtaaataatgtgagaatttctaatattcctttaagatgattgttatttttatcgtattaatattggacagttcaattataagttgttctttttttaactcaatattcttgaatcacaagtgattattttgactctatttttttagtggcttttgttggctcactatcctttaattataaatagttcttttgattctactttttgaatcaatttttagattttttttgtctctacttttcttttttttgcggcaaaatttttttatgttttaatttttatacatttaactttttttttttttgcaaaacccccttaattagtttacttttttttttataaatttaaggtgtccattagatattactgttaaatattaattggattactacgacttcgagattttactgttacatatgcacatatgtatacaatagactagtggttatttagttgatatttaactggcgtgtcaaatttgtaaataaaaataaatataaaatgattttataccaccaaaaataaaaagaataagaattaaatgtaaaaaaatttaaacataaaaatatttcgccacaattttttttatcagatattcattagaagtttattattagagatttttacacctcatgtcaaaattgacaccttttttacatttttatccatacacggttttttaaacttttttaactttta

SEQ ID NO: 15946 - DNA, 3802 bp, Cannabis sativa
gagggacattgtgatggactcgaacgagttcatgttagaggaggtattcaagtgcaatagtggcacatgttctttgatcaagtccaagagtgggcgagggagattgtcacccggaaacatatgtcggaatattttttttcattttttttttcacgaaagtgttcgttatgcttacaacataatacgtttgaagttttttgaacgcacgtagtaaattggaatatcaaaaattttgttttcggtacggcaaactattcgaaatttttcaaaattttacagggatgataatataataacgaatatcgctatgaaaaattttttttaaaaaaaatcaacatataatttcggaggtaaaaattaacaggtgtaatatgagattgtaactttgtaataactgatgtgcacacaataaaaacataagaatgtatatatcgattaacagagagataacatatattaatgataattaatttacctaataataataataaaatttatatatatcctcccaaatcccgattatattcatcgtccagacttccaccgttgctcaagtaaataaacagtgaactcgaacttcctcgcagggccacagtaaaggacggtacactgctccacacgataatcctttcttacacgcgccatcacaacacgtacctaacaaacccggtcaaaaaatagtacaaaactgggagcgtgtttcctacgcgcccaaactcaatctctgaaaggccatatcacactgtgtctgggccagtccgattcttgatttatgaagatcaaattccatccacatattttgctgatggtgatgaccaatcagatacgcttccatacctaacaggtcagagttcccaaatgtgaagcaatgcaccgaatcattttccctcacttcacccggaacccgataaagaatgctcttacccgacacaaccatctcagctccttcaaaaaccaagctcacggtgggcaatcggggcagtttcgggttaccgagtgggacccggaaacacaaatccatagctccttgaaacacaaaattcgaatcttccaagactctcaaaacgcctgtggtttccttcaaaaacgcttctcttagagcagtgtaagcagggccgagtaggaacgtgaactgtgtgcccgaatcaaccatggtttgacccgcccctgtatgatcgggttcgaaaacggattttggtatctgcaacagtttacccgatacttttatcccgatcaactggacggtgtaagcgacccggtcgaagtacggtagcggcgtcgagattttgactagaggtgtgtaatttaaaggcgatatccacgagaaattggacgagtcgccgagaagtagtagacctgagaaatccgaacccgaaatgcagtacgagaatttggggaaagccatttgggaaacgaaggaaagagaacctaggttcatacccattagtccggtgttcttcgagtcctcttcggagttggagctgaagcttgagcccatacacccgaaaaccaaacccggtatttcggatgatccgatatggaaagtatcggcggcgaggtttccttcggatgaggagaaatcggcgtaggaaagtgtggcgtggcagaggtttctggagtcacacgaagctgggatggtgaagtcttgggtccggttcgtacaagttggcgaagaacattgaaccggagagtaagatgaagagcgggtcgggtcgaaagttaatgggaacttctctgttttattacagttgagccaagagagctcactgcctgtatcaatgaccatggtaacattctgtggaggcgagcccacggtaagagatacagtcaagctgacattgtggcgaaaaagaagtttattgggtgatctggggaaagacccagatggtatttgttgagttttgagaggtaaagcgagaagaagagggggaggagtagcactgttcttcgtcgaggtagagatgcaaagctgggttatgaaccaaacaatgaaaaacgttaaactgaaaaagaaatctctcatttggtatctttgtaataaaagaataaaacttctgaaatgaaaatgtttcagtttcagttccaggttcaggtttttatgtaaagaaaatgaaaatgaaaataatggcatttgaaggaggtagatctatctagccatctagcgagagtagaaccaaagatttatgggttcaaattcaatcaacagcaagatgacatttgtcacttttggtacgtacaatgttgtttgatgagttagaaacttagaagtaatttatgttttttttaaaaagaaaactatgttatttttttttattattattattatttttttgagataataaccaaatctaagttagtttagttcaaaagaattaaatgagtaataaaatagataatataatatcttgtcaatttatcatcatgatggccccaacacggctacaccgcttccaaacttcatactgtcaactactgctaccatatttataacattaattaaatgccaattaatatacatatttaatattattttgcttggtttaatgattaacatcaatcaaaaaaaatttgttaaaacaggaattaatcagaataattgatttttctagttaactattatagaaatttaaaagtattcgtcttttaaatttggtgtttataaattcttaacataaaatatgatacatatttgtcattttaagtggagctcctatcattaaaaagaaaagtgtaactactaatatattatattactataattaattattgtatctcacataatttaataattataaaatattactaaatatttacaaatatatccaatacaatgttatacatatgatatatatatatatatatgtgcaatttttagtggaggttcatcaaattgaacttcaataatagtatataatgtagtgtaaattaaatttagtacatattaaagaatgtattaaatttgatacaaaatatagcacaagttaaattttatattataataaatatcactttttttttatttggtcatcttactataattataccattctaatgaaattttactaatttttacttacacctttaaaaatattagaaaacaagtactaggataatttttatttaaaattattttaatcttgtaaaattaatgttgcatatttaattaaaaaaatggacgcacaatctcttcctcctatatgaacatttatttattttttttggaaaatctttaaccttaattcaaagaaccaaatcaattgttacgtaagaatacaaaaaacgagaataagcatctgtccaaatattctcagagatgccactcataacagaagtagctagcacatgggcaacgccattcacagactacaaaataacattacaagaaccaccaccaccagtagctaacaaattacaaacttaaaaaataattgactgatagacaacattaccactttgtttattaatccagttgacaaccactgttgaataaatatcaacccacgacagttgaaacccaaacctaatggccaattccaagccaagtcgaacagcaaggacctcagccacaggaaccgcaaaatcaccaacagctccaactgcccaagcagcctacacattcctcgaaccagctcgaacaacaccacccatcccgacaagcctctacctgtgaccactgcaacatctgtagccagagaaaaacccgaaaccggttgcaaccacctagcagagctcttcaagattggctcagctgccacttgaaagaaacctttaactctatgatcttgaaactcagacaatgcag

SEQ ID NO: 15947 - DNA, 12033 bp, Cannabis sativa
gtgaccatgtccactctgatacggttcaagattgatgagcaaaaaatagtcatcatcttgagggggaatatagacgtaggtccaatggggggtctgatggatccgatatggggtttgatggtggagttcgatgggttcgattgtgtccgatgaagagagtctaattatgtaaatgggggtgatgtaaattggaatattttaaagatatcataaaaattaacatattctacaaattttagttattatgagttcaggggaaaatttttaaacacatgtaagcataaaaaatcaaatttccctttcattattcgatggtgttatgtttttgttttttcttttcttttgtttgtttttacatacatacacactttttatatttgggtccccatgatggggcgttgggcctagacccctaaggacgacttagggacgacctgtatcaaaaagacatagttttgttttgttccattttcaaatcttcttttttcatccgaattatctctcacagaaatcgtccaacactactaaattagaccgagcttatacatgaatataatctacaagaatccatgaccatagatataacataccaccacataaagttgtctaagaaacataaacaaaagttgttgaattctcttagtactcatcatggtattacaatcttatttgaaccaatatataaagaaaatttcttgaaacataaatacataagttgcattaactatgttgaatctttctttgaaaattcctaaccaaaccactaccccgcttgaaacaatatctttggaactctatggctgtgatggtgaaggagatgttgggggcttaaaatctggatactgcaatcacaaaccaaattcatgaaaaggtaagtttgtattcaaagcacaaatcattgcataataaaagtcacgaaaaaagcaaagcttagaagcacaacttacacaagagtatggtgatagcggttttgagactttaggaagcgattctgctttagtttccgttttggggactgagtttatttcttgagcaggttgtgcagctgcttctagtttagattggggagcaggttgtgcagcttcttctactttagattgaggaacagcttctgctttttgtacagtactatcggcggtagcagcattcagacttgcctctgctggtgcaggaagagccttgctagacactgttgggagtaaagcttgtccaatttgctgaagttttagggaattaatgagaaatacaacattttgaacattagtttaaaatatatatatatatttatatatatatatatggatttaatacctacaagttcttaaacaaaatgagttatgtcattgtacaagtaccttaatctcatccacaagctcttgaggtgcaatcttggtgttcaagaactcatcaacttgttttagagtttctttcctatcctgtcaacaaaaccacttcagcatgcattttttgctaatttaaataatgttacaaatagagagagacacaagacaagacaagaaagtcataaaatctttgtccttgacagtaaaccttccacttaagtactaatcatttatcattatgaaatatatgaagcatgtgggactcacctcagcaaataggagttttttgctcgtaaactgaataattgcagctgagcctaagagttggagtattgtttctatctataagaagtagaacaaaacagtcaagtttaaatcttaagattcaaagaatacataaaaagaacaagagaaccagttagttaaagacttcatctagctaacctctgaaaaggccagcaatcccaatcctgttgctgcagcaaggccaatggtaacagacaaatcacctgagcccccctgcacattaaaatcgtgtgtgttggcatgtaagaaattggtcactagcccatcgaaaataatcctgttatattggaaattgagatacatactccaatggcatcactaattgcttctgtgaaatttccaaaatccaaactcagtgctttctttggtgctatccatggaagattgctattctgcaaaagaacaatccataatgtgaaccactttgtttactatacataataaacttgtacgttagaagttgctgatgacagaaacataggagagggaaggaagtgcagaccacccatcctcggggtccttccgcgccatcttttatggcaaaagcagctttgaacccatttacagtgaccaactcagcaactagttcagagttcccatcgaatctggcttccgtcagaaatgcatcagcaattacttacacacattagctttaaaaataacaaagtcttattcagagattactatatttgctatgaaattcagtaagtgttcaaacagaggaaaaaaaaagtaataaaacgaatcaagcctatggtaagagttataatctgattctcagtagacattgactcagggttctacttcttcactgatatgaatgagaaccagagaatatcctatgaacatgttcaaccgattgatcgtgcactacaccagtaaattgaacatgggaaaattttctaagcaataacttaaaaagaaatttttaaatccatacaaaatttggtgatcatcacatttaaactcaaaatatcccttttcttattacattgtaaactaactcaatatagctgatgacataaagtgaagtaaactagaaaaattaagtttaaaatgttacttgtcgaggacaaacaatgtggtattttctggttccttgaacttcaaagagagcttctttaagaaacctggtttatcttctcctttgtacacaatagacactgacttctttcccaaacctctgatgtccggactgcccacttgcctagactcagcaggtggtcttatgtcaagcaactgtgcattgggatcatcacccagttttgcataagcatttcttgcagactcaactccccatggcttagacttgccaaaaagctgagacaaaaccaatggaaccgccaaaatggcgaccccaccagctaaaatggctgggttttcagttgcaaaactaatggcactatctataaccccagtctcacctgaggagccatccccaacagtctgctgtaatgcttcttcatatgtcaaagctttagcaagcccagagttgagtacagaagagagtataaccaaacctccatggattttctttgggaaacactcctgaagagctgaagggttggtgttaaaactagaagaatttgagaatttgaagaaagatgggatttttctgggttcttgtttcctgtcgctgagaactgctgatatgggtgttaagcctgctgcattgagggcctccatggcataattctgtctcaaagcttgtttatgaggctcttagagaagtaaaaggataaactttatccaccatgaaacactaggattctaatgccaggctaaagttccttagagagccttagcttcagaaattagtcttggaaggcttctttagtgtgaggaaggtgctgacaaggaatgggatgagaggcttaagccattcagtgcttgacatgtggcaattgatgatgataagttgctgatttgtaaggccttcggtggcaatgagtattatagattaaagttgtcttacagattgtgtggttgagaaaaagtctgccgaagtttttagaaattacaacacacaagaaaaatggaagctgctagtacatgtcctgtacagagtacagtaagtagtacaagaagagtctaaaatgccctttattttactataccagccatgcatatcttcataaacatgattaaaaaagaagaaaaaatggtttagtgacccaaaataaagcaataatattttgtttttatgtgatttttctttttgttttcctcttatcacttcaaaaacattaccaataaattagcaccttttttttgtctgaccaattaattagcacttgctaaacttacaatttttattgcaaaaggttagttatatgtatatatggcataacggcaaatattgctgcggtcattaaaacataaactcttattgaaaattttactcttgttagtgtctcaatatttactacaaaataattctaagaggcatttgtggtagtgctcagcaccataataactaagctaagtcttctgtgataatctaatgatgtggactggagctcatccgaatgattgtattgattaggctgacttagagaagatcaaaaaaataatcaagaccttgcccaatttcccagattgagatgccacatccccactttcgagcttcctccagccgcacagaaatggacaacaatgatggatagaatacggcatggttgatgtggttgtcatcagggtaaaagaacaagtgttcttcactcctctcttcccactgcaaaacgggtctgtgcttcttcagcaacgatagataatcacttccagttatagctccaccaccaccatcaccaccttcacctgcaataggaatgcatgattcataaattgaaaggcagcacaaaaatatagaaaagaaagacatattcaagaagcctcagattgatggaagggacaaacctcttgaaacaatgaagtcatttccgtagaaattgatcccaagaaatatcttgtgggatagatgtcgtacaccgttgctggtgctgccaaggagtaactccattgtggcagaaatccacttaagaggtgcattaggacctggattttgcgggcctgagaagtcatacgtcataagtgagaatccatccacagcatcatccaggttcttaagatctctgggtccaaaatcgtactcttggagtgtctctgaacgcggtggacctataacgtatatcaactgtaatgaccgcttattggtttgctctgaattaacagcatgcattgcatctccaagctgttttataaacttcagtgcctaggcttacaaaacaaaaaattaatgtgtaacattaacaacaagccaagagagaaagagagagaggggaacaggaggaaaaaaagtcgagcactcactgagttcctcatgcttggatcattcaaaataccataagcagtccaccttgaccaagattctagcacaatcccatcatagcccatttccctaatcataaaaaggatatgtggcaattaggagttggattgtttgatctcaaggaaagaacgataactgagaaaagctaaataaaaggttacatggaccaatacatgtcattgatatacacagtcatcacaagtaatgaaaagaaaagtagagtatcatcccacgagaattgatttatcaattaccaataatttattggtatttctattgggctaacaataattatatttgcaaaatattaaaacaagaacgcaaatactaaaattaacaatagaaaagaaagaaacaaatttaataatcaattcaatgaatgtaggacgagggcaattaatttcgtcatcttttcactctgttgttttatcaacacaatttaattattcttcttcttactgtgatagcaattttaaaaataaaaatttatattcggagtaggatatataaactttcaacctatatagtatctgaatttcgtccatgacttcgcagttggatgtgttggtatctgaatttcctcaacatcatctgtgagtttggacaatgcccagtaccaatatgcatcaagcttttgtggcacacctcaggatggatacaagtcagctgcctccttttccaccaccatattttggtcagtcaccacctgaggagggtgataatgccagcccatccggttgaatcttttggctaagaaaaatgtttttattaagtttagggaaggaaatttatttttctataatatatattgggtcggttttgtgttttagtttttgcttttaggtgtgtcctggtgtttagtttgtcgtttaaatcaagtcgccaatgattaactgatgagcctaaaactaaattatcagtccaaagtaaaacatggatgaaacatactctacaatgatgcccaaagcaaaaccaaaaaacaattatcaatgacaaaaaaagtaggagccaaattttttgacctccatgtcccgaaattcaaacacacaacaagagaaaaccacacatcacctattaggaaataaaatgatccttggcatatcattatggaaccaactagttctgtgtaaaatggccttattaaattggagaaaggcttacttgcactcatcaactatgaggttaatagctctactccgctgcttcttttttctaagaagatcactgggaaaagcttccagaacaactctaggtagcacctacagtaaggaatgataagtgactatttttaaattgttgctaagtcaactatgttaagaaaaaaacatatcctatttcgcatgacacatcaaatggacaattttgctgctaatagtagagcttcctaacaaaaactaaaaatgtgtatcattttcctccccttccctgccaaataatcagaaatagaaaagttaattctgccttaccatagcatctcctgccatccggagctctgatatccatccaatgtcagcattatgtctgccttctagaatcaagtcacttccttgactaccaacaatagcaacataagagaaaaaggatacaatcaaaatccaaacaagaatatatatatatagcttatttcacagttcttcctatcctcccattctactaagaagaacaaggaaaccaaatcatgcacagaatcataccttttcaggtcataccagactggtgataaatgtgtaaacttggagttgaatctcttcgctgattcatagcccctagaattcctgcactaattttgtgtgagagcagctcatacagatcaatcaaacttttgcaagcaaaatttgttgaaaatcagaatatgtattctaaacgtttgccaaagtaaaattagcaaaatgaccttcttactctgtctgtagtccgaaaggtaaatcttggaataggttgtgtttctcgtaaaaccattttctattcagtccaacttaaatggccaacgttaaaatatttttttgtttcattagtactagaacatttatttgcaaaataactatgttcatgttctcccattaaaaccatatttacatggaaaaacgttgaagattattttactattttcactttctcatatgttaaccaaaactaatacccttgccttactacttcctggagatgataatgtcataacaaatgtcaagagaaattattaccaacttaaactctgtctaaacccagaaagaaagacataccatggagtaatgtaggccaacacaggaaaggtatgatgccgcccagaagtattttctgagacctttgtgttctcctgagtttcatataaagaaaaaaaataatgtcattttttttcactcctctacttaaatatgcaaacacatacatacattataaccagataaatgaagaaaaatcaaagcttgatttataaagtataaggggaaaagataaataaaaatggaaacttgatatctggaacagagtccaaagttgtgattccgcacttacatcaaggatttcttggtaattcacatcaggcttaacaaggcctcgctggtacacggacgaacccgtacggttcgtacctgaagcgtatttgattcggtacacgaagatagagatagcaggagatacgatgaagaagacgaagattatgatgatgagtcttcgatccgaagaggccgaacccccatgtcggtctggctgagttaacggttccactcgatcctttgggcgattggcacccgatgcaactcggcgatctcgtttcttggccatctcgtaagtcagccgaactaaaactatcgagtcgagtgagtgaagccataagagtagagggactacttcgaaacaggattggcgataatctggtgtggccaagtctatcaaaagtaattcaaatcaaaataatcattaaatatctatctcagtttataaaagctgttttacgaattctcaaaaaaataaaaaagaagaacaaaagggaaaaaaaaaaagaagctgttttacgacactgcatataataaaacgacaataaaataggggtttagcgctttatacaaaacaaaatatttctcttaagccaaaaatatcttaggggaaagggttcttgtccttgcagataaaccctgaaacggatttcttttttctccggggaaaaccccttaaacctttttggtctccaatccaagtcggtacccttcaattattaaggtgagttatctgctttcttttctaagttttttttttttttttttggtggggggctattttctttccttatcgtttcgttagttaaacacaatcgatagtaacttgtaatggaacccaagctcttgctttctacaaccaaagcctcagtatcttcttctttacccttcttcctatctttcaagacttcatttcttcgaatacgcaatgattctgtcaaaacccatttctctggctcaacgattcaaccagaaaagtcaccatttttgggcagaagcctggtcttacatgaggagagaagtgtttttttcagtaaccccagaaaaacccatgttccatttgggccaataagagctgtagtgaagagaaggaaagagcttcctttcgataacgtgatacaaaaggataagaagctgaaattggttttgaagataaggaagattctggtgaaccaacctgatagaattatgtcgcttagagatttgggtaggtacagaagagagttgggactcaataagaagcgacggttcattgctcttttaaagaagtttcctgcgatttttgagattgtggaagaaggggtcttttcattgaaattcaaactgaccccagcagctgaaaagctttactttgaggagttaaagattagaaatgagatggaagatttgttagttgtgaagctgaggaagcttttgatgatgtccttggagaagagaattttgcttgaaaagattgcccacctgaagaatgattttgggcttcctacagaatttcgtgacaccatatgtcatcgttatccgcaatatttcagagttgtggcaactgagcgaggcccggcattagaattaactcattgggatcctgagcttgctgtttcagcagctgagctttctgaagaggaaaatcgggagagggagatagcagagaaggatttgattattgataggcctcttaaattcaacagagttaagctaccgaagggtcttaatctatccaagggtgagatgagaaagatagcactttttagagacattccttatatttccccttactctgatttctcagagttgagaccgggtacaagggagaaagaaaaacatgcctgtgctgttgttcatgagattctgagcctcactattgagaaaagaacccttgttgatcacctcactcattttcgagaggagtttcggttttctcagcaagtgaggggaatgttgattaggcacccagatatgttttatgtgtccttgaaaggggatagagattcggtttttctcagggaagcatatcgtgattctcagttaatagacaaggatcgtttgttaatcatcaaggaaaagctccgttctcttgtttctgttcctcgatttccaagaaggggagctcctcggagagattcagacggggcacaagggactgatgataagccagaagatggaactgacgaggagggagaagaatgggctaatgctgacgatttcaggaatgattctggctttgatgatgatgatgacgacaacgaagatgatgatgattggagtgatgaagatgatgaaacaccaccggattttgaggaagatggtgagtctataagtattggtgtgagaaactcaaacaaacaggaattgaagtcaacaaaacatgatgatgagaagaaggaccttactcctgtcttgcctgatggtcggccaagagaacgctggtaaagttggctaagacaatctacttcttgttcttgactcgtttaggggccttgataagagagttgcttgttttctgttttgaacttggcaacctctatactctggaaatttcattcctggaatcctgttaccatttccctgtatgagtttaggaccttgttccttacatatctagatcaggaaagtgcaatgtaatagataaggtacccttgtatcaactacacatgtaatattcttctcagaatgtaatatttctaaagaatagtgaggaagagcattaaactggaatcgtactctaaataactatttttgttttttttttgcaagttttgctattaacttacaagctcatgcttttaaagaataataatggatgaaatttgttatatgcaaattctgaatatgtatcctttattttttgcactttcacggtttgtacctgcttagtaaaatatcatggtacaaagatttcaattatcacaagcttggatttcctttattcactggggtttactggatttcctttcataattagtagttttaataagtgcttgtaatgagctgctgctcctgctagtagtcctcatccttcagaagaacaaaacccacaattagctttgaagtttggagggtcagagattaccatgtttaatcctgtgaacacacataatagggaatcttaacatcatgataaaatgaatgaccatgggaattggttgatattttttctttttctttttccagcaatggaatcttggttgattatatctctcaaaaagcgcgtgtcgtcatgcctgtcgtcatgttcttggtactgcaacttgcatccaaattatctatcgtgaataaagataaggaagttgccttgtgtggacataatgtcgtagcatatattgttcgaggttcctttggccactttattcttcactgaggtttttgattaagatgcaatggccccaagtaccacttcttctcgtatccatttgggttgaaagaacctctatggaacaaaacaagaggttgtggttatgccactcatcccagaatcaaagatatacccctatttataccattctttctatgcacgtgtgaacccacccaagatgttgggaactaactataaataggagtatcataacacactctgagtaagcaaaagaggtcttgtggcctaacaaagaggtctttagctcactcactaaaagagctggagagacttagcagcaatagtagctagtttttgttctattatgatatctcatctatggtagctgtcttatcactctccccttaaggcttctagattttggctatcgtaaaagcttggaagccttatagggggagtggttagattggtgccatgacctttctaacccaaggacatcagagcatagtacataggcatgttttagccattgtctgttatatattgtttttattaaccatttttgcttattgttgtgcttaaaggtctcctttcttgtagcaaaagaactacttatttcgtggaaattttgagtgataatatgtcaacagtgagatgtcacaacatcactctaataccacctccacctaagtatacaaatataaataagatttttattattttattttattttctgaagagttttgtttctgatattttttttgttgttgtagcaaaaaaaaaattcgaagacaacggaacccaagcatcttcatacatagcaatatcgttctcatctctcactctccaaatgacccctcgtaaaattattctttaccacacaaaatattctttcacacaaaagagtctttttttttcaaagacttaatagaatcaaaaaaattgtttttatgacacaaaccttttaatacctaagccataagtgaagtaggagcatgatagaacaagaatttttgtttttatactacaaacctttcaaatattatagaccgtgtgttttacagaagttatcaattagatcatcttttttgttaaattataatttagaaattgtattttctaacatggtacaaaataggaccatgagctcaattttaaacaatttttttgatataatcaacttgaagataattc

SEQ ID NO: 15948 - DNA, 4961 bp, Cannabis sativa
ttgaaaaactaggtcagtctcctctctcactctccactacacacaacggtagaaaatctctcagctctgactgagccatctccggccaccctctgtctcgacaccaccatcttcttctcactctctcgctggaatctccaccacctcaatcacggtatagtttatgttcatctctcgttcttctcatttgatttaattctcatctcatattaagattagaacttctattgttgtttggaactggaacttattgaacatggtgtgttgattttctgctctgtttcttaaagtctttctcttttattttataattcataatgaatccaatttttgtgtgaataatttgtagaattttataatttaggttaaattatggaaaaaccttactgctgatatgaaaagaagatatttttgatgatgatagtaaaatgaatgtagatgttattgagaaaaaacgataataataagcaaaagttggatatttggaacaaagaaacatattgttttcttaattacatagaattaactttttggagggatttgattcctctttaaattattcttcaaatcaatgttagagaaacatgtttttttttacaatgagcatttcattcaaaatgataatagtataataaaataaataagttgcccgaattgtatggtgtccaacatttttgtttgtttgaagaatttagataaagagctgactgttaaagaagcaattttttggggctttaaaaaaaagagatgaattgattgatatgataggagaggtgtagaagtagtactatgcatacttcaaaatgggttcttgtggattgtattcggagatgcaataactggagatctttcaagcaaatccatgcccacttgttaacaactggtctagtttataatgatgacttaatcacgaacactattgtcgactactttggcaaaactactgctgcttttgttgttgattacgcctgtgatttcttcaaacatttggattcgcggtcgagctctttccctttcaatacgttgatttctgggtatgcaggaagggacatgccaagggaagcggttttggtgtatagaagattagtgagagatgggtttgtacccgataccttcactttcccgcctcttctgaagtcatgtactaagtcccggggaattggagaagggagacagttccatgcagtgattttcaatatggggttttcaagtcatgtttatgtgctaaactcgctagtgcatatgtacagtgtttgtggtgattgtaaaggtgcttccgcagtgtttgatgaaatgcttgtgagagatgcggtctcttggtcgtgtttaatatctgggtttgtgaaaactgagttgtttgatgaggccatagctttgttcttgaaaatggaggttgaacccaatatggcgacttttgttagcatacttgtggcctgtggccgaaaagggtatttgagattggggaaggggattcatggactgagttttaagcgtcccgtagacactcctttgcttttaggcaatgctttgatggatatgtatgtcaagtgtgagcatttgtgtgaagccaagcaaacctttgatgagctttcagaaagggatgttgtttcctggacatgcgtcataagtggattggtgcaaagtgaacaccccaaggggtcattagaattgttctgcgagatgcagcaatcaggaatcgaacctgataaaattatacttacgagtgtgctttctgcttgcgcgagtcttggggctcttgattacgggagatgggtccatgagtacatcgatcgcagtggcatcaaatgggatattcaaatcgggactgctatgatggacatgtatgcaaaatgtggctgtataaagatggcattacagattttcaatgaaatgcctcgtaggaatatcgttacatggaatgccttgttgagtggtttggcaatgaatggccaggcacacgaagcactgggacagttcaaagagatgacaaggtcgaacgtcagaccaaatgaggtgacctttctagcaattctaacagcttgcggtcattctggtttggttgatgaagggcgtacgtactttcatcagatgatgagagaaccctataatgtttctccaaggttggaacattatggatgcatggttgacttgctgtgtagggctggactcttggatgaggctcaaaaattgataaagtctatgccaatgcaggctgatgtgttaatatggggagctcttcttagtgcctgcaagacctttggaaattttgaactttctcatgaaatattagatgggctcctagagcttgaatctgaagatagtggggtttatgtgctcctatcaaatatatatgctactaatgaaaaatggagtgatgtaataaaggtgaggaggctaatgaaagagaaaggcataagaaaggcaccagggtccagtgtgtaatatgcttttcaatgaatttccaatatatattataatgtgagttatagtttcttgagtagataaattatgaaatttttttagaacttgaatctttgtttgtttgattgatattagttcgactgaaatcttagttgtgttgcaacttttcaagaactgctatagatgaaccagtcctcctaacttgcccgttgtgcatccctattctagattgataaagatgtttttaaactcattttgactcttatagagctcctttgtgttctggagttcggtgattcagtaaggacttaagagaaagggaattcccaagagcagcagccatgtctttcatgaagggagatttgcttacgaaaaccagaaagcttgtcaagggtttggccatcgcagagcctcgttggctcaaagcaatggaactgtaagtcctattttctcaatgatatttattattctccaatttttcttttcttgtttaatgaagtttgctttgcctgatttcgatgtcttagggcaccacctccagcatttcctcgtagtgacggtaaagtaaagacgatcactctcccagaagatgtttataccaacaagttctacaagaaacatccaaatgccaaatacgaagaggccttcgagtaatttcgcttctttaaaatctctctctgcattttatttaagaggggtaactcaaacggtcagacatgtgattttgctcccacaatgtctgaggttcgagtccctcctaaacacttacatagtaattgttaggcaaaacaaacaataaatctctttatacattttcacaaacttaattttgcttcatgcccttttcctaattcttttctttaaaatcttttttatttattttgaatttgcaattttgtgaatgataggatagttttgaagtcaatgaatagactttaaagtatttgttgctttgttcttgaacagtttttgtagtttcgatcctcctccagctcgtttatatggtttgcggattctagacttgaaggagcaaggagttagtgaggatgcagcaatggcaactgcagatgtaacttatactttcaaattctcacttttaatgttgctttccaatatatatttacacaaacacgtctacactgattactgattcttgggacggtatacagatggagtatcggtcagagaagaaggctaagaagaaggcttatgctcggttgaagcaaatttcacgtatccaagggaagaaaccgcctcctaatccatacccaagtgccatcagagagatacaagccgaggaaagaaaatatgttcatgagagattctttaacccgaaaattcaagaagcagtaagacaactgaaagaggaaaaagccgaacgctttgctagtaacccattttgaaggatcacaaattcacaaatttttaagtttttgagaagaagaagaatcttgaatgttgccttgcaccttgtttgattattgcataatgatgattatgctctgtgaagagtaggacatataaatatattcaagtgcaataattttcatgccctttaccatttgggcctctactccccataaactttctgtgtgttactttagatatttattataagttttgttaaatattgattactttagatatttaaatgaagttaatcttgattcttcagtcttgtaagtctcaaatctagctaaaaacataatctaacaaagggagctatatgttttaagaagaaaagaattagtgtcgcactataacctatttcgtattttcttttaaggaatgatgtacccgaaaatatgtaccaaaatattacacaaaatagttaaaaaaattctcacttaatgtaattgttttcagaatattttgggaacaaaccattactttttcaatagaattcatttagagaaacaacaattgtaccaatggattgaggaagtgaagtcaacaaaaaaaggcgacgagcttacacaagaaaggacacagagactaacccaagacagctaagtaatttattgggcgacattcatcaccatgtttgaattaagttattacataattcaaagttttgcatagtatcattggatttatttcacccaaaaataatcatcacatctaatcttcactaatgttgggtttatatcttgctccttgggactaatggtgcatccctagacctcttctccacagtccttgaaatctgtctaactgcctccttagctagatgccgagggcggctcagccaaagtcctccatcaacaacaagtgtagttccatttatgtatttacctaaacaaaacaagaaagtacacaaaatgcattgttgattaagaccacctcgaaatcaattgacaatgagtagagtaaacacatgactccgagaaagagaatgagagataccaacctgcatccgaagcaagataaacagcagccatagcaatatcccatttctctcctactttatacaacggcatgtactctctagttttgttttttatctcgtcgggtacaagtttactcaatccgggagtatc

SEQ ID NO: 15949 - DNA, 5615 bp, Cannabis sativa
acctttgagtaagatctctttccttcatgtgcatttgcctaaacatgttctcttcattacatgtattgatattgctgctactgtatattgtttacaaaaattattttttcttgatggctttgatccagttttctacttttggtttcaattttgctggtttctgctttccaatttgattattaatccttcggcctaccttccctctgattttgtgcttggaacttatctttcataagacttcttgtttcgtaggtcttagtttatgcacattgctttattagttgtttagtgatgaaaattcaaataagaaagcagaagaagatgcctttgtctacaatatgcattcatatactaatagccgtgttcaatcattttttcgtttctttattgcattattttcaggtccagaaaatacagttacttgcaccaaatattggagtcgtatacaggtttgttcttgtattttcttgtacttttgataaatatttatttttaaataggtaaatttcatgtaatattcctgctattgtgaatgctatattaactatgtccctactatgtgaaactgctggatgtgcagactgacagatagatatgccgtttatattaccaattaggaagaccataaggcaaaaggcattgtgttttatgagtttaaatttagcgattatatgaaccttacttcggtcaatctgatgtattaacagttttactagactcaagatagcattttgtggctttacaaatttagtattttaattatcccttttattctttccaatttccaaccactgttttattttgcactactgcagtggtatgggtcctgattttcgagttttggttcggaaaagtaggaagcaggccgtacaatatcataaattatacaaggtatcatatcgctctgtctatttctatgttttaatatttatttttgttcagcattgaatatggtgctcaatttcttttcaactcggtaactaaaaaacattttttttatttttattgttgttttaaattctttactattttctgtcttgttagaagttggagttgggtatggattgctttgaatgacttggaataaacttttatgtatgcatagtagaatcaagatgaaactacagtttatactttggtttttctaatttacatttaatatcttgtttgtaggactaactaaattttatactttcgtttttctaatttacatatcatatcttgtttgaaggaaccgatacctgttactcaacttgttagggaaactgcagctgtgatgcaagagttcactcaatctgggtaatgagattacttcaaatacttttcaaacatttatatatatttatattatatattgtataacattttagatttattgtaagagatagttaattaaatgtaaactgccctgaatttgtgtgacttgtaatataactatattagtaggtaccatcatagtactacactatctttttcttaggtgcttgtgaatcttgcttctaacttgctgaatcctaatattctattctctccattggcagtggtgttaggccgtttggagtatctttgcttgttgctggttttgatgacaatggtcctcaattataccaggtaatgttcattttttaaaggagacttatttttagaaaatctataaccacaacacacaacaaagactcatatatcttcggtctaattcaattttcgtttctttaagaaaaccaaaaaaaaaaaaacctaggtcgtttcttatatgtgaaagtaaaagttatccattttactttatggtcggaactacattgcttgtggttgtccttccactagttctgatttcatttttattcagtgctgatcttttagagattttccacctgttttttcactgttgctcttttctataggtcgatccatcaggttcatatttctcatggaaggcctctgcaatgggaaagaatgtttcaaatgccaaaacatttcttgagaagaggtacttgagttagtttctgtacacacatcctcttttccgcttttacatttgccaatcattctttatagtgttaatgattgtctcttgctcattttactccttcattctaatctaagcacttttgtttcttttctcttaggtataccgatgacatggagcttgatgatgctgtccacacagccatcttgactttgaaggaagggtatgtaactttcaaaaattactaagtcaatgattaagaaacttctacactggttccttccaatgtctgtttgcctcacttagggcgtggttaactttaattaaatgatatgcaatattttagccattgatgatataatgtgtcctcatatcaagtggtgtgttttacttaattaaatgacatgcagaaggaactttgctgcatcatatattcattcaagtttaagttaattatggtcaagaaataattatagtttttttgtgaaattttgaaccttttttttattgcatgccgcactctagtttttgaggtgaagtgatagaaaggaaagatatactaatgatgctgtgcagcctgtgtttttctacaaagtgggatctagtaatattgcagtgatatttccttttcattgctattttattaatattttgcttttgcagatttgaaggacaaatctctggcaaaaacattgaaattggaattattggtgctgacaagaaattcaggcaagatttgatttttaaacttcttttctagttaccgaagttaaatgtgctagatgaatcactgtattgctttcttgtcattttgcattggagactatccaatttatcgaacaagctatcttgtgatttgggttttattgatcggtcgaattgttgtgtttgcagagtgcttactccagctgaaatcgatgattatttagctgaagtggaatgagcttgagggagtgagtgatagtagttataacttggcaacttttgtgcttctttcaatatttggtctctctaattcagaagctgtacttgttgaaattcttgccatctttgtttccttcaaatgtgaactatttattttaagcaaagatcaattttatgtttaccacaaatttgtgaaatttagaaaaatttcagataggtgaaagacaacagatcttatgtagtgtgcttcccttgttagattcttttgttttgatcagatgttatagaatttggaagctgctttacatgattttgaaaaagaaaaaaaaaccacctaaactcttagtaagtgtaatcaataatcacttgcaaaaatcaatatagaagaaaagtgaggctagaactaatattataaagagatatcattctttcaatggcttttaaagtttcattttagacatgagcataaactgtttcttttcaaacaccttttgctcagtgaacttgaactttgtaccaaaatatcaatttcataaatttgtggattagaaataaatgtgatgtagttaagaaaaaagatttgatcattttgtatatattttgatacatattttgggtgaacatataatttactttactcttatatgatcataaatttcaacccaattttcttgtcttctcccctcatttggacgcgttcatttaacttcacattctaaatttcataaattcatattctccattttggtcaactgtgtttattaaattcttctcaaacaaaaaatgagttaaccatacaagtataacttgagcacattttaattaatctactttctatttttaagcctgtttaatattatcccactcttattggattataatggtacagtaaatttctaagcttcatcatttttgtaactcacaatcaatttgtactcaactgtaaaatgcaaccccccaatgtattatagtacaataccataactgtgaagagaatgaaaattcaagaatccaaaccaaagtggaaaaaaaacataagtcttttgagtcatgacattgacaggtaaatcaagttccactatttcttacaataactgaattagcacaattccaaattatcaacatcatatactttcacagccaaaattcactataatttagaacttgttcataatttcatttgaacccccaaaagagtaacataatttagaacttgttcatatgaaaattctagtacctaagtagattaactaacttaagcacaccaatgctaaagtcaaaaaaacaccaaaagaccaccaccatcattatcttatctataaacaaaagtcaaccagtcttcacagttgaaacaaaacacacaaaatatttaccagtcttgaagattatatcaaaaatggcttcattgatcatagcagaatttggagctttccattatagaagaaaaagcttcattaatcttagttgcttctgcaatcaacttactcacttgttcttcttcataagcactttgagacataagcaaagattgtttcttttcaagtatcttcaactcctcatcaattttcacctttttctcattatgcaatgtgatctgaattttcaactcttccaactcaactttcttcattttccactcattcaaattattctttactacattcacctcaaatcccaattttcccatttcaaataattgtgctattaaataatcaatctcagccatactaacatcttttcctaaattgaaaaccttctcaatcaaaacagcaaacttgaccatataactcaaagctaatgcttctcgttcgaattcatcatcttcctcattcaacaatggatgaaaatgaggcttctgtggtagtttttggaacacttcaaacgattcgaccatttcccaaacatttgatcttttcacaaaaggagtactttttctttcctcattagtgttacctaatcaaaccgaatttaatgtcacattataaagttgtaataaaatgatgtaattcaagtctaaaaagaagaaccatgattgtaccttgagaattcgcaacttgcaattcatattgttctttcctcttctctgttttactattttgattttgatcaccctcctaaattagcaaaagaaaagaaaatgttaattactactcagtcctatgtagcaattattttttgacattgttttcagaaaataatttttataagttacataaaaacagcaaatcagaacaacaaaaagttgtatactgaagttttctatcgcttttttctttcaatttacattttttttaatgaaaaatcaaattttattaaccatcaacttccgctactaaaacatggtaactcagttggaacatcccccaaactgaactcaaccatgttacgtaatagaagctcgaacaaatttatggccactaaattagttgtcatttcagtaagcaaactcttacaatctttcgaattactttaaatcattatttgttacaaaattttaaaatatttttctttctataaatatggttattaattttttattgaagtctaaaaactttcttgaaaacatcatttggtttttgaaaatacaattttgaaaaatagaagaaaatgagaaacatattaagatttgtaaaatctagtgtgacttcacattgtacatgttgtatctgttttttactgttttgacagttaagttagttactccaactaacttaactgtcctatc

SEQ ID NO: 15950 - DNA, 4199 bp, Cannabis sativa
atttattacgatgttatactcgtatatttttatatgaataatactattgatttcatgatttacgataccacattaatttcattggacaagttataaataattacattatttttgggaagaacttttataatattacagaatgatgaataattattcatacatagtaaatgtaataattcataactttgtacgagaatagtgtatatatattattaattactcaaacttttacacagaataataataatattgatttctaaattcacttctaatccacatggaggatagagtgcactacaatatatctaataataatgattttggtaattaaacttacaaaagaagaaataaatagggggattaactcaccacaccatatgaaccaatgtaatttttcttttttgttggcaaaaaaactaaagaaagaatatatatatagtaaataataataataacaaataatatatagtaatatataaaaaataataattaataatcatgtgatggatcgatcatcctcgtcctccttatcatcaagtggtgggatgatatgatcaattattggggtgttatgtagtgttgtaataattgatgatatacgatccataccaggctatcgttgttcaggttcccgttcggtaccgtcgaatgatagccggaaaacccacttggtgatcgactttcttctcgagtttttgataattgatgatgaattaagtgatgactgttgtttaatgagattgaactcactgacaaaagctttcaacctttgcaatgagagatccaatgtttcctcggacatgttggcaaaacaaactcggaaccaacctggctcagtacaatgacaagaggagccaggagagatattgagtttcacatcgtaaacaatcttcttccaaagatctatttcagcttcgaatgtgtttgacttgagaagatgtctcatgtcaacccaacaaaacaacccagcattactttttaaacaacttataccaatcttctcaagaccaacgacaatcttttcatgtcgtttcttgagtctcttttggttttctgaaatgtaagtttttgtgaattttttgtctgacaacatagccgaaagcaaatattgtgtctgtgaagagatcaaaccgaagctggacatttttgtggctgcagctacgaccattttgtcgttggagtaaattgctccaatgcgaaatcctgggagacccagatctttggataagctataaacgacatgaactcgttggctaagtatgtcgttttttgatgatctgttgttgagaacttccatcacgcttacgaagccagggttgttaaaaacggttcctgaatagatttcgtcactaatgaggtgaatttgtttctcttcaatgaagttaaggagaaggttcatctcttttagcgttgttgtggtgcctaagggattagatgggttggtaattaaaacacctttgacccttaaattacgactttgaccatcttggtacgctttttctaaagcatcttcagtgatttggaagccatttgagcttgtgcaatgaataggtactatctcaactccggttctccatttaagatccctatcaaatctgcaagaattaagtacaagcaaaactagatcagtaaaagatcaataaattattaattaatgtgactagctgtaaatatttagtgtagtagtagtataagtagtagcagtagtagtagtagtgagacttaagtttttaggtgaagtgaaaagatagcaaactaaagtaaaattataaacttacccagggtagtatggagttgggagaaggaaggcatcgccttgttcagccagacagaacatgagtgtctcgttagccgaggttgcaccagcggttaggactagattgtttgtgtcaaacgttactttgtttcctctaatttcagacatgaattcaaccattgcttttttaaattctgggagaccatgataatcttggaacagagcaagttctctgaaaattgattgaccacctctctttagcccagctgcttctgggttatttgctagccatgattcatgaaggtcgaatgaaagctgtacccaaataaaataaaaataaaaattcatgttaggacatttgtatttatatgcacttgtactagaatttatattactttctttttttttttttgtcatatatataatgtgaattgtaggagttttctaacctgattttctgcaagacccatctggataattccctttgggtttcgaatttcatcataagggtttttctcgtactcttcccatcctaagaagtaggaagaatcttggccgtgagtattgcatgaagcttttgttgatagcaaactcattttctttcaaactttgtataaataaagaaacagaggattgatgatgatgatgatgatgagagataatgtagaagaagaattatatggaagaagagaagagaagagaaagattggtataattattattgttttagtgaagatgtttttgtaatgtgttggagtggaacgataggtctactgcaacgtagaaccatatatataggcactaggctcatgagaaattattcttttaatgttaatttaaaaaatcaaaaagaaataatagaatgacacatggaaaataggaaaaagtttacacaaagaaaagaacagacatttcagagatgtagctttacacttatgtatataattattatttaataatatttattattttgagggatttgcagctatgtggtttttaattagcattttatgaaccaaactcgacaaaaatttaaattatacgcgctttagccaccgtccgagagtgtctctgacttaatagtaaaatccttactttatactcaataagcagagtcgagagagtaccataagtccacaaatttaatgccactatatttggaaagtgccttacaccactacaagttcgcgtggccttaattacaaatgctttgattaataatagttaattagaaaaaaaaaaaactaaataaaagatcaaaaggaaataaatcaaaaaggggggttttatgagagattagaaatgttattaggggagaaaataaaaacctcttaccgacagcaaatctaatagaaaatggctaaagaggcctacatgagtacatggtccatgaaaattaagacccaaaaaatgaaactatgccccatttgcttcctggcttaactaacgcagttgcgccccatctaatctcggtcggccattttctttagaccttccattaatttttgtttcttttttcactaaaatacatatttgctatcttgggtatttttatctatttctttataataaaaaaattaaaaaaaaaaagaagggattttcggagggtttgaaagtcaacatgcaaaaatatgttgggagcaaaatgtactttgtcactttgtggaaaaatattttcactaaaactaggccgggttcattaatattattagaacataactgaataagttggtcgaaatcaaaacattaacatttataaatatattgtaactgtttttttattttatcattacaaataaccgccctttttccgtttgggttaatgagggtgaaaaggttatattcattatgaatgtaaaataaaatttgtatgttatctatttctcaaattaattaggtagagtttcgaaatcaacatatataggctatatataacaaaattacaaatagggtggttactcgtaaaggtgtaacactaagttagtatttttatgataatgcctgttttttgggcggtgggagttgcgtggctatcatttaaacagagctttgacgatactaactaaaaaaaaataataagaagaagttggtgatgatgaattatttgctataaaacattatcaaagaaagcaataattgttctaactgaaactaattaaccaatcttccgccctttgtttttggctacctgattttctttttcttaattcaatgagtcctcacatggaaagcaatctaatattataattacctatatatatacatattcttaattaataatataaatataagcaccacagaattcacttgaagtcatcacaaacaaactccttttttttaggtaacaaattatagttggaagaaaataactagatatagctaggtcatgatgatctgcttacttatattttttaaaaagtaataatttttgtatgtacgtgtt

SEQ ID NO: 15951 - DNA, 5989 bp, Cannabis sativa
taaattgatatctaactgtgagagcttgtgatcaaaccttcaatggctactagacttatatagcagacctcagttcaattcatcatcagaatcaaagttgtgtcttttcctcaatgattccaatacttgttgaggattatcaactctggaagtgttttctttctcacaagatttgagtttaggtacacttttagcagttaaaggaggcgacactattcctttgtttagttccttgagcacagaccgagctgtggcggcagctgttgcatctgccattgctgatgcaagctttccattatcttgaacttgtttaccatctccaacttgaacaggatcaggtgaacgaaagctacaactcgcgtttttattgttggcaacagcctcagcagctgttaacttggtcttccctgcttcatacttttgcatatcatacatgatctctttctgaagttgtttatcagcaactaatatttcatcaatctcgtttttgtaatccttgagaagaacacggaggcattccatgagcgaacctataagtggactgtttctgctttccaatagcctcttcaactctatgaagatgggaatcatgttctggataagaccctttttgactgcttgtgttatggcccttcctctagctgctgcagcagcagatgctgaaccatctccatcttcttcgacctctgcagaatccaatgatggtccacggttcgcctgtattctgatttctttgcaagctagaatgtggaaagtatcctaatttctcaaaagagattagtatataacaaacttaatttaaaccccttcagaaagaaaaatgaacctcaaatttataggtattgtttgagtaggcaaagaacctttacctgaagaactgagtgtccagtgacatcatctatatttagagcaccatcagatgctgcagcaagaatctctgcacatagctttgcgaaagtcgccaaaaggtgctctggtgccatttgtttgagcaaagaaacataaacgtgcattcttttagaccttgatctctcatcatttcctctgaaaagtagtaaaatgcagagacgagatgtagttatgtgttacattttgaaaagttgatttctattctagttcaatatagacaccaacctgatggaaaaaagtcgactttcagttcgggagccatgtgaatcagtatgtccactgtgagcgtggcagtcattcagaacaaagatggcttctatgaaactattgtaagcaatgaggggtgccttgactgcagaaacatgcacataaggatcaaagccctgtcaaatagatgtgaaagcacattcccaatttccataaacttaaaatatatgacagccaaagaaagcaatgtacaaatttgcaacctttcaaaatattcccaaataggaaatcagcaagctgccttatcttttctgactcatcaacaagcgagagaagaaatcttaagaacagaactcctctccacttcacgtagtccctctaaataaaggataagtaaaaacatgaatcggcttctgccttgtcgttaatcatcaacttgctaagtaggaagaacatgagagaacaataacatacctgcaatagtcttgaaagcagtgtgaatgtctgccttctcacaagttcacatggatcgcggagacattttgtgatctttgttatataactgttgatggcaatgcaaactagttagtggaaaataagaaagaaatataatcaaaagacagttcttgttggctagcttagtgtcaaagagaccatttgaaattacttttaaagtttcttaccaatcaactaaagcagtatggtgaatgcaaaaatctgccatgattactaccaagttattacggagggctgcacagtcactcttctcaagctcctacaagaacaaataccttgaaattttagttaaagaagatactaggtactgatgcttagtcaataagtgttaggtgccaatcaattagagcaagtattttttttttacaatgaatatacatattaacagctgcttgtctccataagttttgttattttaatagttttgattgtatttgtgagctatggcttggaaattaaatttaaattaaatttattttctttttttttttacagaaataccacatgagcttatagaaggaaaatgaggctgaaaatgatgaacaaacctgcataaacagaggaatatatctttttgcaagtttcccatctgcaagacaaatctttcccaaagccaaccatgactgaatatataaagaaggggctgcttgcttgaagaagaccctagggcctagtattttgttcaatttaggatcaggattttctgatgtgattattgtatgtaaaagtggaatgattgagctcatatcagtagacggacaatgaataaccaaagacccaattgtatagactgccgtaactgcttttgacaatgacctagccatggacttcgcttttctgctctttctagttgaacttttaggtgtcatatagctgccatttttgtttgcttctgaattttctgagatgcatttttctaaaattttagaagctttagagagaagctggttcacccatttcataacaagtgaatcagactcgtttgcacttgaagccttccgcttgcatagtgtcttaagtgccttaacatgagccttgacctgaaaacaaaggcactagttagttgcaggtaatatttttaaaaaatggcaacattctaaacaaaatagaaccatcaattcatactgatggtacaatttgatgaacaaggtacctctgtcaaatgcatattgaacttgtcaagttttttgaacaaattatgggctaaatctgcagctggttcagggggcagcacaatagaaacattggaaattgtttgcaataaaaaaacacgatccccagcccaagcaacagaattcgcttctacatcctcttcatcatcatagatttctcctagtgtatcaggactcgtaatatttactcccatgtcatccttgtcaagaagctcccaatgatggtggaggaactcccagtctacagctttagcaacgtacgctgacacctccgacaaaacaaaccaagcaccagggggagccgtccacttttctattggcagacaatatcttgaccaaagagactcagacatttgtatgattgtctgaagagctttagcaattttgggctttaacttattctttttgccaaggtttgtgcatattttctttacccaaggtgccacctctccatggcaaatctctcttagaagacctagaacaccttcagggaataacaactcaaaatcctcttcaaaactgcagatactgcctttactagggggcaactcaattgatccagatctacatatccgttccagtaccagttccagaaacaagttttcacattcttcttgtatgctggactcattatcagttatcaagcgaggaacagaatgtagccactctcgaatcacactttcttctggagatgttctataggcctacaatttttttgaaaaaaatatttcaaacatgagataagaaacgaacaccatctctcaaaatgagcaagcgtactaactgagagataggaagcaaaatggaaatacaaaactgtacacagtaccagacaatcagctaagaaacacaagaaaacaataaaatgacgccttaaaatggatttacaaaacattaacacgaaaaatagaaatattaacactacagtgacataaggttttgaaattgtaacatgtggtgcatattaagaagtaccacctccttagtctaccatgatacatttagattatccaatgaaaatgacaagaagaatcagcactaataagactgttagaatgatacaccattgttccaatccaatcttgaaagaattaaaacatagacatttcattgatatcaaagataaaattacaaagttacaaacttttcgagacagtttggaggtatcaccctgagtaatctcttactcactttgttacaaaaacttcctctcccttcttacaattgatcggccctctattatactatgtctcccttaaactagtttaacaccttaggactatatgatagctcacctaaagccactaagaatttgaaaactcagcctctaaaatcctaatcaattatactaatgagactaatattaacatagaacaaacagaaacatgattatactacacttaagaacggaaatgcaaatcataagtgcattaaaaaaaattatgatatatgaagttataacaaaaaatgtaaaaacctctgatagagctgaaagtgcagctttccgtatgctaacaagtggatctgaacaagccattcccatagtctttagcaaggctccatgaaagccgcagccaaatagacctgttaatttcgcgaccagaagaagtgcagcctttcttaccactgccttctcatccgcacaccttcttctcagaagttcattcactcgaccctctcctccatttccaatccccagaacttctttcaacacactctgactcctactatcacctgacaaaactcccacgagctgagacaaatttgacaaagcccgagatcgaattccagcaaccacatccgaacatcgctgaatcaatgcctctaaacatttcataccccatgaatcctttacttcagtttttgaattcaggcacagtggatctttcaatgatatcacaagcaccagaatgaggtcagttgccaagagcctcaaattagactttccttgacccattttcatgacatactccacaaacccaatttgattttcgaattccaggattcgaactatctccattatcgaatccacagccaaagcccgaggctcagacttctctggcgcctttacaaccaagtatttgggaagattcaccaatgctttcttaacaccatcggaaaggttcactgcatccgccatttgaatcgttataaattcaagagcaaacgtcctcgcctgagatttaaactgaagaatcataggcgacaatgatttcaacacctcagacgccgagtgcgcttggtcaccgtgctcaggcctgaggacttcaagcaaaatctgtgagcagaatttgctcaatctaccgtagttatccaaattaccacatacctcaatcccaagcactggaatttcagcaactgtttgaatcaaagacttcaaagtatcgggaaatcgatccaaatgtatcaaattcataactttttccaactttttaagcacagtaaacaaaaccctaaaatcaaactcactctctccactctcatgatcttcgttgcaagtactccgaccacgcttcttcgctccacgacctcgggggcccattttcctcttccggctagtcccaatttgagagctctgagccgatccatttgggtcggcctgacccgagggccgatgcttgagacagcggcgaatagaacggagaagtgacaagaatgccattggagtgaatagagtgaaaacaggtgaattggggaaaagaagcattgagagatagacctgcgaagccgagagggaaaaagaagatgaaccagaatccatggcggaagcaagagcagaaacgagattcgagggagaaagagacttggaggagagctcgtcgtagaagcggtccatggattcagagtcattgtgcagaagggtttgcaggtcagagagagaggaatcggagatagatggtggtggttgtgaattgcgaatatcttcgagctcttgtactattcgggatatgacttcctccatcgccattgccatggccatttcggtctgtgactgaaagcccactcctttacttcatcgttcaatgcctttttgaaacttttattttcccgcttaccgctcttgaattttttatattatcctttttcacctctttgaaaaataattatttacaattagatccttatttattattaagatttagctatgtattgtttagtaagaatgagggagaggatagttgttt

SEQ ID NO: 15952 - DNA, 4197 bp, Cannabis sativa
tcgaattggaccagttactaacatttggtgctttcattgtttttcattttcagaatgaagaacgaagagctagctgccttacttcaagccatggatctcaagtgggatcaacgggctgaatcacagatgactgaactccgagcggtgattgaggaacgtttggctcaagttctaccacccaattcttagattaatcatggcgaaagtagtgcagttcaggaacccagtcgacgttcgacaagttctcaggatggacgtgaagtgaattccattctcaaaaaccttcgggttaaggtcgctcgcttcgacggaactaatgtggatgattggatttacaagatcaataagttttttgatcttcatcaagttgaaccgagtatccgattgctggtggttccttttcatttggagggagtcccatccaaatggttccaatggatggagaagagtggagcgtttggggattggcatgctttcatcaacgcactacagttacgatttggagcttcgatctatgacgatcctttaggtcgcatttccaaactgacccaaacagggagggtggcgcaatttcgaattgaattcgaagaattgatgacccgagtaacaggtgtatccgagaaattattcatgaattttttcatttgggggttgaaaatggagattcgtagagagctattgttaactaaaccaattgatttagcggatgccatggctaaagctcaattgtttgaagatagaaatgaagattcgttgggtcgctcaaaaggggattcctaccgatctaactggtccaccaaaacaaattcatctggtgtttcatattcacctaggcccatgcctacaacgccgacaagcgtagctgctccgacagcaccgaacccgaaaacactcgctgccaataccgcaccgttccctgtgaagagattatctccagctgagattagagagaagagggagaagggcctctgtttttcctgtgacgacaaatacagcgtgggtcataaatgcaagaaccggatccttatattgacaggtggagaggatgaggaggacaacgatttagcaagagataatgttcatgatcagttagatctggaggagaatatgggagaggaagtatcattgaatgctctgtcgaactcagcgaacccacgaattttccgtttgcgggcgaagcatggtaaagaaatgttagaagtcttaattgatactggtagtaataacaactttattcaggaatctctggcacttaaattggggttgaaatcggaggatactcagtgcttcaaagtgtatatgggcaatggcaactcattgttatgttcgaaaatatgttacgcagttcccttggtgcttcaaggtcatcagttcctggtagatttgtatattctacccatttggggactcgacattgtactcggaatgtagtggcttcagacattgggaccttgcgtccatgaccacaaggccttaacgatggagtttcaatggcagggtaagacagtgaaactggcgggttcaagcgacaactcgaacaactctttgcaactcactcattttagtgctttattgcgggaaggagaatttcgtgaagcatactgtatcacggcagtgaccgaagactccataattttgaattcttcttttgaagcgtgggttcaacaacttcccagacagtgcatcgatataatacgccactttcgggacgtgttcagggaaccaacagctctgccaccttttcgtaagatagaccacagaatttttttggagaaaggatccagtccagtcaatgtaaggccataccgctacccgtattttcaaaaagacataattgaaaagatggttcgtgagatgttagaatggggatttgtacaacaaagcaccagcccatactcttcaccagtcttacttgttaaaaaaaaggatggttcatggcggttttgcgtagactatagagctctcaatcacataacagtaaaagacagatttcctatccccaccattgatgagttacttgatgaattgggttccgctacagtcttttctaagttggatttacgcgcaggttatcaccaaattcggatggacaaacgtgatgttcataaaaccgctttctgcacgcacgagggacactatgaattcttggtgatgctgtttggtcttacaaatgcaccttcaacatttcaagcaaccatgaaccagctgttcaagccgattttaagaacttgtgtcattgttttttttgatgatatactagtctacagcagcacgattcaggagcatgagattcatttacggaaggtgcttcaattgctgaaagacaaccagttctatgcgaagggaagtaagtgcttattttttcaatcctctattgattatttgggtcatatagtatctgctaaaggcgtgcaagcagatccaaaaaaactggcagcaatgattgagtggcctcaacccaaaacaatcaaacagttaagaggatttttgggcttaacaggatattatagacgttttgtgtctcaatatgcctccattgcagctcctttaacagatttattgaggaaggacaattttcagtggacgcctcaagcaacggttgcttttcagcggttaaaaactgccatgacaacaacaccagtgttagctctaccaaatttttcgaaagagttcgtggttgagaccgatgcatctcttacgggagtgggcggtgtgcttatgcaagaaggacacccaattgcttttttcagcaagcaacttggaccacgttttgctggcacttccgcatatatgagggaattacaagcaattgttgcggctgtcaccaagtggagacaatacctactgggtagacattttgtgattcgtacggaccataagagtttgaaagaattattgactcaagtaatccaaactccagaccaacagttctttcttcgaaagttgatgggttttcagttttccatttagtacaaggcgggcaaagagaacatggcagctgatgcactatcgcgtcaatttgagaacccaacaacaaagctattactagcaattaccaccggctgtttcgaatttctaacagaattgaagcaagaaaatttaacaagcccggatttgcgccttcttcatgagcaagtaagcacagggacagcggagttacaagggtatgaggcgcgagatggactgttgtactttaaacaaaagttggtgattagcaagcattctaacttaaaaaaatagatattgcaggaatttcatgattctcctttgggtgggcatgcaggtaacaaaagaactttcctccgtataagtgcaaattttttctggattggtatgaagagagacatttatgaatatgtgaagcaatgcttagtttgccaaacggtaaagtactctaccacacaaccccacgcgttactacaaccactaaatatccctgaaagaatttgggaagatttggcaatggattttatagtgggattgcccaactcgcacggtcttacaaacattttggtggtcattgatcgattgaccaaatatgcacactttggcgcactttcagatcactatacagccacgaaagtcgctgagttgttcaccaatatggtcattcgtttacatggattgccacgctcgatagtatccgatcgagatcccattttcaccagtgctttttggaagaagttatttgaattaatgggcactaagctaaaaatgagctccgcgtaccacccacagaccgatggtcaaacagaggtcaccaatcgttatgttgaacagtatcttcgagccttctcaacagataatcccaagcggtggagtaaattccttccatgggctgaataccactacaacacaagttttcattcggcaattggcatgacgcccttccaagcggtttatggtcgggaaccaccatcaatatcagcatacaccaggggaagaacgacgattcaagccgtggaggaggatttagtatcgagggatgacatcttacaaaagctgaaatagaacctgcatagagctcggaatagaatgcggcagcaagccaataagaaacgcagggatgttgagttcaatgtaggggaattggttctagtaaagcttcaaccgtatcggcagtcgacggtagctaaaaggctcaacaataaactgtgcaggcgtttttttggaccatttccagtggaagcacgaaga

SEQ ID NO: 15953 - DNA, 7915 bp, Cannabis sativa
taaaaaaaatagtaacttaaaaactcaataaatataatacaaatatatttcaaaacttaatagatcaaaaatataatctattcttacatatattttttcttctacgtacatttcaaaataaagttaaatatttctttttatatacaattttttttcttctttttcaatttgttattttatttattttaatttattattagagacataaaacaaaaacaatttattttattttgttgttagttatgtgaaaaaaaatatatgttttaataaatattaaataataaccgatctaattcgcagcactttcgaggattagattggattggatccataatatgaaatttgtacttagtggggatcagatacattatgaacaaaatagtgcagattagattatataggatgaacacccttactgaaaataatggcagaaccatgtcaaaaaggaaaaatgttgacataagctggttagaacttgggaacatttcacactaatatatagtctagtacaataattgatgatttacctttaaaatgatgcaaagttccaagcttagttccagtagacatttcccacatgtacacaagcccatcatgtgtgccaatgatcccgtggccggcagaggctccgatggcagcagcactgcatgaagattgaagaaaaattcaagaaacattttaaaggttatccaaaaaaagacataatattcaattgttgggttggagaatgaatgagtattgttttagtaccttgggtccaatatactccctatgattactgtatttttcaccagtagagcaagcctccaccatcctactgattttgtttgataatcacttgatttatagtcatgttcaacatcagaatcaggcataacagagacaagaagccatacagcgacatcttccccatctaatggcaaaagggaatcgtcattggtctgtaccgaaaaacacatatttgttgcagttatcattctatggacactttcttctactgttgtgtctctgaaactttgacctttctttttccaattgaacaaaccgactggaatgaacttgcaaaaggaagtgcttggtgaagtgaactttgaaacgatgatgcgttttgaaatgtccctgaagagaaaacaataataaaaaatgctgtcaagcattacacaagtcaaaattcaaagacagaaatatctcctcttttcttccttcttacctggagattaaaatgtaacacaggcaatagagaaaacactctttaagaaaatcaatattgtaaggtttagttatatgagtgcaaatatacatgagttgtatcatgtataagtttctgcagtcctaaactgtagcaaaagaaaatatgtattaccagctgttcatcctagtcaaggaatcagaggaatcatacagttcaagcaatctcagagtggaaaaagacttaccataaactaaattctccaaaaccattatggccgagaacaagactagtgcacttgggaattttctttatctccactataccaggggatacaaaagcattagcaggcaagatgaacttctcaacctgtgcactgaaagcatggatttaaaataaaataaattaaaaccacgaaataaatgtgaaaacaagggtacaatccaaatcttgtcactaccagaaatgattgacaaagtgacagaatatccagatcagatgctaacaaagtttgcgatcatacaaacaggcacaaatacaccagcccaaacaagtcaatgaaattggtaagattaataaggttcttccaattgaagaatggttgtccagcagtcagtactctatatcgtcaaaccattctttcatttaaaaaagattaaagaatgtgtgagaatttaacaagttaagataaagggataagagatgcctagatggatagataaatggaacaggtataatgtcaaaacaaaagcatgtacaagccatcaaacatctgataataggttcactccataataagaacctaaatgtaacattgtcagaaagacctacacaatttccttgagtagaaagtaaaacttgataacagggtacaataaaactcaccaccatgttggattcataacccacagatgtaatctcccactctctccaacagcaacaagacggttgggttcacaaaccaaaagatgttgtaagctctcagctgtagtcagttttcccactactgagacatatccaaggtttacttcaacaatcttcactgcattcccctcaaagctgcttgatgcacatactgagcacgtacaaggaattctcccttgcctgaaagaacatagaggaagatgttcacctaaaacttcattcttctttcaatttacttatattatataatcagaataaagattcaacctgcaataaggagttctaatgctgtcaagtagaagaagatatagccctcctggagtgaactgcacaccagatctttcaagatcaatctgacaaaggatacacaaacctcagtagacatttgatacagcgaacaagcttagtctgtatacaaataacaacttacttctctaccaaaatagtcttttagaaccggaaataatactgatgtgtgacccacaaaagagggatatccagctgttggttcatgagttgctaccttgtagataaatagggtcctgtacttatcaagcaagtcacacaaaacacaaatgtggatctcgttgtccccagtgctcaccgttaaagacaacacagggagtgggtggacatagcatccaacaaggtcaaaattacctagtaaatctttttccatgggcatgcctttaggcttgaaatctgaactgtattggcattcttcagcaatatatgaagagctgtgggagttacttgctgcctgtttcttacatgattcagaactctttcgccctaaggggttttcatgccttatctccttgtcgacatgaaggcttgacaaacacataattgactgatcatgtgatacagcagaaactgtattgtttagtagacttttacaatcagttgtaggtctatatacaggaatactcttggatggccctgaaatcatggattcagaaccaaaaacatctttacatgatctgtcataagaccagcccatttctgatgcttccagagtattacaatttcccatggtggtagatgtttcaggaacacagctatccgcaaaagttcggcatataatactttctgagagaggagccctgtacttacttttatgctttatactttcgactttttttcgtctggaatatactaaacttggtgtttgagtgagtgacatattgcaggtttcttcaagcactgttttaacaccagattcttctagtagcagactctgtgaactaagaataccttgagatttggaattatcatctgtaccaacagctgcataaaatccaatatatgtaagataaaatctcaagagagcaattatgtggtacatcttgagaaatgtaagttagacagattcaatatgcttaaaactattctaagcaggaaacaaaaaaaatatttatggctaccaaaatctacatctgcagacaacttgaaattttctagcaaaattatattgtaaggaccaagaagtgactttaaatagtataagttgcctacttcagacacaaaataattagctattaagcgtaaatccttttttgtcagttaaatagattaacgttttcaaaacatttgagaattactgaaagaaatttgttggactgacattaatgtcaatcctatcaggtgcagttttgagatcattatcgtgggaacaagttacaatacctactaagttttcatctatgctcgcacaagcatcccttatttcttcagcaaattcatttttcttggagatattgcaacttggcagagactcagatatatcatggtcagcctgacaaattgctccatctgactccacatttacttcattacaacataatttatcttttctttcagtggtctcaagacagcagtctaatggcttgttatgctcctgaacaccaataggaggtccaagagtgtcccgggggcatgcttcctcgtgaaaacaaacttgatcagctttggaatcaccaaagggcattatctcatggtaagatacttggtgaacactcagatgatctgctacgcatttccttgcatctgaataaccaagacttgtgcactggatattcatcagttcctccatatccaccattttgttttcagcattcattaccgctgcagttgtgaaggtataaaatttcaataaaattatacaaaagtatattaaaatgcttaaaagaggatggcaattagaaaagataaagtaaattaatttgaaaccatgaataccattattctggttttcagaaggcaccacgcgagaccgaatttccaaagagctaacgacagcttttttcttccttgatgacttcttgagcaagggaattgcttggggaagcagaaatgtcatcatggacttggcagtttcttgaccaactgaatcaatttcactctttccggaattggatgtccctatttcttcttctggattggattcacttgccaaaccttcagaaatgaccatctctgctgcaataatttcttcttttaacaatttagagcttttatcatggatacttagactataatcacaaatattatttgcatttaacaactagcagttacaaaaagagtgattgggataacaaaatactacttgggaaatcacattaaagatgaataattcaagaaataccttgcacaacatccaaggtatcaggagcataaagctcaataacattcttgtcgtcgcaacctcctggtcctgtagaaatatcttgcacaagatcgaaggaatcaggggcataaagatcaacaacattctcatcagggtaatctcctggatctggtaacctgtcaagctgtgagaatataagaatgtttcctgtgttaaagcatttacctgagtactatgatcccaactaattttccacatagaaaagccctaactttttgcaacattgtgataaggaaaaaaaaaatgaagtgtgctcacggtattttccttgttggccactgttacagtaagaccagtggatgtacaatttcctgaagtaatgggcaccattgtttcttcagcagggacaacgcctctaagatgattagagatgccaaatgaatttgattgcaagtccttttctgaaacgtgactcttttcttcttgaaaaggtagtaaatatatggaaggtgacaagactggtggaggtttacaattagcactctctttgttctcttctactgggtctatagcctcagcattgtttttcagatcttgaggcctggatcttttgcggttaaccttgctggatgactttgtattggtgatttcacgtctcctactttttcccgtgatacgagaacttgccaaatgtggcagattacatgaatctgaaccatgactagtaggatcttctttaccagtctctttgcaggaggtggaggataaaaaaatttgttctgccgctccactaacatttgccaccatttctcgaagtaatctctgaataaatggatttttaaatccaaaaaactgcataaatattgcaaaaggaaaaaatgttgattgagcacatcctgtccatgacatagcaactaagcggggtaggggtaggggtaggggtgacaaaaaggtatggaaaggaaattagcataatggttaaaccatgctgtataaagcaaatgataataaacactgcatttgatgaattatcagattttaaagaggaatagcaaagggatttttttaattcttttttttaaatgctccaacataagttccacacagtgtagttcccgattaactacaacataactccttcatcgaaacaactttagtttatctcaaataaaaaaaactaaacaacttcagtcaatgcatgtaattttgagtagacattcgtgcaatcagtatcatgtgtcacaatgtgcatggattgttgcactgtcatacctccacaccatctatgttgcacgaaaatctcttcccatgcaaaatttttggacgagaagaacagttcttctggaatttctcccacgcaatatctggagtttgcccagaagacgaatgtccatcagcagaggtaatctgtcagagttcatttccaatgtgtttatctcaagtctctacaacctcataaatcattatgtcgaaagcaagaggaggtgactaattaccatgaatacaggtcctttaggaccctcattaatttccatcctgtatacactaccgttatgtgctcgaacagcttgatacccaaccggatatggataccgatcttttccctgttaaatatcatcatttatttacttgccattaaaatttaaagtagaaattaacaggagcaaagtgtcacataacagagaaacataaatttatgcgcgacacatattcttgacaagtaataaatcaacaaataagcacttcgaagaccagaacgtcctcaagttctcataaaaaaaacatatgaaattataaaattacataaagaccgaccataaagaattctaaacccattaaaaaattcctaaacgtattcatctctatcattcaaaaaatgcccccagctcctgaactaattcaatgattaagcatttttttaagaccttattgacaatgggtaacttcaacgtcgtctaatggcaccagaagtaaaaactctcagtaactaacattaagcactagatcaggttacactagtaactttcagtaacagcagtctctgaaagcagttcatgtgaataacgcgcttcgtaatccatactataaatcaccgccaaaactggtcataaataagttcataacatgtctataaaaatcagattatcacacacaattcctaaacgacaatctgattctgaagcatctaatcgaagatcaaagcgagtaaccacatgacattttcaagcaaaattgaagaagaaatggaacaaatctaaccctagaggagctccagtacttcttgtccaaaggaccaccatagagagagccaatggacgtgatttctagaccgtctggtttatcgtccttgcctttgagcttcttcatattgaggacgcagagtatctgagctcgccaaatcaaagcatctcatttcccattcccagaagagattgagaagatttcaatggcgggaatgaaaaatcagacttaatttcgcggtctttatacgcttttcctccacacccaatgaagttttaaaacccaaaacggtgccgtttccatgcaatagtcaatagaatactaaaaaatttcgccgttgccggggatcgaacccgggtcacccgcgtgacaggcgggaatacttaccactatactacaacgacttgatgatctagatttatgttataattaaaatatacacataatgatatttgatgtatatatgtggcttttttttaaagaataattaacatttttctcccctaaactttgggcatacctgattttgccctctcaaatatacgacttgttaagaagtctccataaaatataacagttacataattatgtcccttctattagattccgtttcttttaccgttaaacattagtatttttaccccctaaaccttgattaatacaaaattttacccccttttattaaaaaaattaaaatattctatttttttaacaattataatattctattaatttagaaaaataataaaaattagaaaaaatattaaattaattagaaaatattaattttgcttaaaaaaatattttcaaactttattttatttatgtatcttaataaaaaatcaaaccaaaattattgagaatctaataaacaatttaaataaattaagattttttgaagaaaaaaaattaaacttatttatatttataaa

SEQ ID NO: 15954 - DNA, 9336 bp, Cannabis sativa
tctatttgaacaaatatcttttggcaatttaacaattttttttaacaatgtttcactgacctatttatatctcacaaatttatagtgacatgcgaactccattaccatacatatctaaataccaatttattttgctttttctcaacatgctgaatataataatatctttcccttttgatcataaaatattaatttgaataacctgcccagcacaactacttttaatctcaaaagagttttttaagcaaacaatctatgataacgttatgttcaatcatatttctaataataataataaaactaaacgacaatcccaataatgatcgttggttttgggatgctaaaagtcctgtactaatattatacaacagcttattagtgatgataaagttaattagaccatttctaaatccaactaattaattaattgttaatttgaatgattaaatctaattaattggataagaatagtttatgttttttcagtccaacttatggccaattggccacatacttacatctcacagtactctaattttaatattaaacaaaatcacctgctataataattgtgatctgaaacgatatatatttagaagtaagagatagcatatattataatattaacatattatatcctttataaaatttgggaattataaccattgactcttgcaagaccacttgggttactggtcctatcaagctttgcttttccacattaattgcattgtatttacatatataaatttccattttcgatacaaaatatctctagggtatttacaaaactagctgggccaggtatagtcaacctcaagataaggaaaatgggtcacacattcatatataaacatataaatgtgacacaagacacagtaccaaaaacagccgaataccttgtttgtcttcttttaaacccaagccatcgttcatttgtcctaaactatattcaaataatgcttattttgtctacaactcaaatttctatttttcttttattttctagtgactttttatttattaattatagatattcaaaatattgatgcatatatttttaaaaggttgcactctacttatcaattcaaggttttccagcattattgatgttacgtagtgcagctgccccactatgccccaattataattttttttctttatttcttttaaaaaataaaaataaacgccaccaaataaattattatatcgaattaatagctagcctctttattgtcaataaaagtggggtacatatatttaaattagggttcaaacaaagaatcctcatataccggatctctttgtaggctaattcaatgtcaatttcttatagagtaaataaataaaaaaatttccatgttcatttcaagctaaagtacgataatatacatatatatatataaatagaaatttcacatatatatagctaaattaaatttcctatgtccttccctagtaacataccatacatttgactattgacaaaaataatacacacgcaatcactaatacatagtttcaactccatttgaaaagactataccctttttctcttttgagcactatatttgaaaagtgcttattattaatttcaaagtaactccatcccaacttacacgaaaatatatacacaaatatttttattacttgtgccaaaatttatccaaatattaaaataaaataatgaaattcaggatcacctagtgacttgttcacatgcaagcacgtgggatcataaaagagacttcgtagccaagtatatgagtacccacaatcccacatgaaatggaaagttagctttactatttatatggtagtgctccattaagttaatgcaaaagatcctagtacggtggatgaggtacggtgcaacggccacaatgttccacgttgggattcaacatctaaaaaaagagaagtgatacacatgattggatcagattccaatgacgtgacctgatgtcaatcaaggtggacggaaagtcaacaacgtatcaaattactctatttaatactaaccaactatctatgccatataactttttttttttaaaaaaagaaaaaaatataagagtaatttaatcacgtaaagttattttatgccactacttaacaattcaattttttttttcttctaattttctctttcctttctattaagttttctttgaatttgactgttataactatttattgcttccattaaattaaaacacacgtagttgcctggaagtctcctcaaagtccactatttaggttccattcattaagcgccgtttacgtgtcaaattgagatagccgaatttcttgactgttttgtggtacacatacatacttgcacacacatttattcaattttaaaattttataattatcttttagttattttcattcaagagtttacttatgaatcactattaaattttatagataggatcaaatatagttaagtatatattatatttgtatttaaatttgaaatagtacatatataattgactaataatacaatagcgtttttttttttctttctccatttctgtgtatttactgaaaattttgaacaaaaattattcaaaattgaacaataagaaagaatgaacttggtcgtcaagatccttacaacaacaaaacctatgaacatgttatcttatcttgtgtactcgtttaaaccaaaaaaagaacaaaataatgaagaagaaaattaaaaaaacctaatgaacaactgaaacaattagaaaacacaatctctaatttcctggaaagttgctgatcattttgttgttgttgtttgggttgctaattggattagcagtggaaccagcagcattaatattattattattctgattagttccattatttccaatgatcgaggagatagctgcagcaagtgctgctgtgaaatttggatcagctgtgatagcagcagtagctgcactgaccgaatcagccaaagaaggctgcggatgagtttggtgggcttgtaattgggcagctgaagaaacgttctgcatatgattatcttgaccgccagccgatgagagctgaaggcctgaaaacttggactgattgtatagaccttgtccaaaaccattgtgtggtgtggcgaagttttgggattgtcctaatggaacttgaaattgggtttgttgagatcttagcatttgtagtgggttggagttattggttaggtccaatgtgactgtagggaatggagccgaagctgaaattgtggccatgttggatgagcatggaagaatggctctagctagtaaatttgggttcattaatccatcagcactagacatagaaccagacaacaacatgttggctgctgcagtggttgtcgaggccatcgccatcgcagctggtgggagcgggtggatgtggttcccttcgtaagttgtgatcaaaatggttcgatcttcagcacaacgttgaacctataaaaatgagaataataaagaatattagatacttattcacaaatttttatttgtttatttagttagataaattcaattatattaattcaagataaaattaacttacttgtttgcgaacgggacatccaacagccattgtacaacgataataggcacgaggacaaggattccctttggccattttttgaccatattttctccattgacaaccatcagttatctgaaatttcgaatttaaaaaataaaaaataattagtactgttaatcataatttataaccaactttttaatcattaattaatgaaagaagtaactatacatatgtactaaccatgggagcttctgatcttgctcgaactgatacacgggctttcctcatggtggcatcaggagattgctcgatgggcttggaaggaggatgattcaacttaggaaccttgttattattagaagcccaaccttgggactcagattcggggctctcatctctattgacccttttacaatctctataactagcagagctgtgatcttgattatcaaaaggggtaccatcttttaatgtagttgtactattattatatttcacatcttgtacaatattattattattgttgttttgaggtgttgcggaacgggttctctcctctgatgatgaagagttgttagacacttgatcatctgtcgtctctactgtggcagtacttggtcccaaatcaaggaattgtctctcatgtttgacttcttgatccttattattattcatctgataatcaattatataaattaataattactcacgatcttgaaagttgagctatagattattataattaaatgtaaaataaatcaagtacctgatgatgttgtatgagctgagcagtgtcggttctatgattttgttgctgttgtagttgttgttgttgttgttgcataatagaaaccacatgcatttgtaaagcactgtaattattgctcacctgagcaagcatttcttttaacttttgattctcatcattcatgttttggagctctacttgtaaacgaaccatcttaaacaaagaaaataaccaaaaaaaaaaataaattaataaaattaaaatataataaagacattcagtactccgtaatttgctgagattattaaaattaccttgtttttggttagcttatcctctatatcagattttacaccatcatccaccgttgattcatcacttccagtattggcagttcggaagatgcaaatttaaaccagtttaaaaaaaaaaaaaaaatattaatttacataattaaaagttttatttgatcagatagtgaaataataattaagagaatgtattgtatactgatacttacatttaaattcgaaggtccaggagtggcctcaccatgggaactctctttcttgacgcttacagctgcaacggctttggaatcatcgcgatcgttgactgttctattcttctccgagaagaaatcgaccacggaggtagcggcccgattctcatcggaagaaggcggtggcatcgttagggagagctgatcttccctgcgaggaaatctaacggctgaaagctcgacgccggagaacatagtcatggtcttaggtgaatcagtagtgttacagaagatatttcgttttgaactagtgtggtcgatcacagatggtagctgattattaaggaagaatccgcgggagtcagaatcaagtgtgagaccccatcctttttccataaaaataccgagaaagcgcgagaaatctgaatctcaatggaactggttctagagagagagagctaagaaggggtggttgtgtggtgaagtctgtgaagtcttttaccgctgctatcggttcggctataaaaagggtttggaaattggaacttagaccaaaaaattggatttgatttttcgtagactaatgctattttttcttttattttttttttaatttttataaaaataattttgcgtaagacagtgcgtcagatgacaggtggcataatctctgacagttcattatccaagtcccaacccgatctttatttcctaggttcttttctgtagcacagccctttaattttccggggtgacccgacccgaaccaagttaggactctttatctggggcccacttcaccttcgtcttcatttcgtcaagacaagagtttgactagttcgtaaaatcaaatgaaaaagaaaaaagggaaaataaagaaaaattgaatccaccgccccgaatggtgcggcgccttccacgtgaggaaaataaaaaagaaagaaagggttaaggagagggaaaggaaaagaagccaagtcaacaaaattgacggcccggctcttactttttctgtttttgggcttggatttgggctatgtagaattactcgtgaccgatgaccgtctggcccagtaacgaagtctttgtgtgggccccaattaaagccctacctatctcatctcacccacgtttcagatctgtgtaccggctttcatgttgactctttaccctctctggggaccgagtcacttacttagactttatttattaatttaatttattttattgggtttaagactttagactttcttgatttgatgcaccttttcttctttcatatttattcttttttttctcttctcttgtggaaatacaccctgcggaataggtagacggtcttttttatcaattaatttttgtttatatactataaataatacttttggcttaacatctaagaaattttaggaaagaaaatattaaatcgaatatggaatattccctcagttaattactctagaaaatgctattatattgtaagtttacatctcagcacttcaaagtccacggtttgatcatttcgagctaattttcttgaaatatattactgatcacactccgatttttcattttctcaatgctgaaaattacattgaagcgttttaaatgacggtcacatatatatagataagtaatctttgaatattttatttttttaaaattttcttaagaatctggaagatggaattttacattttcttcaaccaatgctatattaatagaaaaaatgccttattctcttacatgaatgatgaaaaagacatattattggcacttaatatttttcttagtgctattggtataattaaatataagatcttaaaaaataatttttaaaaaatataatcgtaaaatataattataaaaagtgttaacaccgttaatgtccgataacaatattgttttgaaaaaccaataattttaaacatttttacacacggaagatcaagtatatatgatcaactgggtagtttacgtactgggcttactaacactgtgtgctgattaaaatgaagtcatttgatcataacatatggattacccatcgaattaatacacctgtctccatcaaagtaaacgattattattttagataataagaaacttatttatgttctccttccattagtcaaagttgttacgtaagtattctatcatgggtgtcattattaaatattataactaacttggtcataattaatctccttaggtgttgggatgtgattgagttactatatactataatttgaatgaaaaccccattcccggccaatcataatacttttccttttagcatatagttagcttacatttttgggattaaaccttttatatttttttaattaatttttactaatttaaattatacaaattattggtttcaaataagcaaaaagtaaaacccatcataatcggtgtgcctcgtattattaaattaattattatgtattatgcaatgccattgaaattatcaaagcagtgaaagtgaaaacaacaattattaaatgcattttagtaattaagtacttaattaacccctcattattacggtgcgctaatttttctggatgaatttgcatatttttcaacttctcgtgacattcttttgctttatcgtttttaattatattcaatgtttcttttgaaaaaattgttcaagtttgagagaaaaaaataaaatgtgactttattctatatatatagttgtctagatatgtatcatatatatccccacccaatcaaagaaattaaaatatactatagttagcttcttttctttaccttgactaacaaagagttctattttgaaagaaacttcaacatcaaataactattatataacacacagcttgaacatcgtttagatttgacgaaaattgtcggccaaaatttgaccaattggggattaataagtaaaaaaaacctacacttttacatatgcactaaaacattaccattaatttttgctattgcaatggatcacgtggatgatcattttatgattttctagctcgtttggccaaacttaattatgatatggattggcttatatatatataattcatccaatagtagataatttctttatgcatggcgccggcgttgtcttatgaagaaaattttagagttcatgtgtagaaaggggaaagaaattaagaagagtcttgtctttttattcaaaccttcggcgctatagctagctgtctcgaaaaaaaaaagaaagaaaattaagattcctttcagaaggctacatagctagatataaataaaaattattatatattgttcttaagatcatacaaatcaggttttaaacatggctagataattctggctactggtttgtactttcctcgatctttctatactaagattcaaaatatgatacttataattattactaataaacccattgcatggtacatttttcttttcttaggtgggaatgtagtaagtttgtacaaatatttagtgggtataataatgtaaatatctttctacacttgaattaatttcacacgcccatataagccaaacataacactaaacacccttttaaacttaacatgttaataagtgtttagtatcacttattaaattaaaataagtggaatattatattttattaattaaacaagtttatataatatattatattggatagtcttgatatcttttttcttggtaatattatacataaatatatatatggaatattttaatgggtggtataattactaaaggaatttaattataaatattaatcttaaaaatattaaactattacattttgatctaataacaaataattaataaaagtaaaattaaatttttatacttaatttaactacttaattaaaaaaatttaaaaaaattcaactttttttttgtcaagaagccttttttcatattattttttcagccgatagaataaaatcagtccatataatataaatataaaaaatatttttaattaaataaaaaaattaagcatatataagaatttttttttttaaatattggataatacatgcacccatatatcaattaatttcaaagtaatcatatctttaaagtaaaattagtctcatctatcaaaaatgatttgccaattgccatatatatatgtgtcaaatttgtgtctacacttctatacgtataatttttttttctatgagcaacaacttcattaagggctcttttggaaccgtcgtattatgtcaattgtattgtattgtattatatttaattagattatatatcatatttttatataatattatgttaaactttaatttaattatactaaaatttatatatttaggtgtctataaaaaaattaatactacatatagttttacataaaaaaaatatcataaatacaattcaatataatacaatataatacgaatacgacatttcaaacgagccttaagttggcaaaagatgaaaccacaaataaattcattagtagaaacaaaggttctaccttacccaaagaaaataacaaaagggttacagcatttgtttgttgctatat

SEQ ID NO: 15955 - DNA, 5949 bp, Cannabis sativa
  modified_base (180)..(217): a, c, t, g, unknown or other
tgaaggatcgcatccaactgaaggagaatcggactcagatcttgattatactctggtacagacaggaatcaagggttatagatctgagtggaaggatgacttaattccgctaccatcactgtaagttattcttaacttttatgtgttttgttcattgtttttagaagttcatatttaggnnnnnnnnnnnnnnnnnnnnnnnnnnnnnnnnnnnnnntggtaaaattaattccaacaagtttgactttaggatattccaaagtcgattatctaagattgtgattctaattttaccttcatgatttgggagacttcataaaaggatatggatactaagttgaagtttagcatagttattatccttagactaggggaaagtttgagagaagtatcaagacatctgaagacatgatgtcagcatgtatgataagcttgaagggtcttgaaacaaaatctcacttaggttgtgattttatacagtaacagttgacaggttattagtggtttggcaccatatgaaaaattgtagatgaaaggagctaagtcacccatccataaggatgaagtgggtgaatggaaatggaaaaaagtaaccatggagtttgtggttgggttaccaaagattacagggttgtgtaatttcatttaagtgataatgggttgatataccaagttaatgcacttcctaccactgtggacgacatacacagtggattagtttataaatttgtacactatggagatagtttgacttcaggatattccaaagtcgattatcttaaattgtgattctaattttccatattttgggagagtttataaagggatatggtaactaagttgaagtttagcatagtttttatcctcagactaagggaaagtttgagagaattatcaagacatgctgtgaggatgtatgataaacttgaagggtcatgaaacagagtctcacttgggttgagattttatacagtaacaattgacaggttattagtttgcaccatatgaaatattgtacatgaaaagagctaagtcacccatccataaggatgaagtggctgaaagaagatatcttggaccgaaatagtctgaaattccagtacagctatagaagaattagagctcgtgtgctcatttacaagatagacataaaagcaatactgatctgaagcgtaaaatgtagagtctcggttagagaatttgtttttctccgaggtttacctttgtgagggatttggagatttgataggcagatgaaaagttggggaacaaggagattccgttagtttaagtcctgtggtgaaacatcaagatagaggaagtgacatgggagtttagagttgcagatgcagaatagtattttggtgtgctcaagtaaattttgaggacaaaattttcataggagagaatagttgtaatatctcaaaaattaattataattaattaaaacatattttataatatatgaagtaatatagatattaggagaataaattgagtaagattataatcttactaggtgaatatgagaaaatgagcttaatttatgaaatgagaaaattaggcgcaatttattaattacaaagattttattgagttgtgtgggtaaaatacatgttaattgtgaaataaaatatattcaagtccgacaacagtggaaactcgattggttggccacaaaatttcacgacaatattagaatgtgtgattgtattgggaagtgtgagttagtgtagagttattgggatattttagttatgactattttacccctagtcctggaattacttagaattttagtaagggtattttagttttctttttttcttttcttttttttttcctatctaagcttatcttacgatgtttttgccacttagtgaattttaatggataaaggattttatgttgaagcttttagaaaattgaagaaaatgtaagataaacatcacttaaacctatctccccctctttcccttgttcgacctagaagaaaccagagaagattcaaggatttcatcaattttttattcaatccttgtcaaataatcaaccttaggagtagttcaaggttggggtaagttcctttgatccctttccttgtttttctaagcttaaagttaggttatatggagaaatatggtgattttgggtttgagagttttggtttggtttagaagttatttttgttgattgtttagcctagaactaaggtttaattgagtctgttttgtggttatgcatgttggaagcttcaagcttgagcttcaatggtttgtgtatattgttgtgttttgagttggtggataggtttattttgggtatataatctgttttagaagtattgatatggtttggatcaaggtcaggcaacatttagtttgaaaactcaaagttttgcctactaatgcgaaccagtggaccatttgggaaccagataactgagacctgtaaaattggtgagccggttggggccatttttgggtatcttcatttttgtgtttttatttagtgtatttctacgctctttatcaatagagaaacttccgtgtttgtcattaagtgctagaatggattaaaatgagctgtaaacttgtttaccgtggttatgacatagcgggcccatattgtcaagcgttttccactcaagttgaccgacatgcttgaattttaacttgaggtaagaaaagtacaattgtaccacatatcatgtcaatatatgattcaattattaccgtctataagaaagagttattattttattggttgtctcaggcaacagtacaagaaagagttattactctaatttgaagttgttgttaatttttttacttatcggttgcctcattagacaacaataatgacattgattgtctaatcaggaatggtatcgaaaagattgtctcattagacaacgataaataatggttaatttattaagttacgacattggtttattggaaatggcattagagtcataatttcacaattttggagattttatcaaactctagacgtattatttaagttatatatgcattatgtaatttttatgatttttgctcggcgacaacgaaatatgcgatggatagccatttgagtcacttgggtaagtcgagaacctttttcttagaaggatacatatttatgacaaatagaaaatcgggtttgagcggggttatggcttttgaccattttacccctaggctttatttagtaaaagtaaaaaaggcattttggtaatttggcattgagtgataggtggttagttagttgtgtgacacctagctactattttattcagcctagattaactattttcttgaggattaattaattaggaaggaaaaacaagaaatagacaaacaccactcttattcttcttctctttctcgaaactaagaaggacctaaggagttgttgctgaagttttgcatatttagcaaggtttcaactgaaattctttagctcaatcaaaggtaaccctagagctttaatctttgtgtagtttaaagctttaatcttgacttggttatgcaattttgtgatatagtggttgtttaggttaggttcttactctaggacgtttccagaggttattttaagtttgaattaactatttgttgttggttttgctactttatttgtggaatgggcaagtttgagcttgtgagctcatacttggctcattaatggtagaattagattcatgggttgtatgatgtttttacctattggaatatattgtttgaggttatcacaggttttctggaaagtttggagaagtttgggcacgttttgatcatgaatcagattgttttaggttacctggtgcaaaccggttaaccggtagtgtaaaaccagttaaccaattttgtgacaggtttcccgaataagccgtttcggcaattcgcgttatttcctaagttttggttgtttaatttcttgatgtttagggtattgttatagtagtgaccaatagcaaacccttagtgggagtttgggtttcccggattagggttttgacatgtcatttacccgtatacgtgaatgtgactagggcatccatccagcacgaagttttccgttcaagtcagccaacttatttgaattcagaaataaggcaagaatagtatagaacatattatatatgtaaatgtatgtatgtgtgatatatacatattgtgctaccaaactactatcatagcgacacaattattgtatcggttcagcagtacaggcatcgtaatggttaagagtgatatcttgaccaattatacttttggttgttattgatgctatcatagcagtacgaacatagagtcggtcctgcagtgcgatcatagtgctggtagtgggtgacatcatggtcaaatagcacctactgttaagaacgttcttaaatcatctgataagtcttgtggataggtgtatgggcgcctagacataagtcgagaatatatatattttgatgtatgctttttttactgagtctgttgacacagagttgttactttcatgtttaggtaaaggtatggcgaaggttgaacaagagtgagctctaggcttggatgaagattgtacatgtcaaggtgacgcgacctggagtgttcagtctcgggacatctggggttgtattttgcaatcgctaagcaacaagattataaatgcattttcaattaagtttgtaaaagtataagttcgggtttccaacttttgtaaataaatatataaaagtttataaagtttaatagttaaatcaaaagttttaatttgacacaatttttaagaaaaccctttaattagcaaaggtggcacgttatttggaaaatcactttagcgcgcctaagtatctgagcgttacattgtggcaaagatagaagggaaggggcgactgatagggttagagaggagagagagatttgttttttttttcagttttgtttagcatttagaaaataaataaatggtaagggtgaataaattggaaaattattaggataatattgtataaaataattaagagggtattttttgtaataggggttttgttcaagtatattaaatcaaatttccttattattattattagtagtagttgagtatttgacaattaattttgatagttatacataacacaaaataaatatattggtttgttataaaaattattatattcaatggttatagtaaaaatatagccatgatagttacattttttgatgacctgctatagcaagtcactaacaggtaaaaattttatttttagacttaaaataattatatacttaaaataaattaaatttttaattaaaatatttaataaaatcttttcagaaattaatatttataatcttttgggaaattaccaatatactatttttttaacttcttttttttttcaaatttaatgtttgggtttctagagtggtttctccgtcagtttctatgtgagttgctatacgatttttggttgcgatttaagttcctccgttagttgcaattggagtttctatgtagaatttcgtaacaatgcaaaaaaaaaatatatttagaagtttaaaaatgaaaagagaaaggctaacaaatggaattatttttctctctagtgaaagttaatgtttcttttatagaatattaaagcaaatattcttttttattttttgctacctaaaatacccttaactatacataaggtatatattattatgttttattcattcaaaagaaattatgaacaaagaaatataactatctgatcaaaacatggagttgtcccgtataatttaatttaatatactgtattttttgttgtggtacatcagtttattttccaattatagttggagtatggttattaattacataatatgttacatttttttaatcaaacatggatgggtatatactattaaatgattttttttttttttggttgttctcttttta

SEQ ID NO: 15956 - DNA, 2618 bp, Cannabis sativa
aaaaaaagtgcatagataaaccaattttagaggtgaattattgttgaatttttctataatatatatatgataagagaaggttgatggtttggtaagatgagtaattgcttctattattgagaaatgatggctactttttttctctctctcttgaaaagtagaaattgtcatgtttcgaaaactaacataacatatactaataataataataataataactcaaactattcattcactcactcactcactcactatccttttctcactgcaaaaaactaaaaataaaaaaagtactcgtttctcgtgccacaacaacaaagacttttttcttcttcttcttctttcctcatcaaataataattatgtaatcatttcaaaaaataataatattaaataaataaaaaaaaaactcaattttcttaatttatttttacctgtaaatgactcttaacatgagctagtgttagatctttcacatccattagctccagtactgattttggtgttgcccctttcaaaaaacaaaattaattaaattaaaataaatatttatatatatatacaaataaatatacatatagatatattatatatatatatatactttcatggccgccgagaagctgaacggcgtgaacaaaacgagaatgaagagaagttgtccatctcattcttggagctctcatattcctcttactattattcccaaattgattatgattatgattatgaactcgattttccatactaggattgtaaaccctagaagaaggaagagaaattggaagaagattaggatatggcaggatttgttgatgagaataatacaacttgctataaccaccaccaaaacaaacagcaccgtccgatcttaatctcaattgatcggacggtgtgttgttattattgtaaattggtattcctttaattgttttcatctgatgaatattatcagatgaaaacctagttggtgatgatgatgatgaaaattgtttcctttctgatcggcttgaaaagttgtcgattcttcgaatcaacggctggtggtggtggtgatggcggtgattttcggttgttgttgagagtgagagttctgtgtctgtagttcttactacctcgtgacttcttttatcttctaattcttcggtttggggactaactgcttgattttttcgccatatatcaaaaggagatctttgagatgattcggtgtcgttttgggtgtttggaagatggatttgaagggaaagatctggaatattattataattataattataattatttaaacaaagtttataattctcttctgataaagaagatcccttgttatgattatgaggcattttttttgttacaacttatgaatttatatatatgtataggtgtatatatatatatatatgattgaagtggttttggttttggacaaagaaagaaaactaataattgagaaagaaaagatgagagagagagagagaaagaagaaaaataaagagtgtactaattaagtgtgctgtaaagatatataaggcataatggaaaaaaggaagacttttattttttttattttatttttttcttcatcttaatcaagaaacaaacatccttatgagagagagaattgagatatgttcttaaactattaaaatataataattaaaagaagggaatgaaatttaaaagactatttaatatatatgtggaaggtatattgtgatatatatgtatgtgaatatatatatatatatatatatatatatgggtttatatgtttctttaaatatattgtcctaaagagcatatttaggaaaacgacactttaacaaaaaccctagcttgtctcttatatccctcttattaatactatttttattgtttttttttaatttctttttattttatttttatgatagtcaacaagttagtaaaaacaacatggttaaaaaattttataacctttcaaaagttcagcttaaaaaagaaaaattaccatttgcaatcgatccttagggttttaggattatttcctactttgtctcgggaagagctagcttgctagcgccttctgtggcgtcaatttgtgggctctgggcgaaaggtccatgtacttctcgcagtgattaaacttgcataaggaatgtccttagctctggcgatctttttcttagttatcttttttgtgagtttagtgcgaattgaatgagagtttttttttttcttaagaaaaaaaaaactacacttgccaaagaaagttataattcaatttttttagagaaaacccattgtcgcactcatctgaaaacaagtgaaagggaacacccgacatgcaaaactcggaaatatgtacattactttataaatttaataacaccaaatatagcatttatccaattgtaaaatctcttttaggcgattaaatcacaaaatatattgatgaatggttaatatcgctttaattttttttttagaatatatttatttatattttgacacaattttggccatctcaataaatcaatttctttgtgtattttcacaaaattaaaattttttttgaaattttcattttgagatcaataatcctatcatcctttagtcactataaattgaaatat

SEQ ID NO: 15957 - DNA, 4281 bp, Cannabis sativa
  modified_base (97)..(103): a, c, t, g, unknown or other
gcattccattggaatgccattccaatactttaaaatgcaaccaaacaaaaggaatggaatgaaaattatttcatttccattccattccatttcattnnnnnnnaccaaacgccacctaagagtttcaaaaatataataatttgcggtgtacatatttaagtttaagtctcagttgtaaataaatactttagtttaattttttatggtggtaatacctaagttatatttttggaacttttgtaagtacctggacattaagtgtcaagtcgttatatacgtgtcaatttttttattggtatatttaaattaatttttaaataaaattaaaaaatgtattaatatggaccgattaggaattgtcatgtgactattaacttgacactaaacggccatgtatttatggaaattctaaaaataaaacttaagtactagctattatcgaaaatatttatacttaagttattattatctgcaatcgaatgctgaaaattactctaaaaatatttgacactgttacttatctatcgtgaaaatgcactacaaaagtcttagattttttgtcacaatattaaaacttatgatcactaaaagtgaaaatattataattaattataaattatcattctgtgattaaaaggtccatgacttaaagtattattagtcacaaaaattacaatttgttgtaactaattaaatgtgtttttagtcacaataattgtaaacagggcgggtgcaggaatggctcccccatacccacttcttaaattcacccccatacccgccccaatatatactcgtttaaattaaagcgggggcggcggggcggggtggggattactcaacgtggaaggattctcatcaggtacgtacccattacatatatattttttttaaaaaaaatgatggtctcaaagaaaataaaaaaatatattcataaaaattcagtaaaacaataaacttaagtagaatagtgtgtatagtaaaaaaatgaagtataatcaataaaaaaacctaatattaagttattttaattgtagtagttatgattttaaaacttaaatatatacatatatcatatcggggcggcttcgaggtgggtatctattctctcgccccgccccgtttccgactcgggtatgaatatttaaacctatacctgcccccgcccccgaaagtcaactcccatccccgccccattagggtgcgggtacccttacccgcgggtataattgacatccttattaatgacaacttgtattcaaatactatattttgtgactaaaaatcacatttaatcataaaaaatttatgttatatatatgactaaaaaattgttactaaaactatttttttatttattttttttagtgtgtgaatggcaaatatgaaatagttcataaaaatggtcccctccctcattaatatttatatatagttttgtaaatatatatatttacaaacatattttttttatttatgcatgtgacttttccatatatggatctataggtttacgttacaccacaaagatttgtggtttataataaaatttggctgtccaagccaacgtcaccatttcaaaaggtaatgacgtcaaataaatctaagttaaatagttatatatattgtatttttctttctttttttagaaaaagggggaaatatctaataataggtaaattaaaaaaattaaaatatagtttaaagagcaaaatcaataataataggctttattaccaagccgtttactattacatagaaggaaatcctaacaacaatctcaaactcaaattccaataagtcaataaaattagaaaataacaatcccatttaaattgtaaataagggaaatatcaaaacaaccaattatagatctaaaaatatttcaaatttaataatgaaagagagatcaggacaatctcctctcgaacaaaccttactaatctagcaaaacagtgtaaaaaaacactattattataaaaataaaaaaccaaaataaagcattaaaataaataaaatctggcaataacaccaagcaaccaaacgagaagtagaatcaaatatgtctccataattccaatgactgatcatacaatccaaaaacccgtacactacaccgccatactggtccaagacgaaccactcctgaaccgttcacctcgctacctaccagactgccatactggtacaaatggagtcggagacgaatcgaaagctgaatgaaacacaaaggagaagaagccatgcagatcttgataatggaccagattggaaaagcgtttggacggaaagtcaaaggcaccgtaactctctctacaaatttttttacttctagttacaaaaaaatttgtgattaaaagtaaaaatgttgtaactaattaattataaatcataggttcgtggcgaaaggtattagtcacaaaaatcacagtttcttgtgattaaatgtgtttttaattagtcataatattacttgttgtgactaaaactaaattattaacttgtctctaaatactatattttttagtcatgagtaattttttattgtgattaaaagtcatatttagtcacaaaaaatcatgttgtgactaaaatattgttaccaaaagtacttatcttttgtggtgtctctcgcaatatcagcacaccctcccgatcagaaccccgcgaccaagcctaaattaaggaccagcgagattccagcgaagaagaagaaataagaatccagaccctcccctccttgcggtgctaggtttacacgccaaaaagaaactataatgagcaaattaattttaaaatatattaaacattttgtattgtttcttatgatatatatatataattaaaattaagtacatattactcaattaatgcataagtgacaagatttgatcatttaacacacatatatatacatgtaactaattaaattagagttaacatgcataatagagataattaagaacttgatggaggtgaatagatttcagacctaagaaaaagatatataagatattttcaaatatatttgtgattgagatattacgtaggttttgcatgcacatgtttttgatgtttatttatttagtggtcccaactataatcaagctagttgcatgcaaacaatagtaatgatataattatattccttttatgggtttgggtaatttgttcaaaatttaaaatttaagtggtgtaggtttgaggtaataaaataaaatagattggaaaaaaaaataatttttatttaatttttttatttggttatattttaaagtgttggaatatgtcaatattccaatagaatgcaagaagaaaaaaatttaataattttttttaattatcaattttttatgtattttatttttgattgtcctattcctattttcattatctttactatgtttttattcattcaaactaaacaccaccttagatatataatttaaaatttaaaattaggatgtttcacaaaaaaaaaaaaaaaaacaaaacaattaggagtattacactttcaaaatttatatataaaatttccagtagaataaaaaaattaaattttgtaattttctcttaatttttcttccttttacaccctttttcattcatttcaaaaattatttttattcttatttttatctttactctaattaaatttcacatgggggaaaacaagacatttttatatgatttagtggtacttgtggtttgtgcaaaaattacttttagatgtagacatcaattaaatttatttttaaaacgtgtatatatatatattcataatatttttttattaatttttcttctccttcaattcaatatttattgatcaattcccataatatttttcataatttattttaaaataatgtatattgatttttatttggactcaaaatacattatatatatttttattttaatttataattttgtcatagtataaaaataaattttattttaaaaatatctatatacatgcatatataagttaaaatataataagacaaaaaaagtgactctaaattaaaaatatataatattttataggtaaaataagtgcatctatttttttaaaaaaaaacaaaaaaaaaaaaaaaactctcctaaaattaaaagtgcaacaggccagcatgaatatcttaaataatttgaatatttttgaaaagtaaaaaaaaaaaaaaaaacattaaaattatccaaattaaatagaaattagagtacacatgacatactcaatctctataaatagttatgtcatttgccaacatttttctcatc

SEQ ID NO: 15958 - DNA, 3331 bp, Cannabis sativa
  modified_base (98)..(100): a, c, t, g, unknown or other
tatatatagaaaaaaattatatataacaatgtaatatacattttatctattaagttttaaaatataattatactatatgtattagatttttaaattannnttttctttacattaaaatattattggtatttataatttttttttataaatatgtgtggattggattggatcaattatttttacatgtcaattaacattcactttgcagattgaattgaatcgtgctgattgaattagatgattgaattagatcgactattttatgatcatccctacggatctgtatctaacttttatgtttattaccttcaaaattgtttaattaattgagtcgtttggaaaatgaatagaggttggattggaagcactaagaaacaatatttttgtagcctcatcaagaggttaaaacgacatacctaactttgttacaattacatgaattatagcaaattacatcatgagagtatcatttccatatcaactactacacaactagacaccatcttaatacagaagccattaattcagggatataacacagagaaccaaatagtttttcaaataagaaaagaaaaaatgactgatctaaaatcatcaacttgaaagaaaaaaaaaatcaaattaaatcaaattcttagtcatccttggtggagtttttctcatctttagaagaggttctcttggactttccatgtctctcttttaatttctcaactttcccaagcccctgattttgattactaacagaaccctcttgagcactacacatctgagactttaatttgaacccaaatttcttagatacatttccccatgcgctagaggaagaagtaccctttacacgccccaacttctcgatctcttgcctcatgtttgagcattccttctcgagctcattcacccgcattcgcatgttatccataccgaccttcaaaacctgattctccctcactgctgtggcccaaccacctccctcgttggatccagcaaacccgcttcttaattgtctcgatccatcaagattgtctgagacaagaaaacagccggcaatggaagtcctcagctgaagctgctcaaagaagagaacttggactactatcctaaggggtaacctctcgttctgggcagcgtgggtgcatgcttctacagagagcttctgacaatccatcaacctgcaaatttgttccctgtccgactctgccaaccaagggtgtgactggaagaaaaggaaaaacaatgagatttaagataattgaacccaaaatgaaccgtgctttgaagagcacaagagaaaaggcactaggaggaaatgcagactagtaaccaggttgcaaccgattacgtttttcagatatccaaactcaaaacaacccttagtaccctgtgtttcatactaattggcttaaattgtcatgattacaaaggagaagcaagcttccatgcaatgttataaaatgttaatttactgataattgtaacattgttagaacatttacactgatagaaaggaaaattctaacaagaaagcatgagaagaaaacggatttgcattttgtttcaaagacaatgaaatcgattttaccttaagatagatatcaatagcacgatagagaccatcatccaaaggtctagcatactcgggaacagcagcagccagctcttggaatttgttgggttttacattaacatcaggggcaacctctgcaaggtacccatcaatgagcttggcaaccattgtaattggtgtcattgaaggtgatcccatcaattggccatcatcaattgaacatggagacgccccaccggttatctggtccatggcaagaaaatgccccaaaatccgttgcacgcaatctacattgtaaagtgtttccatggtattggagaaattgggcattaatagatcttctaaagtggcttgatcaagctgcatgccaatccttttctccaaatttgatatgcaagtaggatttgaacggagaatcattgcagttcgaagtagaccaaacagaaatttagttgcaactagacccttctgcaaaggaagtaatctatctaactcttcaattaaaagcttttgatcttcttctgatggtggtgtccccatagacacaggtccaagacgactactagactcactggttccctggcgtcgattcaacccaggaaggtacttctttgcatagaaagtgatggatcctgcaataatttcctgtttgatcccacgagtttccatggcagaaatcaatctcttatacaaagacaagcttaatgtcgatgcatcctcgtaccaccaatctaagctagaatttttaggtctagccccagtacttataccattccacaatagactcccaccagggctctgcataggccccccatgctccctcatcggccacccaaatagattaggatcagttgatgctttagcggctagtgactcaatgcaccttttcgtgatattgagttcttcagcatgagagagaatgtcatcacaggtttggagcgcctttaaggcgtctttccaactacgaaggactacttggctgataaaaagttcagtctgtgtacttaaattgtcctctccatactcctcagtcatttcaaggcactttgcagcacatcgaagatacacaacattcgatgcggtaagttcaagtttcacaccataacagaacttagctaccaattcaaaagttttggccccaccaggaatctctggaagctttacaacacatccttcatctccttcttcagatgcttctgcaatcaatttttctaacaccccactcctcgagagcaaagggaactgtatcaaacggcaaaaaaaaagttgtgagcaactataaccactttatataagcacaactcaatatagtgggaacatgtaagtactaattagctaataaaaggggaaaataaatatatcagatattatgcctcataatatcagcaaaaaacaaagatgaataattaaaaagaaaagtggagaaagagaaattttcttcttcaaagcagagatgatttactccatatgacacactgagatatccaacaacaaactccaattgggtaatgaagttgcagcaaatgacacagtgagaatttttttagatattttacacaatgacatctgaagttgcagcaattaaaaaaaaaattcctaattcaaatacagtattccaaaattcgaaattctcaacaatttatataaagatgttcacagaaaaatccaaccgaaattcgggcaagttagttatgcataaatccacaattgtcatgaaacattgttttcctagggtatttaacatgaatacaccaaccaaggcaa

SEQ ID NO: 15959 - DNA, 9571 bp, Cannabis sativa
  modified_base (9145)..(9146): a, c, t, g, unknown or other
tttatttgatttgtaaatactctatataagatgagctctaggttgtacaaataacacagaaaagaaatataataaaaatattatttctcttcattctttatcaactcttattttgcatgtaatttactccattagtgggctttgagcagaaatcctaagcaggtcatgggcatgtccatacctgcccttagcctatacccttatgtttccatacgaaggggagggatcacaacctaaataggcgaatttctgccaatattactcttagtattcttcttttttaagagaatctaagagtatagagttaggattttctgtaaaatattataaacacatcaaatacgtcattagaggctaatagactgactcgtggattaaggttaattaacacttgaaccacgtaaaaatctccatctctttactttttacactttattatttctttagttctcaaatatttatttaatgaaaatctcgacagtgtcataccatagccgctttcttggaatattattgtctagtgacatgcagcatcatctgatagaatttaatttttagactacactcactataattgtcaaataatgacgttgggccgtggttatctggtttctttttttttttttgttagtaaaagtgtatactgaaatttgtaaattagtttgtacaagtctgtggtataagtcgtatagagggatcactaatataatatactagtaaggatggtaaattatttttccacttcgaagataaatgtatattacattttatttttcatgtatactaggaaattatgacattaatatgtggcatgcaggacgctctgaagcaactatggagattggcatatcctactaaagagcttccacctcttaagtcagaactttggaagcagatgggatggcaaggagtagacccctcaacagattttaggtttgtagattattaacatcttataatataatttcagcgaaatatttgcttctcctatctctattgcatacttgctcagatttctgttatgatttttcctttggacatatgcggtaatatgactatcttttaactttttgcaggggtggtggattcatttcattggaaaacctgatctttttcgctcaaaagtatcctgtatgttattaaattactctgttttagttatttatcatgagcaattgacagattccttatattagtttttcatttgacatacataagtatgggatatttttctgtttcaatttgaggttatctgccagaatctcatgctgaagtttaccatgcagtacccctaattctttgtgacgtaaacatatagagatttcacattctattgttttttaatgaaagaaatgagagtatagaatatgttggcacataattgaatgtgtaaattaaatgttacattgtttggaagttgtaaaatttgataacttattggatgagctgggaatgctggtcaggatttttccagaagttgtgaaaattggtttgattgcataatttattgttgaactgccttaattaagatcgaaaagtaccaacaaaatcattcatgaagctctagttagggttctaggggtaaatgttcactttattatcactgataaaaaatatcatttggaagatttacatgataagttagtttttaaataactcttgtggagcagtgtttctttatatgattatgatagatctcctatgaagtacacttatatgagaagagggataaacaaactaaacaaagttgttttacttattttagttgttttagtggttttgtggttaatagttgttggttaagttctgttaggagttttattagtagtgtagaaaatggtgaatcaattgtattttattcaatagaataacaagtatttatatataaaactagggagactaaataggaaacttataggaaattcctatcattacagaagcaaaatagaggaagaaagagcttaagatgaacaacaatggaaaatagctagtctattaatatgagtgataaaagagaacaagttggtgggtattcgagagacctagctctctcccaagagctaaagctcactaaaatcattcacacctttttccttcattattgagtcctatgtataataacaatacccttattacaattacacttatgacctttttatttaatatcccaatgcctgtcaataccggccgcctgaaaatcaccttgttctcaaggtgatggagatcaacttgtaacagcagtaggtgcaacccgtgctcatcccttgtcaaagaaccaagccaacaaatgcaaggtgttcgagtcatgagaaagacgccactgctcacgagtctacctcgatcaaaaaaccagctgagcaaattgatatttgctcttttggtgtacataagaagttgaaagagagccactgattttttcccgaaatgccttgtcttgcccctatcgaacacccagaaacaacccactccagtggataaatgagaaaaacaagagatacacccctaaaatccatatatgtttttcagaagggtcactccaatatctatttctttttgttggtgctcttgccccaaaccagtagaaaagaattagggataagaaaataaatttccaagaatcacaagttggctagttgagtaccaattctaggttgacacatccatgttgcttctctttcctatatcaaaactccggtagataatgcccacatagttttatttttgctacccatttcaagtagtttctcttgtcggcgaatccttatgtcaacagatacatttcttttatgaacaaagaaattcctatggggtgtattaatgaatttgtttccagcaatattaatgcagacacttatatcccatgtcaaacttactcttgcaatttctacttgagatgacaaactcacaaaaaaatatttcagattagatttcaaaaccttgagtgaacatggtacaactttgtttgcaccatcaactagcagcttttcctcaagaagagagatgttgttggatgagatacacttcctgaaggtggttcttctctctgctaaagatccaactagtggtgggtgaagttacatcctcgccatacccgagaactgaacccttgacctccgtccacccttacggtgcccactacccattgctctatcgttggtggttcagagttgcagtcggccaatctcagccctaaaggaagctttgtgcgattagaagaagggaacatagaaaccttacctggatcccacgcgacccatgtgttacctaaaataaacattgggcttttccctttgcttaatgggccattaagggttaggtcatttggcccatgtgtgaagaataaaataatccaagattctctctcctctttctaagaagtgtgcccatgcatacgtggggtttccatggtccttatggccatggaaggcattgaaatcccactggtttcgggaagaaaaaaggtcactaccccactggtaatgactggaaaaatatttctaattcatttcgtgtccaaaaactccgaaagtattagagcttccacaccaaacacaaggcgttcatggttactttgacttatgatagtggttctgttcgtatttgtgaaagaactagacactttgggtatgaaattgttattactattgatgctatggattggatcatcgagactatgaaggaagtacatcagaaggaaggaaggcaaagagacagcttcaaaagaacttttcgaaatagctctagcagttgttttttggaatatttctaaaatacaaaaggagaaactttctatattgaggaacaacaagatgaaaatgtttattattccagaagaagaaaaggcgaaggggtggtttgaatttttacgatgtctcaacaacactattaaaagagagcaagtaactgtcaaaaagaacactattcagcagaaagtagagatgaagagtgggggaaccttgaacctgcaatcgtgggctaacatagttaaggaactgaggaaaccattggccacacaacctcatcagctgcagaatgctttgtaaaggctccttgccggagaaaatgagatgttgagtggaaggacctatatctagccataaacaccagttttaaaccaaaaaatcatccagagaagagatttcatcagccaatgtattatgaatatatgagatcgagagcgcaaaccaggaattggaagttggccattattcttacccgagataatagtcatgcctcttggagtgtcattttctataatatctctagggagctagggaggaaattggtggtcagtcaattgtttgatgacaggtgtattgtttggtgcaaagatgagagggaaagagttgagtttaacaaaattcaaaaaatgagtgttctaggggcacacactgtttttcattctctcaatggagttgggagttgcaaaagaaaaacattaaagttgaatgtagagattcatggattggagtacaagaactgcctctgaatctttgacgtatgaatattttcaggaaaataggtgactgttgtggcggactcttggacgtggataaggagacagctgaagctagcatgctttcgcacttaagacttcaactgatgggcgacgagtacagttttgtatcggaatcattggtcttagaaaacgaaggtggtaggtttgatttgaagcttttcaagcttaatgatttaagctatagatttcacgggtattttggttattgttggtaccaagattttgaccataacaagatgcttggggatggaaaaaactctgtgatagaagagaaagaaagtatagaaggagatgtgacagtagaagtagtcggaggcggtagagacaaaggagaagagatctttgaggcagtcagaggtggcagtgaggatggaataaacaacttcgtacgaccaatgattgaaagccgattcagtaaagaaagtaggaagaacagagaagctgaaacaattctccacaatcaagtaacggaaacggtgtcagagcttgcagagtcgctggtggatacggtggtgaccgttgatcgtccagggaagcatttaattagcatcgacaagagtgcggtactcgagactgatcgtcatgcaaggagtaatgttgtggcggcgattacgagttttaatagaaagatacgagaaactagggggtcagttacacttcaacatatcttcaatcaattgtggagagatttggaggggtcacatgtgggatcaactttaatacccaataattttattaatttagaatacttggggcagatatatgaaaaaggtttattaattaaagtgggccagaataaattgggtaaaagagcaaatggtccattaatagttgttgactctattctggtggtggtagatcgcttgaccaagtatgggcattttattcctcttcgccatccttacacagcgatgacggtggttgaagtttttgtgagggacgtggtaaaattacatggcttcccacgctccatagtctccgatcgagacaagattttccttagtctattttggaaagaattgtttggcttgaatggcaccatcttgaagcgtagtactgcataccatccgacatcggatggccaaatcgaggtggttaatagatgcttggaaacttacttatgctgttttgtaggtgagaagcccaccaaatgggtgaagtggctggcatgggcagagtattggtacaacacctcgtaccatatctcggctggaatgactctttccgtgctctttataaccgagacccccctcccctgctctgttttgaaccagtcagtacaaaaagatttagaggttaagcatcagttgcacgatcgtgatgctaccctggtgcctctcaaagcaaatgtgcatcatgttcagcaaaaaatgaagtgacaagcggataagaagcgaagggaggtacactttgatgttggtgacatggtttatgtcaaacttcgaccatattgacagcgcacggtagctaagcgcgtcaatgagaaacttgtaccacgtttctttggtcagtttcccgtgttggctcgggttggacaggcggcctatcgcttgcagctgcctccggatgccaccatccacccagtgttccatgtatccctgttacgcgttgcactcggactgcaccaacatcccactccgctccctcccagccttacaacagatcttgaatggttgctcgagcttgaagcagtgttggccattgtcccggtactcagaaagtccagccttaagcactcatcaagtggaagcaccttcctccttttgaagccacctgggaagacgtcgatgtcattcgaaaccaatccccaactttcaccttgaggacaaggtgagactcataggggggtattaatagaccatgacttttgtctacagccgaaggagtagcggaagagttgtagataatcccacaggtaattaattgttgagttggcaagttggttaggagagttgtaattgtgtgtgggtctttgtgggtacactcggtttaattgaataaaaggtgtgtgggtttgattttgtgggtgtgaagagtttagagtgaattacaattgtattgggagggaaccaggctctcaaattcttgggtatcaatagaaggcagatctgccatttttcctcaactcttctctgctcttcttcatttcatgttttggactaattttgacaggaaattcttatcagataggtacatttgcgtttacctttacgtagtgcaatgagaagatcatcgttgagtttcagatttgatgacgaaaatgcatatgtaggacgtgaaacaggaggtggaggaggtggacgcctagagtacactatgataggaggtggtggaggtgtaggcattgctagagctatgactgagtcaggtgaagaggaacaagaaactcgtcagagcatgtatcagacgcagaggatgtgacagaatataacaacaaatcgtcatcctcccttggcgagtaggagtaggtgaagatgaaaaataaggtgtattttccctaaaagtaacattaatagaaacaatatatttgttgagatcaggataataacacctattctctttttgaagacaattttactaagaaatacacactttaaacagttatgatttaatttggtaacatgtggacaaacatctcgagcaaaacaaacactgccaaatacttgagacgcaactggaaacaatgacttaccctgagaatttcaaatgggatctcaccattaagtattgaggatggcatgcgattgataaataagaaagcatgctatggatggaaactgcattggcccaaaaaggtttaggaacttgtatttgaaacaacaaggcacatgcagtttcaagaaagtgtctgttttcgcattctgctacaccattttggggagtagtatcaacgcaagaagtttaatgaagcatgctattagagatcatatcagattgaaattgaacagatgtgtattccttgacattatcacttcgcaaagtacgaacagacacattaaattgattttgaattttagcacaaaaagcacaaagtataaaaaacaactcagattgatttttcattaaatataacctagttacacgagaatactcatctacaaaagtaacaaatacccgagtctaggttttgacaaaataggagaaggaccccaaacatcaaaatgaactaactcataaggaacactagcacgtttattgactcgagaactcaaactaacacgatgtttggcaaattgacacgactcacaatcgaatgcaggcaccttactatattggggacaaaacttcttaagcaaaggaagggatggatgacccaaacgacaatatgccttaaaagcggaggcgacattcggacaaacaataggggttgaggatagtggatcaagaacatacatgccgccgaattcatgccctttaccaataatcttcttcgtcataagatcttgaaatatataatgatctggaagaaagagatgcaacaattcaaattatgggtgagttgactaacagaaagcaaatttaaggatagactagctaaatttaagactgatgacaaaataagcaaatgtgtaggagtaacagtgccagatccaagaatagaagatggtgatcaattagttaagataacagaagaagtgtgactataagactgaagagtggaaaaaagactggaattacttacttgtcatgtatgtgatctgtggcactaaaatcaatgactcatttcaaggatgtcaaaagaaggcatgcatttgatttatttgaatcagcaattgcagtgatagaatgagatgaaaacttgagtgattcctggtactttcagaacttgacaaattcatccgtagaaataatgaccgatttgttagatgcatcactagtgcttgcaacattagccatagtgtttttgctgatttttaaatagtagcttcttacacttgaacttggtatggtctagtttcttacaagagttgcacataatgcttttggattcccatgttgattgtcaggctcttgtgaattgcctattttggaaccacttggagttttttcacggtgcatgattattatgaccaaccaaagcactattaagagaagcatatggagtagtttctgtacgaagaatacagttaaagacatcttggaaggaggagacatcagacgtacaaagaatctgtgactttgcagagtcaaatttagatgagagtcctgctagaaagctcatgacagccatctgctctcgctgccgctgttgaaccttcacaccaggattaaatggcaacaacacattaagctctttgtatgtcctcttaaatgtcgaaaagtagttcataagagactgatcttgttactccgcatgataaaaggctttgcaaacatcatacatacgagataggttgtcttttacagaatacaaaaactccaagtaatccattagttctttaaccaattcaaaatgattaatcaaactaattgtctcattatctatagaatttcaaatttgaataaacaagcgagtatcatcacaatagccatatttttcttgaagtgtctttttctttgggaggatcatcagttaagtgatcatctttttcaatactccttagataaagtcgaatcgtcttactnnattccaaataattcgaaccaatcaatttatggtacgtgattttagacatcacgggaaccacatcagaaacaaccactatttttggtttgattttgactctaccataatcttgaaagcaaaaacaattgaaaaagaaaaagaaaaaagtgaacaacaaaggaagaacactcaaatacgaagaagtcaaaagtatcaaaccacaaaatgagaagaaccaccggagatagatttaaggaggacagagatgggctgaataaggaatagaagtgaatcagagccgaattcatggtcccacgcgcccccactcgtggacgcgtggggaagatctccgcgggtagtggcggcgcgtgagcctcacacgtggcttttctggtggttggattttggggttttgtcgactggcggctaggcagtcctcttgtgtg

SEQ ID NO: 15960 - DNA, 7352 bp, Cannabis sativa
attactcataaaatcattaattataccttatctctgcttcttccactgattattgcagtcggaaaatattttgcaacttctcgtacagccgtacgcatctaagaattaataattattaataattgtcaattaaaaacaaataaaattaataataaaaagggtcaatgcttaaactaatcttaaacaaatacaaaacaaacacatattcctagaccaaaaatttagtatcgtgtgagataacacataacaataatatacataaaatattatatagtcaatataatactttaaaaattataaccaataaaatgatatgaatggcaaaaaaattgtgacagtgacacaaggaataatcaaattaaattaatgtatatttatatgtatatatatatatatatatatatatatacctcatcagacataaaagcacgatctggatcgtctacaatgggagagagggttccatcgtagtccaaaaacaccacaattctttttcccttagccaatttcatcattcgatcaaatgatcccagtgcagatgggtgttccaactattaaattaaaaaaaaaaaattaaaaaaaattctgattgaaaaagtctaaatcatgattggaattctgtactgttgtgtaacacattagccaataatcagaaaaaagataataaagatttaatattcataacaattaacacaataaaaagaaaagtctatagatctaagcaaagaaaaaacattattaaataaatgtcacgtatttatgttacatatttttattatgtcgttttcacgtaatataaatatatttatatagatgagtatatagtagtggtgttataccagccatgaattataggtcaatgaatcagttgatgaaattggattgatcataattgatgatggaggtgtgatattgagatttgaagcaacgaagcaatcgacactaccatcgttctcatcgttcttattagggtttgtgattggttgagttttttgtttattcgaaggtggtggtttctgtagacccatttcctgcttcactgtttcaaagttttccattagtcaaaaccttaaaatatattccttacaaaaaaacaaaacagaatcgacactacaatctatatatctctctagctacccacgttacgaggatttgaccacaaatgatacgtatttatactcaggtgaaaccaaacaaaacttaaccctaatcctattacctaggattcgttgttgggcccttgggcccaatcaggttgggcttaactacaatccaataaagatcataataaagagagataagagtagtagtagtacctgaatttttcttaatttttgagattttataagctaattagtggagttacctgcaaaagaaaaaggaaataaagattttcaaaagttgataaaaatcaaaagaagatttttataaatatttctcttgttgatttggaacccataaaaattgtatgatatgatgattaatatatgtaaataaatataaatatataggactcccaaacagtatacgtgaatattttgtaatttgttaaggaacaaagtgaaagcgtgcacgaattaccattatttggttgttgttgtactatagggattaaattactcttatagtcaacttgaaaattttgagaatatttccattggtcataaggaggttttcactacgcaacgaaatctatctaattatctaataattaatgaattcttttttgttaaattttatcatatttttaaaatatctaaaattttaatttaaatttatacaaaaaaaaaaaaattatctacctaattatattaacatttttaataaataataaagacgtatgaaatagtgaaggtacccctttgtttaattaataatccctttgttttttcttaattatataaataaaaatgattatggtgattcgtacatgatctaaaaggattttgtcaatgaatgtattaatgggtatgtcggcgaagagatataagtacacttgtagttataagaaacaatataaaaaagaagaaataatcaatgtcaagtacaaattttaataagagaatttgaggaactcatagtgagaggtctatatcagctttagttagatgtgtaattatcaatctatatttaatttaataactttctttataacataaattattatcattattattaccctattcaaccatgatcggacaagtgtttaaaactaattttagttggttccctagctagtccctcaatatcacatatttaattaggaaatatataattaagtcactttctgaaggttattaaacacagttatagtagagaagtagtatatatataaatatagaaacaagaagaaaaaccatgggtgggaatatatttagtgaataatctagatttagtgagtcaaaattacatggccgattatgaaagggttttttgtcttgttattagggtctcaatcgggctgactcagaggacactataataaaattagctttcttatttaaattataaatatatgcataaatatatacacaacattatatatggttaattagttagtatataagggctccactccaccaccttaaataattccctcaaattccaactgaaattcgattataaatatcacgctggtattaattaattaaatacgctagctgctataaatatatgtttataattacacggaatccaattctaaattattgctattattactattaatttcacatgtaaatttatcaatatatatcttgggattcaataaaaatatgaaagtaggtatataactaagaataattaattaagtattgttattgagtattaatggtgcttaacatattttattaatgatattctaagatacgaggaaaattattttttgtagcaaactaatgacaaggttaaaagttgtgcatggaatataaggttcatataaataagtgggttttaaatgtatctaagcaatttaatcaaactaaaagttttttttaacataaaagtagacgtaagttttagaccaaacaaatttgaaaacatgtcaaaagttaaaactaataaaggcaaactaactatagtgtagtctataatatataggtaggaaaaggaatattatatatatgattgtgactttcaccatcactacttcctcataatttcacaacacaaaactacaaaaagtgtttcacaatgaaaataaataaataaataaataaaaagcccccataaaacacgtgtcatgaaactataggaacagaaacaaagtaattataaaagtgattgatgaaaaagtgaaaacacataactaacatttcacagttccccaactttcgttttcctttgactatacaaaatatggaaacaaatgactccaaacaaaaccatatacaaattactattgtttatttttgtaaacagaccaaccaaaatagaagctttaataatatttcaaggaaaagaaagtattaacttctcatataacaggtaaacacgtgtgcccgaccaattaattgacctattgtattctactgtattgattttattattttttattaaaaaataaaaataaaaggagaatgacttttttaaccgaaagtgtgaacagaggaaaaggggagtttgataattttaataaatcaaataattttttggtacaagaaaatgaaaatgacagatatcacgtgtcaagggataaggtggttgatcttagaagcttttaatttgggtacttggattttgtaaagatgacagtagcagaagaaatagctgtgagaaaaaaatgccccaaaacaaagattacatatatatatataatatatttaatatatatgtatacaactaagtgactaactcctatgaaactaccttgagttgaagtaataaattaattaatcataaataaaattacagattatattaataatgatgagttctgaggtggccaatgactttagaatgaaaatgtttaaccgagatataacatatatacaatataataattaatctaatgtatatggcaatacataattaattgtcaaagcatgaaacagtaaatgtagatggaagaaagtgaaggcttataattaataatataaagggttgaaaatgaattaatcaatgttatacatgtttcaacctttgtgatcatttgtcaaatgtctcaaacattatttaaaaggaacaaataaaattaagaggtagtacaattaacctattttttttacatataattatgtaagttgttaaaaaaataaaatagttcataagagtattgctattagtcacttaacacacaatgtacacatttttttgagaagttagcaatcttttattatttaatttattaaattaaaatatataaaatctaatatttatatgtgattagtaattttttgagtagtatgttacattttatggcgcttaatgctttaaatacaccttatcattattcaatttaaaatgcttaaaataaagtaaaaactggccacacatctaaaattctcatggataccaaaataaataagacaacctttttagaagatataccatataattacccaaaaattaatataaaaattaaaaaaattggttataattaggatccttcactaaagaattgtttatgtagaattcttattatattagatgtattatttgtgtttattaactagagaaagaggatggaataaagtaatggaacatccattaatttgggttgaagctatataaaatataaatattttttttttcaaaaaagtagaagaatataataacgatgaatagcatttaatagtgaaaagaagttataaaaagtaggtagagtgcatgcatacaataataggatacaataatagggagaatggagttgttaccaaaactagatgcaaccgtttttttattaaaaatatatatttttatttgtttttcttaaaatataagaaaaaaaatagcctcattcatcaacttcttcccaatcactcactaccaatcaaatctccaccttacacgtggcatttccaccgacttatcttggtgtgtcagttgttagaggatccgattttattaacaacatagttgaacacctcttttgtaaataaaaataaaaagtagtactacttaaatattcctagaacaaatactatgtagctatacacatcaacatcatcataacttgtggaaattaccttatgttttacattaattataatataatctatcagagtgtgtgtgcacgtacgtgtaagtaatttaagtaggtatgtattatttttaagaaattattttatatattatgtttttttatactactatttaagatttaagttgttctagtaattgttacttgttgttccttgagttgttatgtgaatttatgtaaattcacttttaaatgtaaaaagaaaaaaactctattgtttttaggctaattaagatttttgttccttgtaccaaatcatgttgaactttgaagacaactaaaaattctcttttaggagcacgattttatacatgttaaagtttgaggagcatgatttagtaggtatcaaagttcggagagcataatttagtacatggacaatgaccgaattaataaaattgaatgaaattagacaactgcctttcaatcttaaagaaatttttttatctatagtacatgtgagtacaggataaaaatcttaattagcttgtttttttatataattttataaatcctttaatttacaaatttttcttgctaatagacataggaatttattttgaaacaaaaacaaattaagagagctgagaacaattttccaaaaataaataaataaataaaaatgttaaaaaccaaaataataattttaacaaaaatatattgtggagctagattttaacacttttatgtatggtcaagtgggacctggcccagtcaaaccgtggagcccaccgattctaaggaaaagaaaaatcaaaatacacgtgtacggtcaaaacaaaagatcctatataaaagcgggaacaagactaagaccaagagtaaccagaaatggcgcgtgaaagtaacgcgcaccgtatagtctcctagaaaagactaaagcgggggaagaaaatagtcacgcgcgcccttgaaaaatggtgattggaaaagctctaaaccttatattttttctagctcgaaacaatcttaaccgctttttctagttagaaattagcatatatttctgctaatatgtcgaactgatagttttgaataaatcaaaccaaattaaaaaaataaataaataaacagaaattcaaaccaaaaattagaatgaaaatgaataattaagctaatgaataaacaaaattgaacaaatttgaatagaaatgattgacatgcaaagtgatcaagatagttaaaaaatcatgataatggaatagaaaaattaattaagaagctctaaccttggaatgaagggcttgcttggaaatcgagaaaatgaggtagaaaatggcagaagaagaaagggaaaataatattgtgagaaaaagagagaaaagggagagggaaaaattagaagggtgagtgggatttatttatagggaaaagttggggggttttgggaagttggagaggttgtacagatgccaaacatccaagtccatcacattataacttcctccaaaatttgcctcactttagagttaacgactaaatatatgggaccccatcttagatagggacaactctgtctttttattagaataaatatataataatatatttaatttttctaaattgcactttcactcctcatacttcttttcattttgcatatgtggtcccccgaatcttgtataatttcatttgtctaccctcaccgcccttgaagaagtgaaagggaataataataataaatataaaattgatagatggataggtagattgatggtatacaaaatctcatgtattcacatggttttctttttattcgtataagtaataaaaatcttaaaaagatgctaattaggttagaatattcgttgtttgacatagggaacatcattacattatagttaaacaccatgtccccctatattaagaatagaatcctataggatgctatgtaagaaattacccaatatttcacaccaaaaaagggcaaagttatagcattattattgacttgttggatttttttgtccacaacagaaaccacttcaagtacggccccggccccaaaaaaaaaaatacaatcaacatagcgctctgaagctcgaactaacaagtgagcaacataattttcatttaagatattaaatcttgaacaaataatagactctcctgaattatgattactattatattatttgatataatataatat

SEQ ID NO: 15961 - DNA, 3910 bp, Cannabis sativa
aattctagattatgtgttgatttctctgttcacaattgggggaaaggtttgaagagaaaaaaacaaacaggggtacgtaacatattggtgtcaacttgataagtcttaaaatagagtgaaatcttacaatatactattggtgaagatagtagttacacgttcaagttaaatacagtttttaagtaccaaaagtagtagtgcttccaattgcatgaaaagttgttagctttgttaacaaataaaataaataataaaaaaagagacaagacctactttctctgaaaagatttaatagcttgcagctctgtttagtgatggtgatctttttctctctttatccgaagcagcctttgcagaaggctttctaatcctgttcttgggcaccccaactctatcattttcactccttttcttgaattgtctcattttcagtgaagggagaagaacaaggctttattattattattttattttactattgccatttccaccatcatagtttgttttaattgctctctctttagtctttacagcattttcttggcgaggtggagagtaatgtctagtgaaaacaccttcctattcgtcaagataagttctttttccaagtttcgtagtataaatcaaatgctagttatatatgaggaaatggattagttgtaaccaaacaaataaaaaaaagtttaaataggaaaactaacttgaaaattaacttctgcctaatctactttatgtagcaagagcaggttgattattatatattaaaccctgttttaagatttaaaacaacatgattttaagaccaacttttttgtgattacttctaacttccctttctcatatttgagtgtattttaggcaaaagttatactgccttgtctagccaccaaaccatatatactcatgtcactctattggcctaacattattattattcaagagaaactcctttgtagaagattcttatttgcccatcatagcttgtcatgaaaaaatatgtaataaaaaagaaaaagaagaaaatgcagagaccaatcgccaaatactctcttgaagagaccaaagcaaatgatatcaaaagtcaaaagaggcaatgaaccatacatacagagaacaacatccttccttatgggggttagttttttttaataaattactctttttgggcttgaaataagcattataaacataacaacagtagttaattactagcccacaagatagaattggaagtggagtatactattcagtattgaagacaaaaacctatttgttcaattacatatatcattacatgatatagtttattcttttttcctttgaaaacaaagaacaaacaaacaacattgtgagactttacactaatacaagaaagatacgatcttattactcaatcctatactcttaatgaatttgactagtctattgaataaatctaatacatcgatcaaagttttatttgaaaaagaaaagtatggacatatgtaccaaatttatcaccaaccatagatgaaaaagaaaaagaaagattggttacttatgatataaacttgaaatgtaaaacgaagaaatgtggaaaatgataggcttggagagaatatttccataagacgcatttggatgatttgaagtatgaagaaatccctaaatggaccatgtaatctaaaatggggcaagccctataaactgccccatgtggtaggaataagacattgacagtggggctcccacacccacttataatctgactgcccaaacttagaagacccctcagtgttaggaattttatattttttccccagtaggcccattgggatggagtggagattgactatgcccattttggtcctagcctatctcttttgcatataagtagctgcccctttaatttatactatagcctactacactcatctactaatattgcactaaaatttgtacatataaatctagggagtttttgtgtggtgtacaactacttccattcgtttggtcctaaaatttgagatattgttatttcttgtaggtcaaaaatatatcaacttccatgaaatacacgtaggaaatgtcactatatatttggttcatgtccttctcacatgattgtcacgtatagttttttgtttagtgtgatctttactccataccacacaaaatttaatcgaaattgctcaatcaaagaatgataaatcttgttcttgctcttattattgtgtggttaattaaagtttttgtatttttgagtctttgaccaagatctatatattatataaaaacctgatgatttataaagctaataattatagaaatgcataataatggtgagagaaagaactagtactactagagagaagtttcttttataagctttgaccataaagtggaagaaggattcacggctatagatatatagtgttgtttaataatgtgatttattaatgcataactaaaacctaaacctaaacctaaacctaacctaggctagggtgtgcatataatatatcaataatattcttttaataaatgtaagttaattacttggtagtaataacaattaataaggaaggcaaggcaaggatatatatgttggccccgccggctatgagaaaaagtaggttttgaggacaactttagtctttataccacgaaaggcacgtccgacccaaataaacaaatatatatgaatttacaactgtaatgagttttgactcaattgattactaaaaagttgtagtcatactacattgatggctttagggcctacggattatttaggagaccaaacaaagccatattactcaagtaacactccatttctggtattgcgttattagtataagttttctttacatatatgtaaaatagttaaaaaaaataggaagagaaagaaaaactagactatataaatggaattcatattatacatgtagttacatacatacataggcatatactttcgtttcttatataaaaaggtcggtagtagtagggtttataattttttttttctttcataaaaagcaagaaaaatctgagtaagaaatcttgaaaaagttgatttaaaatgataactggggtgatgatgatgatgattatcatgccaccatgatgaacattctcatgatgaccagcatcacggccttgtcataatataattggtttatgcggcaattaaactttaagctgttttttttttcttgtttaattaaaattacataatatatcaatcaaattcattttattatctccactaattaaaaaaagaatagtaataaagcaacagttggcacatcccattcaaacggaagagattaatgaagagataggtgggccccacacacaccccttcaaattacattgtgaaaataaagtagggctctcaacattaattaaatatatacgtaagaattaattgagatttagatttatatttaggggaataatttgtgtccaaactttgaaaatatattagataacataaggaagaattgatggaatggaaagtgtgaatagatagatgtatatgtgtgcgttgtagtaaaggtgaaaggagttggaatgcacacgaacacaaaaggaaggaatggggaatctgaattcacacgcgtgtggggcgtaagagctatatatataaattgttattagtatattcaatattatatttagtcatctttatattatattatttattaaattaaaatatttaagaataaaaatctgaatagtatttaataatttaaagtatctcaaatattaaattgcatcaataataatattcgacaatttaaggtacctcaacaagatttgtgagaagtaatttgtttgagagtggtgagggaatacattgtctttggttggcctccgaaacaaccaacaatggcaagggagagcaatcccatcaggggtttgg

SEQ ID NO: 15962 - DNA, 4242 bp, Cannabis sativa
gtatcagaagcttaagaattttctctcttctcatcgtctaaatttctctgttctgccattgatactcaaccatggctcgaacccgtgctactggttcaaggaattctggccacaatcctccgcctatttcctcttctacgattccagatgcaccaaacaatgaagatccgatcatacctccagctcctgtgatcactggagaacattctacaacacaaaatcgatccattcgacctcctcatgaggacagttccagtccttactatctcagttcaggggatcaccctggcctcaccttggtcactcctcctctctccgatcttaatttccaagcatatggcgacgcgatttttcgaattatatctctgttggagcaagaaacaagactgtgtttcttaaaggcactctaccccaacctcccattgaagattctctccataaccattggctccgctgtgaccaaatggtgatgtcgtggatactccattctgtcactccagaaatcaaaagagttagtatcaatgtttcttgatacttcagctgagatgtggaaagaacttcattcgcgttttgatcagggtaatggccccagaattttcgagcttcgagaaacgctcatcactcttcgacaaggtgaggattctgtcacttcttactttacgaagcttaaatgtatgtgggatgaaattcaagaattgagaccacggatcccatgttcttgtgccgcatctattgataacctagttttcttgaatcaagaacaggttttacaatttcttacaggattgaatgaatcatactttcctgtccgcgcacaaattcttctcatagatccgtttccctctttgtccaaagttttctccatggttatccatgaagaaagacaaagaaaacttaaaaatcctcatccccctttacttgcttcggttcaagatcctagccaaccccctttacttgctgcattggctcaaaatccatcagcttctgcagccaccaccaatcctcgatcaaacaaaaagatgcgtccctattgttctaactgtcacaaaccagggcatttaaaagaaaagtgttatttcttgatcggttttccccctggttatggtgacaagaggaaatctaaacagcccacagtccataatgccgcatcctctgttgatcagtacagtgttcttgccaatcttactaagcaagaagacattcaagccataatttccctcctcacacagaagctgcagcccactacaacagatgcttttgcctctaacatctctggtaacaattctaaacacttatggattgtagacagtggtgcatcacaccacatttgctgtgatttatctcttttttctactgtgcataaacatcccatagctaatactgtcacattacccaatggctccattattaaggttactacatcaggtgacatcaatttctcacccaattttcaaatatcagatgtattatatgtcccctcttttcaattcaacctctttagtgtgtccagttttctcaatcacacccctgacagtatgctatttactaaatctctttgcacattacagggcacaatgaacaagaagattgggactgctgaaaggattggcaatctctattttctgctgcaatctaactgatctcccagcaattctccttctcttcaatgtaatcaatacaatacctcttgtaatagtgtcccttcatggcactctagacttggacatccttccatgttcacaaccaagttgcttaataaacaattacattctgcacataatgatgtttccccatgctccatttgtcacctagctaaacaaaaacgattaccctttcaatctcacaataatattgctgatttttgttttgatttaattcatttagacatatggggtcctttccatgttcatagtatagaaggttataaatatttcttgacaattgtggatgaccatagcagatatacttgggtttatatgttaaaatccaaatctgatgtgcaaattctcattccccaattctataaccttgtttttactcaatttaataaaaacatcaaagcagttcgatgtgataatgctaaagaactcaatatcaattccttttatattcaaaaaggaattaaactttacaactcatgtgttgagagacctcaacaaaattctgtcgttgagagaaaacatcaacacatcttaaatgtggtccgagccttggcttttcaatcctctatagccttggtatattggcctcatcttatcaacactgctgtgtacttgatcaatcgtacacctacaccattgctaaaccgattaaccccctaccaattgatgcataacaaaccacctgcctatgaccatttaaggaactttggatgtcttgcatatgcatcatccctaccaagcactaggcacaaattttcccctcgtgctcatgcttgcatgttcattggataccccaatggtatgaaagcatatacattactagatctaagttccaacaaaatttttcattctcgggatgtggtgttttatgaacaggtttttcctcttaaaggatctctccctacacaatcattggatcaattatttcctgttcaacacacctcctctcctgatatacaatctgatttttcacctgtttctgatccttctctcccatctgctcaaactccccatccacctgcatcagatcagcatacaccagtacctactggtgttgatgcatcacaggcgcctaactcagcacctatctcacatcacaatacaccatccaaagcccctggcatttccccagctcctgatgcaacaactacccttcccccgcagcctttcatcactaaaacaggcagaaaaatttcccctcctgctcatcttaaagattatgtttgtcattcctccaccaatcatcctttggttaaatatttaaattatgacaaacttagtgttgcttttcgcaatgctatctttcatgcatatactgagttggaacctaccaccttcaaacaagcatctcaattcattcaatggttaaaagcaatggatgctgaattttttgctcttaaaaagaacaacacttggtcagttgtttcattacccctggttgtaaacccattggtaacaaatgggtttataaaattaaatacaacgaacagggtgaaatagaaagatacaaagcacgtctggttgctaaggggtattcacaacaacatggcatcgattatacagaaacctttgcccctgttgcaaaatttaataccctcaaactttttttagcattggctgccattaacaattggactctacaccaaatggacattaataatgcttttttacatggcgatcttaatgaacaagtctacatgacactccctaaaggctatgtccatgagggggagttaccaccaaacccggtttgtcttttgcataagagcctctatggtcttaagcaggcctctcggcagtggtttgcaaaattaagcaccactcttattgaacatggttttcatcaatccgcatatgaccactccctttttatcaaatcaaattcctctagcttccttgccattttaatctatgtcgatgacatagtaattgccagcactaatgacaccgaagccacaaagtttaaagcattccttaattcaaagtttcagctaaaggacctcggccacttaagattttttcttggcctcgagattgcccgatccaaggcaggtatttctgtttctcaacgcccctttactcttcaattactcaatgaaacaggtcttcttggatcaaaggttgtttcatccccaatggatgctaatatttctctttgtaaggatgtcggtccccctgtcaatgatgctacttcatatcgcagcctcattggaaaattattgttcttaacaattacaagacccgacattagctacgctgtcaatcgacttagtcagtatctcagtgctccgcgtcaaccacatcttaaagcagcatacagaattgttcagtaccttaaaggtactccaggtcagggactcatgtttcactcaagctatcagcaacaacttcctctcgatcgtttgcttcatctccaggctttctcggacgcagactggggctcgtgtcctgatacaaggcgttcaatcactggtttttgtattttccttggcccgtctctcatctcctggaagtccaagaagcagtccacggtctccaaatcatccgctgaagctgagtaccggtctcttgccaacactac

SEQ ID NO: 15963 - DNA, 12763 bp, Cannabis sativa
  modified_base (1228)..(1232): a, c, t, g, unknown or other
tagggtgttaatcaaacatacttggtagtaaatctagatactgataaaatatttccaacaattcttcataatggagccatcactggcccctttgattatcatgtaatcactgtaaacgaggcttacgttgtttgacatgtcctcttatcggcattccgagacgttttccccatgctgcattaaatgcgaagggattgttcgtgtatgtcctctcctcctcccagagatgctttatcatatgtctagctcctagagaagaagggcatgctttttgtacttctccgggggctcactacacttgttcgtctgtatatgtctcagctaattctcgggtgaggtgaccttttggtccacgtgtcatatatattcttggccacgtattttgggaaaaatccaggacaacatatgtgttatatataactatacttactttaatatttatatataattctctttactttcaaattcataaatgtacatgaatagtataattttttttattaatacttatatttttattataattaacaatcatagttatattttttttacctgtaataatagattatcaataggtaaaagttttttttttaaaaaaaataattacttataattaactattttctaaaaataattaattgaatagttgacaagatctcttttagtagttaatagttctaaataattttttttttttttttatatataaatcctattaacgtagattttcgttaagtatattaaagcctaaatcgtgatggatttgcacaaaaaataatagcagtaaagaaaaaaataagaacacaaagcttttttacgtgattttacagttaaaattttacatagtccacgagtctatcttattagatatttctgatacaattctaaagctttttctcttaaggattttccattcttttttcagtgtaacctactcctatttatagttacataggagggcagttaattacaaatcgaactaatatcttacaacaataatcccctgaaattgtgggatttgattacgtcccacataaaataaatgcagttattatttgaaaatcacatagctttgattggtcagcttttaccgggtcaatcactacaacaaaaattattattaggggcggacttaataccagcggagcagagccgcccctaataataggggttattaccagtggagtacacttttattaggttctaccatagtattaccctatatatnnnnntatatatttatttttatatatatgtaaggatctgattgatcaagtttgaacttgttgatgatacaactttggcaccaaagtgcctaaaaagtcttcgatattctttctagttttggagttaggcataccaagagacatattaatcaaacgtgtctaagcatgcatcatacttttgagatagcaataattttgatagtttgctacgtaacctggtgatcaatggcaatgcttcttctccttatatatttattgattattatattgcaagagaaaacatagtcaagaatgatgataatgattaatgagtaattagtttgttacaacgttttgtggggttaagaaaagaaatggttaatttatcaaagaaaagcaattcattcagataatcacggccattgaaaagccatgattatcgatctaattttacactttaaaaaagacattgttatgtgtagtctaatgtagtttcctcttctttttttttttctttcactaattattccaggaacgctctagctagccacaaagtaacactttttctctttttctttaccctttcttttacttaatatacaatgcatacatacatttatataaactagtgtgagcagcacatacaacttgtatgtgctgcaatttttgatttttttaattatttattatattttttttatatattaattaagaaaaaaatttaattgaaaatatattaaatattttgacaaatttctaaattataaatgatgcaacacataccagcacaaaatatgcataatacaacttaattgacccaaaaaaaaaaaaagaatatttatcttctaaatcagttaggcagcggaagagtttcgtattatctgattatcattataccatatctcaataaatctatcagggtatcctcaaaatttcttgtatgttgtatcccttaatccaaatgataacaaaaatataattagactcacactagtttcttccaaattgatccaccacacacgacacaaggaatagtgtagggtattaggataaagtgcatatcctttttcttgttgagtttccaacacatgagcaagaacaattgagagaaaaacaattttatttttctctctatgcatgtattttgaaaatactagttcagaaggagtgagaagtgtcgttttgatttctcaaatcagactcctatttagtgtagttaaattcctttaattaaaccattatttaattatttaaataaataaatatatacaattgaatttggttactgatatttatgagagaatatctcaacaactttaaaatatctataaccacttcgcaaattagatattcacacaatttaattaaataaaaaattaattagcccaaaaagacaaacttcgtagggataggaacagttgacctaagatttggccaaccgacagcagagtcatatttaatgctgatgcttgctacgtgttacacaattaaaacaataaagtaaatgaacacaagattttatagaggtttgaacctcttagttagtgggtcattacttactccccttttatttgtagcactgggtgtgtgagaaagagaggtgtgagttatcagacttagagctcgagttttagacttaatgacttctgacttagcactagcactaaggcttctaggtttgactaagactttttatataggagactttacaccctttaaatccattagaaataggtaaaaaatttattatttacatattaatttaataatatacaaatgactaaaatgcccctcaaaatagatattttctctctatttttgtgggctagtaagacctaatccgtggtttggcttgctatccacgtctgaagctgcgcaccaaaatctggataggctaaaagctggccagccaagcatctgtatgatgcaagctggccggcctatgctggccatagggccagccaggggtggctagccaggccccttgaggtggctggttgtcacttcgtcatcctgcttgagtatttacacttctcgttggttgaagtgctaagtagatgacttggccttcttattagcaagcggtactaccatgtggcactgacattgtccacataggcatgcctcgttaggtgggaaaaaatgtgaataccattttccccgcaagtccttgatcgaacgtctttgtggatagggactttccagcttagtcgagaccgatgtagctttagctgggtaaatcctgcaacatatttagcctttgaaataatttcttgtgactatttgatctaacttgttgcagtaagttaactacattactcttttgcatgctctttagttgaacattgcatggcaagtaaaaaggtagtcccacaggagctgtataagcttaaaggagggaaatctctcttcaccttccagatttcattctctctctaaaaaaagcaacttttgaaagatttccttctctctagaggctggcgccccacattgctttaactcttgagatttttaagctattttgacgatccaagctatcccttcccttcaccaaaggtttcttgtattgggtaagctttctattcccactatttacttattttagttgatttttctatggttgcatgaagcttttctttgctttgaatattttttgattctcatgttagattgtattctttttggtattttgatctgcatgacgggcttaggatgtataatgtgtgatttcttgacgaaaaagatctgattttgacattcgttgtgattcttgactctttgaatcacgaagaatgtgttttagttcttaaaaaacacacacttagatctgacatgtaccctggtcggccataggggtcttgttcaagacctagccgaccatgggtcttcatcatgagggttggccagccgtagggggtaccctagaagctggctggccaatgcctgtgcatagggtccatggtaggcccttggttgggtcatgggacttggctgaccctcttttagctcgggaaccctggccggccaagggcaaggttccaagcgggtgataaattatttattctcttttgaccacgagaagggtctcgtgacggccttgtacggatatacaactttaatcttatacatggttcccttgggaactctatatcagacttggtagtgagtccattatagttgaatccacaacttaagactcaccatttgtctaagtaggtatacttgagacagtacttcgctgatacccaaccttgtacaatgtaatttatctagcaagtacccttgggtacgattggccaaaactttgtctctaccttgtagctttgtcaagttgctcacgttcccttatcatttcaatgcaggtgatttcgagtattggtctggggaggtgacaactgctttgtcataggtccagtcaatcttacttttgtgagatagcatccagtctatcctcttgccactttctgagtgatctctatactgacagtgatacactatgaccagaactaagcagtcatatcgtagtgcaccaccatctaatcctcatgtttccagggtggtaacaattgatagggttggcatagtggaggaggccacacaacctcttgatgatagagatccagaggtcagccaggaagaggtgcatgtggtcaaccagggtgctaagagtctagagaccgagtccgaggtggaggaggctctgcctgctaagaggaggatgaacaagacttatgttgtcttctctaatagtcccctatgcttgtatgatgatcacaggcagccattgaacaggcttgatcaggcctcgatggtacgtttagaccgtgtcttggtatagtttttagagcctcaagttcttgatgacgggtcacagggagactggtgggtctctcatccatctgaatcactaccaaggtttttgataggatactatagagtggactagtgagaggcatccaatgtgaggtgcctttaagggatcagcgagcacacatactggccttcaatcaaatggcatggttggagggccacatccaacaaggggtagtattgtctttgcacccatatttcagagacatatttggctactttaagattgttccaacacaaatcaccttaaaaagtatcaagtaccttttggcaatgtttgttctctatgtggagctaggttggccttaaactactctgtatgtgtttaccaagattttttggaaacttaatatttttaaagcttaagaaagaaataacggaataaataacaggataacaaataagagatttttatgtggtttaggcgttaactatccttagtccactagtccattttattaggctcatcaaccggtaactatttatacaagtagggatacaatggactgaaactcagtttcccttgtgttcctcctaaagaagaggaagcttaggagggatattctggggtttcttagtatattatttagcttattacaagtgtgtttgccaaaagtttgaagaatgagtcttgccctatctcgtgttttataggagtatttataagccaacttctttccatgcactggattggattgatcatcctcaggcaaaatctaaccattgatttggtagttggccttttctccatattgaatttaagggcatcaaattttataggctgggcctcatacacgtgtcgacccaaacctttccttttgaaattccattatccctagctgctggatcatttggtcaagtacgatgagacacgcatgctctatatgatagtgtgtcatgggggaaaacttctgacgtcgtacctgaaaaggcctggccacttggtctgtagtctgacatgtacgagcaaagcctccctgaaataagagaatagcctggttaggcacatttcaaaaggcctttgttcttctggtaaaaacccatacgcttcacaggagcagatggcttcgttttccgggactggggaagatttcagctcatggataccctccgcgctactggcagtcagggaacttccagtcacagaagccctttctgtgagttggggcctttatcatcccgaagcatcagttaacaaagttgatcgactaatgacttcttaaccttgattaaaatccacgtctcgcaactgcaaaaatgcggataacatttacccccaagcttctaggacgttatatgatttgggagcttacagtatcccttcatgcgtgattccaggaaatgggatgaatacaagatctttactacatcacgccatcagccgccaacaaaagtttcactgtcagaaggtattattccctttatttttacatcaaggcttgaaatgctgacttttgatatttgcacgcgtggtgggtgcatgtttgatgagatgccaaaaatggtagcaattggattaagcaaactttccattcgatctgtagttttcacgaagcatgcaatgatggaagctaaactttgggagttaatacaccctcttagcttccctctgatccaatcgtctaacgtcacttgggtgaacgagtcaaaccattcacttctcatggaaggcaccccttcttggcacctaataaatacttagaagagccattttacatctcacattttttctgcctgtcgtactagagttttagcgattgcttccatctcttcctctatcttggaacacctttttagcaacttcaatcccaaacacacgtttctctgggcaagacacatcacaacagtcacccatcctattggtaagttctttttatcatcatttatctaatgtagagcttttaaggagctgagagagtgtatgttgtgtgcgattatttgttctaggaacattggcaccatgcatgcggcctccactagggacagagagacctgggatcttgtatcgtgctgacctatttagcttcacactaatttttgggaggtacattaggtctgctatggaaataactggttcttctaaagctgtgtgtgacagtagccttggcaagaaaaggcaaaggcccacaatggctgtttcagaaatagggacccaccctccacatcatgatccactactatggttgggccagcctcattcgtactacccttctgccatccctaaaataccctctatggcgttcacattcttctgaaaggccattcccttcaatcctcatgacatgcaaagacggagggaagtgaacaaagccttgaaggagtgtttggaggcagagaaagtgttaatacatagatgggccaccgtgctttcagccatacagaaagttgaaattttagacggccttcacactttgacccctaccggaccaaccgtgggggtatacagaccatggagaagcgcctggcccccaaggtagggagagaagctgccctcttcgctgccaaaattttggaccaaatggctaggagtacctctgagctgcccagggagatttggccatcatgcagtagtgtggacgtgtttgcgctggcccattttgctaagcaataggcggtcggggtaaagtttcaagagacctctctttctccctctcttttttatatatctttaccaccgtccagacatttaactcttttattttggctcattacgataggatgctttgctggctgagaaagctgacagggaggctgacacactggttacggagcttgagcaagccaggacagacaaccgtgacttgcgcaacgttaatgagacccttttggccaaacttactgaggccaagcttcaaattaaaggcttgaagaaggagaaccagctattggagaccaattatgctcaatagacctgcctcacagggggtatgagggctgttcacgacctttattgggagcggttgtctagagcagagtcctcaaacccgtccggtggtgcctaattttgaactgtagtaggcctcttcaattttgttgtttttttttatatatctccttctcactacactttttaattcgcagagacaatttattttgccttggccgtggggactggatgtaatagtaatacgatttttgtcatttttttttctagagatttattttggtagactttttaggagctggttatgtctttgaaatacctagttccactgcccaatgtttcaaatcttcccgtcagtctttacatctcttaatcgattcagggatcatccctggactttaccctttcgttactggagttataatgcttcttcccactatttagcctcccacttgggtagaccactcacgaagagttagtccggagatggtttcctttgcagaaaggagccttttcttcacacatctccttgggctttaactctttttttcaggtaaggttctgggagaaacactctagactttaagcatttttcttattttgatccttgcaagcatgaagttctagcaaattattttgatatgatgggatcagttagaagtaatttgggcatatttttcttttcatgaatattggccaaatacacatcttatctaagctaataaccttagcaaatggacgtaagaaactgtagtcatcagcaactgggcgtaccatagcccccaaatgagctgagaatttcagtctcttctgaattctcagtcattttcctgaattccaatgaggaggaggtcgaagtgcagttttattttggccaatctttgctccgggaagattagttcacctagaccatgcctttcctctctatgactacttggaggggaattttcaaaagtttggagaggccagactaaacttggtagtaatctcctagctcccacggggaaaaaccgtaggatcgtaggtggaacccaagttggatggatggcttcacatggttccttcttccaaacagtattcccatcaatccatttgtaatgtgtcctttaccatgacacgaacatcatggtgggaagtataagtccttgtgggtggcaaactttttgtttcccagagggaaagctagaactgtgccttcacttgagaaattatcccatgctgaggtctgcttcgataagcgagggtcatgttgaatttcacagtggccacctttggatttcacggaaaaagggtagaggtgcaccaaaattcaaacaatgactttgctttaagaggttgaagggtgaaacattactaggcttgtgatagacttcaaatattcattctctttcgggaaggagggttgaagatgtgtcgtacccccaattatctttcatgcaaaaaaaaaaaaaaacaacgtgtctacgagagtcatgttgaatttttatgaagcaaacttcagcttctcagagtgaaggctaaagttgcataaaaattcaagcgatgactttgcttgaaaagatcaaagggtgtaacatcactaggcgtgtgacagacttcaagcagtccttctcttatgggaaagagggttgaagatgactcgtaaccccactgatctttcatgaacaaagaacaacgtgtgtgcaagagtcatgttgaattttttatgaagtaaacttcagcttccgcaagggaaggctaaagttgcataaaaattcaagcgatgacttcgctagaaaagatcaaagggtgaaacatcactaggagtgtgacaaacttcaagtcgtccttctctttcgagaaagagggttgaagatgtgtcgtacccccagtgatctttatgaccaaaaaacaacgtgcttgcgagagtcatgttgaattttttataaagcaaacttcagctttcgcgagggatggctaaagttgtcttaaaattaaagagatgactttgcttaagaagatccaagggtaaaacatcactgggtgtgtgaccgactttatgcagtccttctcttccaagaaggtgggttaaagatgtgtcatacccccagtgatctttcatgcacaaaaaacaatgtgcgtgtgagagtcatgttgaatttttatgaagcaaactttggattctgcgaggaaaggctaaagttgcataaatattcaagcgatgactttgcttgaaaagatcaaagggtgaagcatcagtgggcctgtgacagacttcaagtagtctttctcttctgggaaggagggttaaagacatgtcgtacccctagtgatcttttatgcttgaaaaacaacgtgcgtgcgagagtcatgttgaatttttatgaactaaagtttggtttctatgagggaaggttaaatttgcataaaatttcaagcaatgactttgattgaatagatcaaagggtgaaacatcactgggcgagtgattgacttcaagtagtccatctcttttaagaaggagggttaaagacgtgtcatactcccaattatctttcatgcacgaaaaacaacgtgcatgcaggaatcatgttgaatttttatgaagcaaactttggcttcagtgagggatggctaaagttgcttaaaaattcaagcaatgacttcacttaaaaaggtcaaagggtgaaacatcactgggtgtgtgacatacttctaatattccttctcttccaggaaggagggttgaagacgtgttgtacccccagtgatctttcatgcaagaaagaaaatgtgcgtgcgagagtcatgtttgaatttttatgaagcaaacttcagcttccgcgagggaaggctaaagttgcataataaaacaagtgatgactttgcttgaaaagatcaaagggtgaaaaatcacagggcgtgtgaaaggctttaagcagtccttctctttgaatttttatgcacgaaaaacaacgtgcatgtgagagtcatgttgaatttttatgaagcaaaattttgctttcgtgagggaaggctaaagttgcataaaaattcaagcaatgacttttcttgaaaagatcaaagggtgaaacatcactaggtgtgtgagaaacttgaagtagtccttcacttttggaaaggagagttgaagatgtctcgtacccctagtgatttttcatgcacaaaaatcaacgtgcatgcgagagtaatgttaaatttttattaagcaaacttcggtttctgtgagtgaagactaaagtcgcacaaaaattcaagggatgacttcgcttgaaaagatcaaaggctgaaagatcactgggcgtgtgacatacttcaaacagtccttctctttcaggaggaagggtcgaaaatgtgtcgtacccccagtgatctttcatgcacgaaaaacaacgtgcaagttaaagtcatgctaaatttttatgaagcaaacttcggcttcactgagggaaggctaaagttgcataaaaattcaagcaatgacttcgcttaaaaagatcaaagggtgaaacgtcaccatgtgtgtgatagacttctagcagtccttctcttctgggaaggagggttaaagacgtgtcgtacccaaagtgatctttcttgcatgaaaaacaacgtgcgtccaagagtcatgttgaatttttatgaagcaaacttaggattccgtgagggacgggtaaagttgcataaaaattcaagcgatgacttcgcttgaaaagatcaaagggtgaaacatcactgggagtgtgagagacttcaatcattccttaccttctattaaagaggtttgaagatgtgtcgtaccctcaatgatctttcatgcatgaaaaacaacgagcctgggagagtcatgttgaatttttatgaagcaaactttggcttctatgaagaaagggtaaagttgcataaaaattcaagcgatgactttgcttgaaaagatcaaagggtgaaacatcactgggcgtgtgaaagaagccaagcagtccttctcttccgggaaggagggttgaagacgtggcgtacccctagtgatcttcatgcacaaaaaatgtgtgtgcgagagtcatgttgaatttttatgaagcaaactttcgcttacgagagggaaggctaatgttgcatgaaacttaaagcaatgactttgcataaaaagatcaaagggtggaacatcacttggtgtgtgacagacttcaagcagtccttcactttcaggaaggagggtggaagatgtgtcatacgccatctatcattcatgcacaaaaaacaacgtgcgtgcgagagtcatgatgaatttctatgaagcaaactttgacttccgtgagggaaggctaaagttacataaaagcgatgatttttcttaaaaagatcaaagggtgaaacatcattgggcgtgtgacagacttcaagtagttcttctattcttggaaggagggttgaagacatgtcgtacccccagtcatctttcatggataaaaaaaatgtgcatgcgccatccatgattcgtgaaggttcaggggaaatgcatgaactggtatacaataggatctctagggcagtctattccttccgatggattgaaaggtgcgtagtagcttttgaggtaaatgcttggaccccagtaggatgagcgttactctggtagagatttcctaactggtttttaatggcttcatttgctttcgttgatgtaacttggagctatagttacattgtattgacagaatcctctgtcagcaaactttgcaaaaaattatttgccttaatagcatacttcctgtaacgccctaatgctaaggcacgctacagt

SEQ ID NO: 15964 - DNA, 4341 bp, Cannabis sativa
tgttcattggtgtattcttggatagtagagtcagtcccgggtgatacattttaattttcatgatttccttttctctctttataatttgtttttgaaaagaaaagaaaaattaacagggctctccaattatcatatacccaatgcacctttcttattggaggtaacaatcatcatgtactttttatgcagctcaagacagaagagagatgctagaagagatcatgcgcagaggtacaagttcacttgggacagatgtgccgagtgagagagaaatcaaccgccttgctgctcggtcagatgatgagttttggatgtttgagaagatggacgaagagagaaggcaaaaggagaattaccgatctcgacttatggaagatcacgaggttcctgaatgggcatattctaaacctgacaaagaacacgagaccaaagggtttcatagcggaagtataacaggaaagcgacgaagaaaagaagttgtttatgcggattccctgagcgatgtgcagtggatgaaagcagtggaaaatggagaagatatatcaaagctttctggcaaaggaaaaaggagaaaccactttatatcagagaccagtgaagctagtaataatagtaatggtgtggaagacgataaggttatagaactaactgaatctacaccacttgccagtgagggaacaagcgaagacacctatgctcagacaccactgatgaagagactcaagtcagaagaaggaacaagtacagagagacatgattatcaaggggttggtgtaagtagttggaatggacagatattgacatggaaaacccacaaaaagaagagatcaagctactctactcagagctcattctctgattctagaggacagaacagtaatggaagaggaaatggatggagttgatcatagttagattggtggaaaaaatggataaaatattttggtagagttgtctcttcttagtacatattcagcagccctctagattttgtacatgggtctgagctgtgacaagcttttagctaacttgttagggcagagcaaggcattcaaggccatatgaagatggctatggctaatgcccactcacaatccatttattattctactttgtaagactatctcccacagtcttaaaggatcaatttgtgctatatttagcacaaaaagttaatgtgatatatttggcacaatttttaacaatatgcttcaatgcactagtgtaaaagttcatgaaaaaattaattttttaattaatgttcatttaatttattgaaaaagacacttgaaatagtaataatattttttcttcttaaatttagcattgaaatgatttaatgttaatagtgaaagatactaataatataaaacaatgagataaaagtaaatataaaaaatatagcatacaaatatgttaggacttagccagcacttcttttggtgcagtaattatatttttttaaagatggtttaacatgtctttttggagatggtataacgtgctgctaattataattttttagtcaattttcgtttgaaatcacatgccgaaatatttttttcaaaatttttataacggtattcgttataattacaatatcatcccctaaatttttcaaaaattttgaataatttatagtatcaaaaacaaaatttctattatttcaatttaccacacgtgttcaaaaaacttcaaacgtattttatttgaattttttttaaaatttacaaagatgatttataagcataacaaatgtaaaaaaaattgaaaaaaaaatattctaacatatttcaggcatagaggttgacaggtaaggcacatcgtcaaacaccaaatttcttttttcgaagggcaggcattgcttgacaaatatatgtaaaacatgagaaagtaacactgaaatacaactactctataatcattagtaacacccatacaagacacttttgctgtatagcaaaagggcaaatactagattcaaatattaaaataatacctggtaagttccaagacaccatttttttgccaagatttatgatgacataataaactcgttgaatccaaaaagacaacttaaaatggaacaataaaccaaataactaacaactaatcctactgatatctttagatccaaaatgctttgcctaaactaccccatacatctcttcctcaaaataagattcagtagaacagtcaatcctaatgcttaaatgcctccaacaataaacaatattaatgactatgaggtttacacactataataatggagaaacaattgaaatacagggcctctagtccgcttcatcaacttcaaggtttttcagctttgatcctaattcatcttcatcctcaccaccttcttcattatcattatcatcatcatcatcagcatcagcatcttctccctcaggatcattctcatccaaaggaccaagaagatcaggagttttcttgaaaatatccttcacctcatcaatcccttcatcagagatgtaatttccattgatgttcaacaacttgaaaccaggcttttggaccacaatctgagccaaaagacgagccccagctcttcttattaagttagtactcatatcaacttcagtcaactttgagtgaccttctaatgcattggctatctgaatagtaccttcatctttgagttcattttcagacaagttcagcttactgagatgcttcatcgaagatatacaagctgcaagggcaggagcagcttcaacagttatgtcattaccagccatatccaaaacttcaagtaaaggagctgattccttgagagtgttggctatagcaactgcaccctcattttccatgttaatgtaactcaagtaaacttctgtcatgtatgcgtggttggacagtgttttgctcaatgcaattccaccttccacaccaaacatattgtccctcaaatcaagcttctttaaatgggtacacgtagctagagcttcagataaggccactcctccttcggcaccaactctcgtagaggagcaacgaaagtcctccaacagaggagagcgtttcacaacctcagagatagccactgctccttcatctcctgtcatattattgtgaaaatgtaggattttaagtttctccgtcgaaggaatcaactcacaaattgctcgagcagcttcttcggagattccatcattcatcaaatagagctcctccaactgagattgtgatttaagaagcgctccgaaagctctaacacctttctcacccaaggcattgtttgagagattcagagacttcaaaacactgccttccaaagcttctgaaaatatattcatcaccttcagagcttctgcctcagatctcccagctaccaaatctgatagatctacttctttcaactggcttttaagtgaagccaaaatggggtcagcaacttgggctgcttctaaaccaaagcttctattgctgaagcaaatctttgaataagaattccctggctcctgtaatggctttagaagtttttcaacctcttcagcttcaataaaggctcgtttacctttagatatatcaaaaaaagtttcattggagacaatatgattttccttgtcctttttaatagaacctcctttgagaacttgtaggagaagcttactgcattctcttgcgtatagctgcaccgcagaacctccatcaccatcaggctcgttttcgtgatgttgatctgctgtgagaaatgccttctcttcaatgtactttgcattgtcttcagcatcttccttgttcagaattccatacttttgagtgaaaatagattcagttgaaagattgtttatcatccgctccacaaggacttgcctagtgttttggctaggaggccacagtttgattgaaaatggccgattttgtgaagtcatagtagttgcatccattctaactatgatctacacatataaatttttttattaggcaagcaacactttaaaatattcaacacattagattatacattcttaaatcatgataaataaatatatatataaagtaggaaatagcgagagaggaagcaactaagaagggccgggacttgcagtgcgagaagaagacggagactgtagtcgactgtgagtctgagtctgagaagggagcggctgctttggttaaggcgaactgggcaagagagacagagaactagggttagggtatgtgttggccttgggcttgggcttggtcttaggccatgtaagtttttttttgggttcagatgcaaaatgagactaaatttgctaactaagttagtaaatttactaattctaaaaaaataaaaaaaaataataataattttgaaataaagacatt

SEQ ID NO: 15965 - DNA, 9977 bp, Cannabis sativa
tatatatatatatataactcatattactaccaacctctcaatgtccgagtaaacttgaattgcagaaggagcaggttctcttctgcttctttctctctcataatcataatcataatcaccatcatcactcttgcaggagattctgactctccgattattcttatatgcgattccagaagttgagcgacgactgcatccaccaccgattgtacggctcggcgatagtgatgtaagatggtgatgatgaggttgtacttgcgcccaccttagggttacccaactgcaactgcccatggctaaaacaacttacactttcagtcaacatatacatacgtacatatatacgcaattaaaaaagaaaaaaactcatcttttaggcttacaaaacttaattttttatcaaagatgaaaattaaaggtatgaatttgattataataaagaaaaaagaaaacatgaattgaattgaatgaaataaaaacctgaatagaagctacgactgaaggcttctttcttctctacaagaagctcggataataagttagttaatcgcagaagaaagctttatttatattaaaataatattaggctgacttttgcccctaaattttagtatgtaccaaattatgttttttgaatttttttggctgccttacaccattaacattgttagatttaaggatctttgtctaattcattcaattttacgtaattgtttatgtattaaactatactctccaaattttgatatctatcatgcccttcaaacttttacatatactaaatcatgtcccaaattttcatacatgttagacttttttttactaaaatttgacaaaaattcttaaattcaataatcttaataattcaggaatatttttaaggacgttcaaaatttaaggatataagacctagatgttatttgtggcaaattatgctgctttggtcatctgcctggttgttagtttcatctaaccatgtggtctaattttttctttgacaggtcagcttagtaatctcaaaccgaggacagttgtccttctttgttggccgagctgttaaagtttgttagcttaagagttgttattataaaatcagggattactagtttttttaactaactcttcttcgttgattaggatattgctctgatactaattgaaaaagtctaacagtgttgatttctttaaagttgttttaacatagttatacttatctcaatgtgcaagaaactaaacagagaacaccactcagatttacaagcttcatccaaccaccctgaaaactcatttcaggcaactattgcttggattcccttgaactagggtaataactttcactatgaatcaaaggatacactatccagtttcaattacaattacaccaaaagtaatctgcaattaattcatacagaattacccaactgatttgaacacacataaatcagaaaatcatctaagaaccttagacttcacaaggcaagactcccttgtgtctatccagctgaactctcttcagcaatgcaatctgaactcccttcagatacacacgatccctgatacaccttcaatcgcccaatgggaaccttgtctgtgagttttatgctaatctagatgaaagtattgtaaatgaaaaaagtaaacacaaatatcaagcatatattcatgggtcttagtttaggtgtgctccgtctaccatcagccttatactgaaaatacctaggctagctcacccctatttcagtgatgagtataaaccattgtttaaggatgtgggtgctgaagttactggtcgatctgactttgtgtggaatggaaaggagtttcctgtcactatactctctgagttttatcgggttcttcataaaattgttttgtcaaattggtgggccaattctcatacatccactatcaactacaatactactcggtttctatatgctcttggcactggtgtctctattaatttaccatcattgatctacacccgaatgttggcctctgctaaggctaaaggggttaagcacacacttccttatcctagtttggttcagaggttggtcttaagaggtaatccgactttccttgagccggatgttacagtgcttgtgccctctattggcaagacatttcaaccagtgtttggcaagcccattcctccatctatgattgtctttaccacatctgcccctgctgcatcagagattcctctagtgagttcatcgctcacttctcgcttgccctctgctcattggcaagtcaaactgctttctgaggttcaaaacttggctcatgcttatgcgttagatcaataacgtcagaaaaggtttgagcaaggggttgttactgtgctcacggccatgttagaagtactaaaatcaatggaatctggtccaatctctgaggctactccaattcagtcaagctcatttgatgatcctactgcaccaatccagggggagacaagatctggtgttgatgcttctctgaatactactggctaatcatgctcaccgagggggagttgttatgtaattttccttatttagctgttttgcttattgcagctgtttgacacaatctctataagtgtaattttttgtgattaagttgtgtccttttgcgctgtcatgtagtagttgttttgttaaactttggtgctctttgttaatggtggtgtgtatctttttgtttgtcttgattgttgccctgtttgtctgaatatgtgttctttcgttgagcataattttccaaataggagattgtaagacccagatgttatttgtggcaaattatgctgctttggtcatctgcctggttgttagtttcatctaaccatgtggtctaattgtttctttgacaggtcagcttagtaatctcaaaccgaggacagctatccttctttgttggctgagctgttaaagtttgttagcttaagagttgttattataaaatcagggattatcagtttttttaactaactcttcttcattgattaggatattgctctgttagggcaaaattgtcttcctggtttttctggtgtttcttgcaggtctgctgatgaaatcttctgggattgaaggtgtatcagggatcgtgtgtatctgaagggagttcagattgcattgctgaagagagttcagctggatagaagcaagggagtcttgccttctgaagtctaaggttcttaaatgattttttgatttgtgtgtgttcaaatcagttgggtaatttctgtatgaattaattgtatatcacttttggtgtaattgtaattgaaattggatagtgtatcatttgattcatagtgaaagttattaccctggttcatgggaacccaagcaatagtcgcctgaaatgagttttcagggtcggatgaagtttataaatctgagtgttctctgtttagtttcttgcacattgaagtaagtataactatgttaaaacaactttaaagaaatcaacactgttagacttttgaaaggacataatttaaattagaggagaataatcctaattagctataatattatttactacaaaaaaaaaaaccatttttgcaaataaaaatatctaaaataagttcatttataaataaaggcttatccaaaatgacccactttccaattgacttgagagaatgatgagctcacaggtctcaactctcactactctaaacaacctttcaatctcaacaccgccttcaacttcctccaaattacgtctctcttcgtcgtcatatcattcactttcccagagaacccacattccttttcatgtttacaagcacccttcggccattctcctcgagctctgtacttctttgcaagagctccgccaaattatccctctcatcatcaagaacggcctctatggtgagctcttgtttcagactaaactcctcagcttgttctgtaaatatggaagtgttgtcgaagcagttcgagttttcgaatctgttgaagacaaagctgacgttttttaccatacaatgcttaaagggtatgcgaaaaactcatctttggaggattctttctctttttattgtcgtatgaagtgtgatgatgttgaaccggttgtgtataactttacgtatttgttgaaagttattggagataattcggaccttagaagaggtaaggagattcatgggcagctaataacatctgggtttgcgttgaatttgtttgcaatgacttctgttgttaatttgtatgctaagtgtggacgaattgatgaagcatataaaatgtttgatagaatgcctgaaagagacttagtatcctggaatactatcatagctggttatgctcaaaatgggcatgcaaagaaggctttgagtctgattgttcgaatgcagcatgagggtcagaggcctgattcggtcacattggttacagttttgcctgctgctgcagatgtaaaatctttaaggattggaaagtctattcatggctatgttctaagagctgggtttgagtcacatgtgaatattgcaactgctcttgttgacatgtattcgaaatgcggttatgtggggattgcaaggttgattttcaataggatgagagaaaggactgttgtttcttggaactcaatgattgatgggtatgttcaaagtgatgatcccaaggaagcattggagatatttcaaaagatgttggatgagggttttgaaccatctaatgttactataatggaggcattgcatgcttgtggtgatttaggtgatattgagaggggaaggttccttcataaattgttggatagactgggtcttgggtctaatgtttctgtaatgaattctctgatatcgatgtatacaaaatgtaagagagtggatattgctgccaagatctttgaaaatttgcagggtaaaactcctgtttcatggaatgcaatgatattagggtatgctcaaaatgggcaagtaaaggaagctttgagtcactttagtgagatgcaatctcaaaatataaagatggatacatttaccatggttagtgtcattcctgctttggcagagttatctattacacgccaggccaagtggattcatgggcttgttataagatcttgtttcgataaaaatgtttttgtgatgactgctcttgtagacatgtatgcaaaatgtggagccattaacactgcaagaaaactctttgatatgatgggtgagagacatgtgacaacatggaatgccatgatagatggatatggaacacatggggttggaaaagctgcagttgatttgttcaagaaaatgcaaaagggtgctattaaacccaatgaggtaacatttctatgtgttatctctgcttgcagccactcaggtttggtggaagaggggcttgaatcctttgagagcatgaagaaagattatggcctagagcctgcaatggatcactatggagccatggttgatcttcttggtagagctggccagctcaatgaggcttgggagtttattcagaaaatgccaattgagcctgggattacagtgtttggtgccatgttaggtgcttgtagaattcacaaaaatgttgagcttggagaaaaggcagccatgaaaatatttcagttaaatccaaatgatggtggctaccatgtattgctttctaacatatatgcatcagcttcaatgtgggataaagttgccgaaattcgaacaatgatggagaaaaaagggctaaagaaaactccaggctgcagcttagtagatttaggaaaagaacttcatactttctactctggaagcactctacatccacagtccaaacagatctatagctttcttgaaactcttggagaaaagataaaggctgctgggtatgttccagacactaattcaattcatgatgttgaagatgatgttcaaaaacagttgctcaatagccacagtgagaagctggctatttcatttggactactaaataccagtcctggcacaacattacacattaggaagaatctaagagtttgtggtgactgtcataaggccacaaaatatatatcgctcgttactggacgagaaatcattgtccgtgacatgcatcgcttccaccatttcaagaatggaacttgttcttgtggtgattattggtaaactgaatactcttgtttggggtattcttgtgtgttgctgtaacataaaatttctctttagaataatataaaaggaggctctccaccaacacaatgtttgataacttttatttttattttttttaggaaagattgtataatagataaataaagggtaaataccattttggatcccgtgttttgtaaaagttgccaattggacactctgttttgttaaataacaatatgtatcatgtattttctaaaattgtacaaataggatcttgaactgattttttgtcaaaataaaacttaataaaatttgatctaaagttgttatgacaaaactgattacattttctgtatttgttcgtgttagaatttgtcttaaagttggttatattaaaaaataaaattgctgaaaattgagtttagggttctatttttaccattttgaaaaataaatgattcattttctcatttaacaaaataaaaagttcaattagtaatttttacaaaatctagatttgaaaatttacccataaataaatggaataattaggtaaagtactattttaataaattttttatatgtttaggtatatttttttatatatatatatatatttatatagtattttataaaagtaataaaaaaactacctaaaaatattacgaaaataatatctaaaaaaaacatcaaaacttacaaacataataacatacaaataataaaaatttaacatttttgtgtatatgtgaaatattaccaatatatttcccattttcttcgctgatatcaaatacttggatgggccgggcttggagtgaaacccggcccaaatagtcagagtgtaatttcctctaaactaaacctaagcttaccatgttccgtgacatttctccggttcactgactctgtacaaaactccatagccattatttgagaaatttaagctgagtcaggcgcatcaactcaaaagaagaagagagatttatcttctactactacttcatattcaggaaacttgttcaagcttttacctttacaatgcttcctttagtttgcaaaagactctcccttttaaagtccagacctccaccctttggccatggcttctctatattccaatcttttatcagacccatgacagaatcgtctagttccaatgacccacaaaactttacggtttcttacctccaaaactcatgtgggttgtcccacaattctgccattgcagcttctaagaagctcttatttgaaaactctgaacaacccgattcagtattggagctattgagaagtcaagggttaacaaagtcccaaattgagaagattatagtcactcgtcctcaattgcttgaggctaatttggaagatacacttaggcctaaaatggagtttcttaagtctttggggttttctggtgctagcatggtgaaattggtgactaaagaccctcgtatgcttgattgtgatgtagtggaatcagttcagttgtttagagctcgtggttttagtgatgagcaaatcaaagggttgaccatgaagcttccttcattgcatttctacaatgtaaacaagattgttaaaccaaaacttgagttttttaagtctatggggtttacagctgaggatgttgcaagaattgtttcttctgagccttatatattagaaaggagcctggaaaatcatatcattccttgtattgaagtgcttaagagggttcttggcactgatgagaatgttagaaaggtaataaaagcttgctattggatacttgagtacaatttagaaaagatgcttgagccaaacatagcaatgttgaagagccatggtgttcctgagaatataatcatgaatatgttcttagctcacccaagaacatttcttttgaggcctcagcagattactgagattcttgctgaagttgagaagttgggtttcaatcccaatacttctctctttgttctagccattcgttccatggctgtgatgagtaaaacactttgggagcaaaaggtggaagcttacaaaagttttggtttgactgaagatcaggtgtacacagcattcaaattgcaacctatgtgcatgattacttcagagaaaaagatcaagaaagtgatgcatttcctcatcaacaagttgaatatggatgcttctatgatttgcaggaatccaaatcttttaatgcttagcttggagaagagacttattcctaggagttcagttctgcaacttttgatatcatcaggttttttgaaggaagatatcaacataatctattatctcagaatgcctgaacagcaatttgttgagaagctggtgagaaagtataagccactgcttcctaacattgttaatgcacacgaaggaagaatagaatttctaggctttccagttatcttaaagtcataactactataaagatgaaaaagagtatcattgtatcaagaataccaagagctaagattgagttcattgtctagtttgggctaaattcacaagagggttgtgtctctaaaggtgagtcctttatacagattggttggtggtggcttgtagattctttctatggtggtatagtcgtagtgtggcctccctagatttgagctatcatggtgaacatgtcttggttttatggtgttaattagtggggatgatatcatacaatttgagcatcaatattcttgccatcaagtcttttttcccctctatttttggctgcttttttgtgactgaggatctttctttgttttttgtcctatgtagatctacttagaaaagagatataatcaaataacgttgttgaaaattttgttacacattttaacgatgaatgaaaaatgtattgtactaactttattgatgacaagtctcctattcaattgtactctagagatttttttcattatttttttgttaatgtttttttgaataaattgaggttcgtggcaaaatagctattgcacaatagctttaaaggatattgaaaaaaaaaatattattttggaattaaagccaagtctattatcatagatggttcatttattgaaagatcaagaaaagttttaaacaaaaacatatgtcttaagcttattcaataaatcatttgaactttcaacacgctctaatacttaattgatcacagttcaattcctcactttctcagcttggttttcacttttcagtattctcaatagcattagcaactttcatcatatcaatttttcttctgtgtagctccttatgcattaaacgaaaaattagtttcaacattcaaaaacttaaaagttttatcattatccaaatcccaacttcatgtatttcagtagtaaaaagaaaaaaaaaaattacaatttaaatccaactattgttgatcaactcattcactctcctatgtttcttcctcctatatttttcagtgcaattaatccaatccaaatttgagtgtagtttaataattactgtaccagcaaaacaattgaaagtgaaatattgaagggacatgatcaatgttatgagactgactatacatagagtaaatgcaactaaaaatcaagaataaatcctttgtacacacacatgaattacagtaaaaatcaagaaattgcagtgccttgtgtgatcaactccactagctagtaagacctgataacttagtgttaatacagcactaagaacataaaattcttaggtatattataactcaacattacagtggggaaagaaagaacagaaagaattgggcttcatagaaagtgagtgtgatggattgcataaaacataccagtcctcagtttcaagtccagagaccgaccgaaagccataccaattctacaagatgccacaaatctagatagggtctcatctagtgacatagttgaaa

SEQ ID NO: 15966 - DNA, 2905 bp, Cannabis sativa
  modified_base (32)..(46): a, c, t, g, unknown or other
  modified_base (2856)..(2879): a, c, t, g, unknown or other
aaatgatagattttaaaaaagaaggtaaaaannnnnnnnnnnnnnntaaaaaaggtatagagtgtaattttctcttgattagcagtgggtccatccagaatttaagcaaacaaatacactaattaataataattaataattaataattaacattatttttaatgatattacttaaattattgtgattattagaaaacagtctaaattgtcttgtagtgattagactcaatgcacacacaaatcaaaccccccctcccccttttcaaattttctaatttatcaaattaataaaaataatcaacctattcttaatctatatatataaaaaaaaaaaaaaagtaatttctagtataaatatttaaatttaatttttaatagtaataatatttaaaatatatttttgaaactctgtagctactttgtctttaaatgttaagtcattatctacgtattattttcttattagtatattcaaactaattttgtttataaaaataaaaattcatgacatgaattaatcaggattgccacatgttaatttacttaaacactacagtcaggtacctgtagaagtttcaaccacgaaaaattaaatttaaatatttatttacaagcaaaagttaaacttatatatttatgctataaattactgaatatttataaacacataataataagaataccattcatattttaagtaagaaaaagaaagtgtgtgaatccacttgtttttaatagattaaacaaatagagtctagtattgctattccaaataattcatataaaaatatctttaagaaataaaattcaaaaacaccttttttaatttaatttttattgaaactttcatgaaatacaatttaaattattattgcttttctttatgggatagtgcggcacagccattccaaccaaagtgcttaaaacccaattttctttacacttaacaataaagggaacaaagcactattctcactcaatttttttgtttatttattttattattttttgaaaaataaaaaagacccaaaaatgaaggggggtttagtgagagttaaccctagagttttggtaaacaaaaatgattaggattagtaagacaaagtaaacaagggaacatttagtggagcccataagagcccaaaaaagccctttgaatagttactcactcacaccctaaaaaaattgaatctaaaatggccgacaatggattatgtattgtataataatatgtatcccaattagggcatttatttacctaaagcataatactatatatattatgatgacttaggaggactacttttactacatgtcttagatgttggtttggtattgtattgtgtcaacctctttcactcttttttgtcattgggccaaagcccaaaaagggaaatctagtccacattcaacaaaggttgaaagccatttttcaattgtagagcttaggcataatcttgggccaaagcccaaaaggaaaaccaatctacattcaataaagctttccttaaaagaaaagaataacaaagaccttttcttttgtagagcttaggtatcacattgggggtaggaaaacacaaaggttattacattgaagaatttacaatgaatatatgggttttaatttttttttctacttaagtatgacaattttttttttaatttttaaactattttatggtatttgctattccatgtatatataaatttaattttcaaaactcatatttaatcttagataaattgctcaccaaaaatctttcatcaagaaactaattttttcattaagaaactaatttttcattaagaaaatgattttaattatatagaagtaaaatatatataggattttttaagttttttacccatctggcaacgatcgatcagagcgaaattcaccaaagatctttcatttaagaaattggttttttcatcaaaacgctgatttttttcatcaagaaagtaattttttcatcatgaaactagtttcttcatcagaaaactggttttgattatatataagtaaaatttatatatgatttttttttaagctattccttcttatctacgatgatttatctcatgtttttattttagtttttttgaatatcatatttggtacaattaagtttacatgccatatatattaaaattttctttcttttttttcagtatttttataaatagccttattacatttgtagagcttagtcatcacattgggcaaaagcgcaaaatgaaaacctatccaacttcaacaaagcattccttacaaaagaaggaagaaagcatcaattttaaaaggaaaatcagtccacatacaacaaagcttggagaccttttcctttataaatcttaggcatcacattgggccaaacccaaaggaaaaccagcccacatcccacaaagcttgaagacctttttccatttgcaaagcttaactatcacattgggttgggcctcatattggaccatattattagataggataagttgagaaatatatcttttttatatccattaatcaaaaatactctcatattatatttcattaaaatgtacccacttttgtgagtgggttgtccaatatactttcactctccacttaaatctagcacataatttttattaacttaaggggtatattggaaacatcatctataaaagtaggtatatcttaaaaaatatgaaaataagataaaaattaaaacatgtaaagtaaagtagatatacaattttttacaaaaaaaatgatactttatataattatcctaaataaaaatccttccaactataaaaagtattccaaatgtcccctatttactacactttgggttcgtttggaacgccgtattnnnnnnnnnnnnnnnnnnnnnnnntatattgaattggattatatatcata

SEQ ID NO: 15967 - DNA, 3975 bp, Cannabis sativa
atagttcgaggagaatttttaacggccaaaaaaattccgggggcatgatttagtacatgtcaaaattcgaggaaaaaaattgctaattagcctaataattaacttctaaagtttctaaagtttctaaagtttcatgtgaagaataaataaaaagggccaaatactctttcatgctcaaatcgtaactaaaaaatgaaaaaccgaaagagaagttgaaaatctttgcatggaccaagcaaccaccttcgctaaagctctactcaacaataccaacaatcccaaattggcatggcttctcttcaaacgtacactttcctcccccatttctacttcttcccatctcactcttccctcagtacccatcctcgctcgtatccttgttggcgccaaaatggaccaagaaatcgactctcttcatcatcttcttcttcgaacggagccccctgaaactgctcatgcttctgttgtttccttgttgagaattttggccaagttgggtgtccctgacaaggctgtttctcagttcaaatcacttcgattgcggttcccagataagcttccctctgcttatttgtataatttgcttctcgaatcttctgttcgtgctagaaatgtggattttgtgttatggttgtataaggacatggtcgtttctggggtcgacccgcaaacttatacttttaatcttttgatcagtgccttgtgtgactttggtcatgtggatgatgcacgggagatgtttgacaaaatgcgtgacaagggttgttgtccgaatgagtttagtgttggacttttggttcgtgggtattgtagagctgggcttagtgaccaagccttggagattctggataggacaaatgatattttacctaatagggttgtgtataatactttaatatctagtttctgtaaagaaggtaggactgaagaagctgagaaattagtagagaggatgagagctagcaatatgtttccggatgttgttacttttaattctaggatttcggctctttgtgactctggcaaaattcttgaagcttctaggatatttagagatatgcaaatagatgaagtgttgggtctgcccaagccaaatatcataacatataatttaatgttagaaggattttgcaaagggggaatgttagaagaagcgaagtccttgtttgaatctataaagaggaaaagtgatgttatgcatttggaaagctacaacatatggttgtcggctctgatgaggagggggaagttgttggaagcaagattgcttcttaaagaaatggtagaccaaggaatagagttgagtgtatgtacatataacatcatgattgatggcttatgcaagggtggaatgatctctgatgcaaaaatggtgatgggattaatgataagcagcggtatctccccagatgcagtaacctatactactttactccatgggtactgtaggagagggaaagtttttgaagccaacagagttctgcaagatatgatgatgaataattgtgctccgaatactcatacttgcaacattttgctgcacagcctgtggaaggaggggagaacgtcagaggcggagaaattgctgcaaaagatgaacgagagaggttatggtatagatacggtgacctgcaatattgtgataaatggtctctgtaataatgggaaattggacaaagcaattgaaattgtgagtgggatgtggactcatgggagggcagctctaggccacttagggaattcttttattggcctggtcgatgatagtaataatggtaaaaactgcaggcctgatttaattacgtattcaatcataataagtggattgtgcaaggctgggaagcttgatgaagccaaaaaaaagtttgcggagatgatggggaaaaagttgcatcctgattcaatgatatatgatacattcatacatagtttctgcaaagaaggaaagataacatcggcatttcgagttttgaaagacatggaaaagaaaggttgcagcaagagcctgcaaacttacaactcgttgatccttggtctagggggtaaaaatcaaatatttgaaatatacgggctgctagatgatatgaaagaaaaaggagtttctcctgatgtttgtacttataataatatgattagttgtctctgtgaagtgggaagaatcaaagatgccacttctcttttagatgaaatgctgcaaacgggtatatctcctaacattccttcttttaaaatactaatcaaagctttttgcaaggcatgtgagtttgaggatgtacaggaggtatttgagatagcgttgagcatatgcggccataaggaagccttgtatagtctgatgttcaatgaattttttcttggaggggaagtattaaaagctaaagaaatttttgaagctgcattggatagaaatctatatgtggggaatttcctttataaagatcttattgataaactttgcaaagatgaaaagttagaggaagcaagtggcttaatttattacatgattcaaaagggatatgggtttgatcctgcatcattcatgcctgtgattgatgggttgggtaagaaaggaagcaaacacgaggctgatctgcttgctgagaggatgatggaaatggcctcagaaggtagtgtaaaagataaaatttacagacgaggaaggattgctaaaaagtcacgcaagagtggtggaagtgattggcaggccatagtgcacaggtatgggttagggattttacttttataaattatttttgcttaattacttgtgatccatataaatttttagttgtttatcttcattgaaattctatattagtagaatcactatctgagtaggggtgcattgctactggtgcatgaccaaagggaagactaaatggtcatgcgttttctgtttgtggaatcagtctgttttgtgcttttatactaagagttgttccagtctccgatccattataaatgatggcaactgctttgacgactaagacaatatttctttgaaatgtcagaaaaatactaataacctatttaaagtctgtttagctgtttgacactgatttctaacactttccttattattgttttttatcttatgaaatttttacttagtatatatcttactttcattgacagaaatgatggcagtggtgttgcactgaaaactcttaaaagggtagagaaaggctggggtcgtgaaagtatattaagttcgcagccacaacataatgagtttcatggttactaggatgctaacaattgaacctttcaactccctgcaatagcttgttggaacagccagaggacttactaattgttgatcagctctaaatctagagggtttcccctacaatttattgaatgcagaaagggaggttttggttattctatgcaacattatcagttaagatctcttttaaggtttgtttcttagtatgcttaaaattattgctctgtcttgctgtatgaatgtaaaataattattgaaataagtatattagaaaactgaaagaaaggatggaaaaattgattcagcccaataaaaatgtgtttttgtttctctacttttccgtaggattatgttactaaaactaactagctaactaataacaaaataaaaactaacatatggaggtataattaaaaaaaccttttcagaaattaatatttataatattttttatcaaatcaggttagtattaagttacagttaatttattaattatttttagtaaatttttaaattaattacaaccgtctagtaataattcaacgactaaaagtaaatgtaattatcatgattacattttatctaaaaaaaaaaaaaactatcatgattatatatttaatgtaaccataaaaacctcttccatatatatatatatatatatatatgtatattaagatttatacttatatctgtttggttagaaaaaaatgatagaatctttgaaggcatcgagtgttcattagagg

SEQ ID NO: 15968 - DNA, 7700 bp, Cannabis sativa
ttagtaacagctgcctgtaatctcccttacctagctcacatatccttccaaagatgtttcaatcccatggatcaccatattatccaagaaatcaaatactacaagaaagatctcgaggatcaacgcatgtggacaagagaacgatccaaagcaagacaagaaactaagatcggattcacagctagggtggatgccaagatcaggcaattaagagggagacttcataagaaacagacatccatcatcattcaaaacgcagcagactctacgttgtgacatacttatcaattttgatttattattttttttctcttaaattttttttaggctttctcacagtttgcagtcttatataggagccgctctttctgtttctttcttggccatttgtttattcagttaagtggggtcgcttaaagtcccattcattatagagagaaaaacgttggagttgttgtatgtactatgtacaatatcttacaaaatttgaagagttaaacaacttgtgaaatatagttgatacctatatctacatctggctgtttcttttccttttctggtttctattgtattgtataatacgttgtatttattatttaatggcaaaaaaataatgcatccaaaggttatatataaatatatctattcattgttaatgattttgtttgtgatatgcctcttctagaggttctctgacaaaagtcttgttgtgtaaaaacagacctacgacttagatcatcaattcgtttgactaagattgtttgaaattgttaaaagtggtaaacttaaagtattaatgggttttcgagaaatcattcaaagcctgaaatgaactaacaaagttggtattatctagtgttgtttttgcttgttttgttctattatagtatatatgactaacacataatttagttcagtatatgcactgaaactgaaagtagattaccttatttgacttgaggatattatatcatatctactgctgcctcatgattttgatttggtttagatgtatatatatttagaaaagtagatgttgaacttatttttgactttaagatggatattcttctggatatatagggctgttcttgcttattttaatatgtttttttttttgaattatatgataaagatttatttgacttgagggtgaggataatacctcagcagatagatagagttggtggttctagtaaaaagaaaaactattaatgagtattaaagatttataaattatatattaatattaattggagggcaaaggaagagagactattggatacttagcacataaacgacaaccttaataaaataaaaaataaataaataggattaaccctcataattatggcccatgtggagttttgtcactttaatttttttacgaaatttcttcttgaattataaaaatttttgtaaatatccttttgtagttatattcacttcaatttattacacaatttattgatataacactaataaaaagataatttaactcaagtttggacaaaaagtatatacataatagcagtataataataaattatgaaaatatatatgtacattcttaaaattaatatttatatatttaatatcaataatttagatttcaaataatttaaagatgttaaataattttttgtactaaaattatacttataatttatagtcacataattaaaatattaaaaaataaataaaatttaactagaggagatatttatgacattttatttatttcgtgaaaaatttttaatatgaagaaaagtttagaggacaagacactacaatagtaatcttatttattttcaaaaaacacataaacgacaacaaaaataagaaaacgacaaaagaaataaagtaacgtgtttgtatgggaactgagagtggggaggatgggactggcagtaaatactaaattagacgataatccctctctctaataatctggaatgttaattttaccgtctctgtcacctcaatttaatatattaattacaataaagaaaaaagaagctcctttaatttattttattttttaaaatttaaattttaattaataacttattctttccataaaaaggctagaacaaaattccggttttcttggtctaaacggcgaggtgtagagagagagagaaagatgacgatgcctttggtttcttcttcttcttctcactatgacctaaattcctagagagagaaagttgacgatctttcctaatatgcccccaaacccaccttttcttcttcatctgatatatctacacataccaattcttcgagtgccggtcaatccttgggctacggccatcggaattttctgaacaatcttcctagggctgcctagggttatcttttgtggactacttcagtttgatcgtgatctttgattttcttattttcctatggatgctcgagttggaggaaagtttcgactcggccggaagatcggtagtggatcgtttggagagatctatctcggtttgttcattttaatcttcttcttctttccttttttgattttccttctgtattcgtattttgttttgattattattcgttacttcgtttccccccttaattgtttaggtactaatattcaaacgaatgaagaggttgcgataaagcttgtaagtaattcttttctttctattttgttcaattcaatttattgttttttcgttttcgaaattagagtgttgattccagattctgtttttaggaatttggcttccgattgacatagcttttgattaattttttttttctgtggtatggggttattagtaatagttcgttccaaattgctgttgatgacttgaatttggtaggttatgaaaggttttgtgaagtatcaatcatgattcaagttcaccttggcctagaacactgttatacacattaggggtttttatcgctcttccaatatattagttttcttggaatacatagttttagagtgatatattttattaactgtgcttcgaaatctgtttttttggtgctttaaagcatgaatgttgtcgcattttacttttctactttgatgatctttatcatggtagacgtttccttttaattcttgaaaactgagtgtatgtattcgtttatttgtttaccttttatttggcgcttgctcatataatgagatgagaatgtaaattatgacctcatagtgattatatccataattctctttttgtgcaggaaaatatcaagacgaaacatcctcaattgctatatgaatcaaagctgtacaaaatattacagggaggaagtaatggcccttacccttttctttgcctttgtttagataatggctttatgctgctgtgctcatgcggcagatatatttgttgtctgaccatttcttaacaattgcagctggaattccaaacgtaagatggtttgggactgaaggagagtacaatgttctggtgatggatttactgggacctagtcttgaggatttattcaacttctgcagtaggaaattatctttgaagactgttctcatgcttgcggatcagatggtattaatgaatatatagtgcaatttcttcttgcctttacgttttaacccttctgtttcttttattaataatgggtttatgttagatcaaccgtgtggagtttgttcattcaaaatcatttctacatcgagatatcaagcctgataattttctcatgggtttagggaggcgtgcaaatcaggtattttggaattttaattaaaatttagttccttttgttgtaatagtatatgaatgcatgactataaactctctcctttgttaggtctatgtcattgactttggtcttgctaagaagtatagagatagttcaactcatcaacatattccttacaggttagcatttacaatatttaaatgtttaatattctattatctcttctctattggcctcattttctattttcaattatttcgaaagtttttattactattttcacaaagtactgacccttgtataattgcagagaaaataagaatttgacaggaaccgctagatatgctagtatgaatactcaccttggcattggtaagccaattattttttacccttgcaatcatgtgcatgtagtcttactagatttacttgtagttatccaacaactaactttttttagcctcattgttacctgattgatattggatttttttttttttttcattcttcttctgtacagagcaaagccgaagggatgatttagaatcacttggttacgttcttatgtattttttgagaggaaggtgaatattcttgctccttactgttctgttttcttaacgagttcttttttagtttctattgttatgacctatttctttatcagtcttccatggcagggattgaaagcaggaactaagaaacagaagtatgagaagatcagtgagaagaaagttcaaacttcaattgaggtatcatggtgttagaatgggaatatgttgattggcattaaattgtatgtcttggaatcttactgatccttcgttctttcttctttaggccttatgtcgtggctatcctacagaatttgcatcttacttccactattgtcggtctctacggtttgatgataagccagactatgcctatttaaagagactctttcgtgatcttttcattcgtgaaggtagtcttctaatttttgttattcaggacatttaattttctaccttagcagtatccacacacagcttccatttttcacttttatacattctttatgtatatatacttttggtacaggttttcagtttgattatgttttcgattggaccatcttgaaataccagcaatcccaaattgccactccccccagtcgtactgttgtaagtcactactgtattttgttggttgctagtgctctggtatatataaattaccgcgggacaaatcttaaatttttcattaccattcttctgtaggttactggtgcggggccaagttctggcatacctccagctatcgcaagtgctgataatagacacgctggtattactgtcgtgcagtttatttatacgtttaatgttgtacatagttagaatcagaatgcttgttctttatgttgctatctattcatatctattcatacaaaatactaacgtttagtaatcttttgcttattttcacgaaggcttggaagacggtagatctgcaggttgggcatctggagatccctctcgtaggagacactctggtcccatggtaaatactggaagcttgttgagacaaaaaagtccggttgcaaatgatccagccatgtcaaaagatgcaatggtaagtgctgttttatctgctttcaagagttttgccttttatgtctttgccgaggttattcataacgtcaatgcaatgcaacagtcgggacttagtttcctgtcatttcactagcgtcattgtagttcaattgcttccccttatggcacgatcatcatctaatttctgagagaactaaaactgtgtttgttcacttacgttattcattgtgcttaagctggaacttaatcagcttgtttatcctgcttaaactcgtgcagttatcaagctcacaattcatgcgctcaagtgggtcatcaaggaggcctgtcatctctagcagccgtgatccagggatgatcaccaacgagtcagatgtttcacgccctcaaaccactgatgcaagcgcaggcacactacgtaaaattccaagcgggcagagaagttcacctattgtgtcatcggagcagaaccgtacatcttcttcaagaaatgtttcgaacacaaagaacttagagtccactcttagaggcatggagagcctgaattttaacaatgatgagagggttcagtattaggagcagtcactctcaaatcgatatccgtccctctctccccactgtaaatttttaaaaatggtatacatccatccaatccattatcacgcacttggagttgaatttgctttgttctagtctacaatgtttgtagggggagcttcaacaacgctggggtttgttttttcaatcactgtaacaaagcacgcaaataaaagaaaattcagaagcagaagtggatgccctaaaatcctaccctacttaccacccaggtaaaactgaaaaagaaaagtaaaaaaaaaaaggcttttgttaatacattttgagttatattcaacctcgtttcattttgttctttttttttttaacttcttttatgtcacgtatgttctttctttgttcatcaaccattataagctatgtttgtggtgaaacaaaaatagctgtaaactgtaagtaaatcaatattcctattcctgatgcatattcaatttaagttgtgcatgattgcttgtttgttactatttttgttttactggctccctctcttattaattaattctaaatattaaacaataaatccctatttttaacaacttttttaataaatattatatgatctgggtgcactactatgatgttgaatatatatcgtactgcatattttaatgcacaagcgtgaacaggttgtgaatgcagttttttatttaaggattttatgaatgaatttgggagcctcaaaatatgtagatgattttttttttttgagagaaaatatgtagatgaatttatattgtatagatgttgatacgtttatgaataaatgaataaacaccagatataagttttgatacattttgcttttcttttttctttttaataaaaatatgaaaaatgtaagaaaatgtacaaatatcattttcctttttaacttttcctaataaataaaatgattgcctttaaatattatattgtaagtcttacaaaaagaaaatgaaattttagagttccaatttatttatattatagtttttttattcatgttaagtaaggagcgatgatactaaaaaaaatatgaaaaggtgaatatttatttatagatgtagagaaatatttagggcacacacatcacatacttgaaaatagtactatgaagagttattttgttggcacattctttattttgttcagtatttagaagattttttttctgtttttcattattgtataaattgtagataagattattagtaaattatcaaaaaaaataatagtttaaagtagggtgattttacaatgcactttttaaaaaggatgcacatgtgtactacttgtttcggcatcaagaagaattttttagtccaaattttttatatttgtatacgttatagttatttaaaatatcttataaaattttaaaaaattcagaataattaccatatagagagtaatgttcaaatagtgtatttcacacgcatataaaataaaatagttacgcgtacaacacactctttgaagtctgttttcaacgtgttaaatttttttaaatttcataaaattttgcaggatgtcttaaataattataacatacatgaacataagaaaaaatttaactaaaaacagatagggacctttttaagggtgtgcatggtagaattttctaataatttataatattaaaaatttaaatttaaatatttttgggtgattctacaatgcacccccttgaaaaagatgtactaatgcacctctacttgtttcggcatccaaaaaaaaatttagtctaatttttttcatattcatgtacgttatactatttaagatattctacaaaattttgaaagattcagaata

SEQ ID NO: 15969 - DNA, 5204 bp, Cannabis sativa
aaaaaaaaaaaaaaaacatacttatattaagccactttgattgttacgtaagttttaaaaatgtctgtagattgtaatgtgttttacattttcatgtatgaaatgaagtactctcttatttaaaaaagcctacactaatacttacttcgcaaccaaaaccacaaaataacataatttgagaagacaaaggagaaagcttgtcttcctcaataaattattgagccttgttttgcaaaatgtaaagcagacaaatctgaatttctataactgagacaccaggggcttttatttgtgtatctatggcgatgattacgcaaccggcttcaacacatacattttgcagccatgagaattcactgtagccgttatgcttccagtgaaatgattcttcagtgtcttatgctggaagaagaagatatttgttagaattaagataccttccaaagattttatgaggcctattatatttatcataataatctacatacctcccagacatctcttgcttctacaacactttgtagtgggattccaatgtcatcccattgagctgtgatcgaattaggctgaggaccgcggttgagtagaactacaactaccctgtagcctgacaggggccctgcccaaatctgttggagatacattgaaacataatctcatttgacctcctaaggaggagtagaataaattttaagagaaagcttttgatgacattacctcttgatccccttccattctgacctttttggcttgaacaccaagtgaatctattgtgggaattggcatagtgtcaaatagtcaaacagttaatgcagagtgagatcaatcagtgggaagagtacaactacaattaccttggtttacagcaatgacctctttattggcaatgatctccattgtgtcttttgtcatgttcctcacatcacaaccaataagaaggggagcctgaagaggatgatgtatatgtgactagctgaagagaaaaatctatagaaatgaaagttggtactaatataccttggaaatggcccataggctgaaatggactatgtattcatctttagtcattcctccatttcctacctcaagcatgtcaggatctgtgtagccaaaattaaaagttagcaagaagccatttcaagaatttggtaccaagaaaaatcaaactgaccattccaaccaccaggcctagcaagctctgcatatacttcattcatgtctgctcttgtgaccatactggtaaaggaagaaaggcaaaaggaatgaattggcaattttcaataggaagtaaggttgcatttggttgggaggaatgaaacataggaataagaatgagaatgaaaataagaagaagaatggaatggaatggaataaaatttaaaacacataaaatatgttaaaaagattattaatttttttctcgtctttcattgaaatggacttcctttccattttgaagaaaaatagtcagtccatcaaaatggcagtaaacatattccataggaataccattccaatactttaaaatgcaaccaaacaaaagaatgaaatgaaaattgatttatttctatttcattccatttcatcacttccaaccaagcgcaatctaagagttcaagtgaaagcttaaaaacctttcccaagtatctaaaatgtcatttgtagtcctccagctatttcccaccttagcaccccatagagctggatgcaaatctcccctaacaaaagacaaaataaaaataaatataactagacaatacaaacacaaacacaagccatatatcttaactactgagattaccattcacagagggaaaagaagattggtcggccagctttcattagagctcgggtcatcacagggtacctacatgaacaaaaagcataaggaaaaataaatgtgataaaaaagtacaaaagagaaaaatcttagacacttgaatgaggaagataactataaattgacagcagaagcagcatacctaacagtcggtttagatgcatcattgtaacagttatcgtacttcaaataatcgatgccctgcaaagacaatgcataaaatcaggaccaggaagaaaatactttatgttgaaatatacaactagaattcaaacccaagaagcaaaggttttggcatcatgctcctcatgaccaagtgaaccaggcatagttttgctacaagtaaagtacctgcgaagtatacgtggatgaagcattagcctacataggatatgattatactttccaattagtatatgtttgtgttgaggtatgtgaagtaattttaccctgcatctgaatagatacccaactttagacctttgctatgaacatagtctgcaagagctttaataccagaaggaaatgttgacttcttaggcacgagagaaccctgaaaatgaaaatattttatttagtccattcatattgaatagttctaaaaactgaacttttcttatggtttatatgaaattataccttgttgtcacgagctatttcggcccaacaatcatctgaaaatagtgagaaatgttggttgcatcagatacattgtccttaatattaggaggcgagagtcaaaaaattatagaaaaaggaaattcttgttctaatgaagatagaatgaaaggtgcaggagtacatgcctatattaacataggtatatcctagtttagaaagaccagtagaaaccatagcatcagctgtaaaaccaggtaaaaccaaaaatgttattaactacatgatatataaaataagcaactcagacacaaacacattagtttttgtatcaatattaagctttggcttctatgccttattactagtgcttcactaacctgtttctttgatcattttctcatcaatattgcagctaaagtgattccaactgttccatctgtttaaagaaaattaaatgaataaataagcaataccaatttcttaactgcacaagtgctccaaattttctacataaaacttcagcacaaagattaccaaggtgtaaaaataagaaaggaagaaaaaaaaggtaagcatgaggaacagtcagaaggaaatattctcaagaagtccaatcataacaactaggcagaaaatatcaagtagtaatggaacataataagaaaaataaaaatcatggtttgtatgcttttgccaattcattgtcatttcttataaggcaaccaataccaccctactccacctgttagctttgttggtcaaagaaatttacaaacaggtttaagacaaaacttcatactagtcagagatggaccaatataattgaaatgataacattttcttgttagtagtacaatgctaaaataaaggaatatatagcattataattaaagaaaatcaaatgaccatgttagggacttttcttctcatttcttgtgctattttcctagtagtttagaacaactaagatggtactcaaaaagggacggccttcttgctataagcacatggagtcttctaactgcacattctttcaataaacacactcctttcccaaagtttattttaactattcagaaagggaagttagaaaccttaggtgatcaaattctatcacagacaaaaacaactaatttttcaaaaatcagacaaaccattctcagagtgtgaaacccaaaagttaagcaaataaataaataaatcataagtcaatttaatgctaagcaagaaaaagttgtaagaaggggttgataagggtcgtgttctttaccccatgggaggagtcctagcaagaccattagctagcaagtttcttctgtagtgttcttcaacatcaatacgatccattcttgcagtcgatgaagtcacaacaagtgagaatatcaacaaatgaagtatcatcattgcaaccattttgatctttggagctccttcaccagaacactcagtttgatagtctctctgtgttactgtactcacactcttgtctgcttcctctgaccaaataaaacggtatcaataaattagataaggtctagttgtctactctattgcagagataagtaagtggtcagtcaaactatgtattttggggattttaattccaactctaaatatttgtaaaagtatccatcttatgattttatataatatataaatttgaatcaattttttttatttatacttttataattgattttttatttatttatgaaaataaaaataacaaaattttaaaataaaaaaaacaaacaacttttataaaataaataaaaacagaataatttcaaaatagaaacaatataaccttaaaataaaaataatattttataaaaataaaaaaaatctaaaaaaatcataaaaataataaaaaaaatacagtacacatagtaccatcttatattcacaaaaaatatacaacaaaataaaaatcaaacatattttaaatattaagacacaaaaaaattatatatgatttaaaaaatatatatataaaaaaatataataaaataattattattaaaaataaaataaaacaataaaaaaatattagagataattttttaaaactaaattaagtttattttttataatattagaatataatcataattttagtttactttgttttgggttattttcttgaggaaattcctttttttttatttgattagaactagtctcaagggtccacttctctacatctcacaaactttttacattgtttttaataagtacaatgtcatcaacataaagaactaggactaccactacattacctttaatgtatttgtatacacgtaattcacttttattttgttcgaagttatactctttaatggtcttattaaaggtgatatttcaagatctagagacttgcttcaatgcataaatgaatttaagcgcaacttgtacacacacctttctcgaatcttcccctggtaacacatacccttctggttgttccatataaatgacttcattaagattgtcatttagaaaagcagttttgacgtccatttgccatatctcatagtcataagtggcagctatggaaaaaagaatgggaatagattagacattgccacaggagaaaaggtttcatcaaaaatcgacgcattcttgttgtgtagcatttggctacaagtctagctttaaaagtctctaccttcccttcaacatttctcttcttcttgaaatccacttacaccctataggcataatatcctcaggtggagtttca

SEQ ID NO: 15970 - DNA, 2976 bp, Cannabis sativa
taatggactttgtgtgatttacctattaatgatacacattgtattgtaaaaaaaatacaagaaaaaacctaaatttgaaagctttcattcaacaaacaatcaagaatgcaaatattgttttggcatacaaattcaggccgagtggagaaagtagaagctatattacgagttttcttaaaaagataattgctcaatgagagagtagaaaccaagatctaatatatacacaagagaaaatccaatatttctaatattagaactttcccgaaacaaaataataaatcgaggccatgactcgcaagcttttgtaagttctctgggtcagagaaatatcatcacaatttaaaagttgcccacaaaaacaaaatcttggtctaagggcaaaaatttgctgcttcagtccatgcttcctccaaagtttaaaaaactatgttaaagaattatgctgtacatgccccaacccacgggaggctgtagtgcgctattattgctatcattaatatcctttctatcgaaagtggaacctatgaatcaaagtcttgggcttttccaagttgtctcgatccttgccttttccctgtgcacaagaaaagttcatcaaaaccagttgttaaacaagactatttagaattaaatctcttcaatagtagcataatttttttaaaaaaaatcaataggagcacgattagaaaacaaacaagaagaaaagcattaatgtttgttgaaaaattagtcatcacccacaaattgttatagagttccctaacaataaataggcacatttgaaccatacctttgaggaaaccattcctgctacaccattctttattgaaacattctgttttgtcccaatctgacctctactcaacatgactccacttgcaacacctttgctcttggacttttgacttgcagatgttttaacggacacattttcttttccatcaccagccaacttcttagttccagcaggtgctgttttcttcttgggttttgaagcagcaaggacagaattccactcattaactctagcaggtactaagactttagcaccagcaggtcgaaatggaacctgcaagaatcatagttattcatattatatcactcttgttcgtccaagacagcaattataggcttttgaactagtttagcctaccaaatgatccaataaataaacagcatttacaatggtttgtggtttgttaccttttgttttgcaccttcctgacggattgactttccaatattaggttgacctccaacccttctgttattagatgttccttcttcaaccttattggtagatgcgttcactatgcctgaagatttcactttactcttgactacattagccaccctcccagcatttctgctatctggggttctttctttgggctgtgtcgttgtagatgttgagatcttgacattgtatctggggttcgaggatgatccaacactagacttgctggatgtagaattacgtccctttgatggctttacgtcattgttaatctctactcttgatgcttgtctcataacacgactctttctaagactaatcttcataacagacaaaagatcacgtgtgtgaccaaatgcttggcttgacacatccacaattttgatctgttgtggctgaccactctcagatgtaatggtgcttgttggattgctttcaactgctttgtttgcctcagaacttgaacagcttccaggatccccacatgtggatagagacctagagtaattagatacagccttgcaacttgaactgctttgacagactacacttgattttgaagtggatgtttctttcgaatgtataaagctttctttgggtcttattttggctccagaacatgacaatttcctactcagattcttgaccggatgtgacttatcaaatgcaaaatcctgattctctcctatccattttttgctcttatattgttttcctcttgattttgacacagaatttggaaggtttggtgaagatagtctagcttggtctacatctaggcgtgtagtaatctcttcccctgattgggaaaaggctgactttaactggagagatgagcattggtggaacctaatagtaacataaatttacttgaagatcagcattattgttccattaacaaatgggttcgaggataattaagaaaaacagctcaggtaaaagtgaaaaggattcttactgatgacttgtgttaaaccacttatcgtcgctgcattttcatcacaacaagaaagataagggtttttttttttttttttgcagaaacaagaaagataaggttggtaccaaatgcactacgaaagtttgtgggagaaaaaaaaagagcattgaaactgaatgcataagaaactcacatgatttgggtattggacttagattccaaattgagatcaacccacataggtgcctcaatgtcttcctgtatcaatcagcaaaagaacatttagatgaaaatagtttttgtagcccaaaaatatttcttaaaaagaaaatatggcttcaacagtgcaataaaagcaaaatttaaaatgaaatatccttgattttggagatattgtttgtttggtcggcaagaaaatatggcaatgcgagcactaacctgtgcaacgtctatctaaagagattaaagaacttcaaccaaatataatatacgattaagcatataaagaaaggacaaacagtcaaaatctctaattcaaccagtcaagcaaaccaacaaaatcaaatgaaatacagaataggcgtatagattagaaaatccaaaaccaaatgaaagtaaaatgaagcttttgacaacaacctatctttgaaataaatctggaaaaatgaaaattatggaagaatcaatccaagattcataccagaaaagcccaatgatcatcattgtatatcataaaagccatttcttatcttctgtaatctttacttcgatactcggaatcttcaaacctagctca

SEQ ID NO: 15971 - DNA, 3713 bp, Cannabis sativa
aaggacaaaattggtatcaccaaaaattaaccaaggaccactgaatctatctcctaaagccatgatctcagtccaaaaattcttttttgcatgattgtagggcgggccatacacgcacgaaagaagccaagggtgggtaggaggatccgaatacacaagccccgaaatatggttacgagagcaagagatacattcaaagcaaaagccagccttccaagctaaaacgatacccccagcaataccaataggcggcacaaaaatatgaaaataaaagtgaagagcttttagaatacgtaccaggggggtggcatccaccttgagctcagttaaaaacacaaaatcaggagagtgcaccctgagcagggacttcagctcctgaactgtagaggtctgccccaaccctctacagttccaagcaacacctctcatggcgcctgtggaggagatctgacattctcctccacaggggtaatcgagtgagcagataagctggggtcagcttcttcaatcacagaatgcttagtgtgttcattagttacagaagaaggcgccactccaaaaacaccacccacattcttgatctcgtatagctccaacttcccaaaaagtatacggacataaagcaactccttatgagttttaaataaaagagacaaggccctccggtcctctacaaatttttcctctatctctttaccattagaattggcaaaaagaatctcctttcctaccaaagcccctccactcccaagggtggaaccaaccttgtcaaaagacccacccaaatccacaaagagtttatcaaagaaagtgcccaaagcactactccctatctccaaatgacccgacccaagcacatctctcgtcccactaccacccaaaggcatcacaataagctccaaaaaaataatcaaatccggccctatagaagcacacggcccatttactaaaaagaaatccaaacccacacaccaactaggcccactactcaaagtcaacacttcaccaacaccctcctcaacacccataccaggcccacaactaaccttcactacccccctcggcccaacaaacacatggcccaattcaaccaaaccaaataaagacccaacgtctaaatagtccccatcaggagaaggaataccaatgaccaaaagatttgtcatatccaccaccagtgatgcaggcactaaacagggaaaagtcacagcaacctttccctcaacattcaaattcaagccaaccctattaccaattccagtaaatctagaaacccgaccaactgacactctctcgggcacccacatccgatgcccaccctggtaacgcacagccaaattactcccagaacctttcctcctccttcccaaaactcgagacgagtcggacatcggccggacctccgctccaccttgttcagaaaaccgacgaccaccaggagcgacccaacccgcctgtgtcccagcagacgagaatggaacatggaaccgagaagccgaaggcaaccgcataccaaacaaagggtgcttcgagccattaacctcctccaccaccatggccgccactgcactaagacgaaccgcaaacacgcacacgaagcagaggagaaagaacaagaacaagagaaagaacaagagacccaggaaccaaaggaatgaaacaaaacacgcacacgggacaaggctagaaagaaaaataaaagaaaagctagggaacaagaaacgggatcaaagccagaaggacaaagccaaaggacaaagccaaagaacaggaagaaccacgacagagatagtaagagactaaactcagggagagatagcagtggaagaccgcttctccaagctccaccaccactactccatgctctcagggacgaggagactttgcatagcaaagcacggaagacgtcgaagaagaggaagaagctctggcgaaaggtgaggtttgaaagcggcctgagtcgccgccgggaaggcggatgtaggcgatggaagccatgggagagtcgttattgatgagccatgagtcgttattgatgcatggtgggacaagttatgatttttccttttcctaccctctacttaactctagcacataacttatattaatttaagggtataatagaaacatcatttatgaaaatagatatatatgaaagaatataaaaataaaggtaaaaattaaaatagataaaataaagtggtatactatataatttccccaagattaaaagcaaaggaattactaaagaaaacaagccacatggggctttgcatcaggttgttatgagacgagatggattgggttataagaggagagccttagggttctatttgcttgttgcgtatttaatactcaagaatttaattctctggaaaaggcttgttgattggtccataatcagagaagatattgctccagaaaattattttctttctcgggcaattaaagctgtaactcaagacattcaattaagagtgcagtgcacatcatggtgccttgacaactatgcatgggttgctgaaccatatgatcatttccatcaactcactcttggaaacattgaagcagtgaaaaccagtgccaaactgtacagaaaatgggatcaacctgcacatttttttccgcctactgaaggactcccttaaatgtcatcctactgagtttgctctaagtgtgattcatttgctggcttggttttttgacagaggagaaccaaaggttataaccacaaagattcaagttgatctccttcaccttcttgaggacaaggtgaatttcgggcgaccagtattgttaggccttaaagataaataaaaagggtacattggtcattgtaataagagtattaagatagtgtatatgttaggggtcatttggtatgcaggttttatttcgtgagaataggtttaacattacttggagagtgatgaatggaattgtaaacctagaaaagcaacattaccgtgtttgattgtccagagtgtttggttgacataggaatggaatgtgacaatttttttttcacaataataacttgattttttttttgtaaaataaaaataattcagtacttttttttctttccaagtgttcaaaatactttttatttattatttttatataattttataaaaaaaattaacaataataaatgattataaaaagtaaaatatatatatacacttgtcacaaacaatcaattgcaaaattaatttgttaataattttttcaaaaattaataattcaaacaacaattaaagttctttaacacataatagcatatcttaaaaatattggttaaaatcactcaagaaaaataaatattgattaaaattttcaattctaaaagtttgcatattatctagtttataatccaaaagatggctattatattgccaaaagtttcatccaaaagattaaattaaccagctaattaaaagtttttccaaagtaaaacacatataaattcaccctaatagtattttttgaaataccatcaactattaaatctcaccttacttaaacaaaccaaaaacaaataccaacttgtattcatcatccgaagtaaataaaagattcgtacaaattttggacaaaaagttttctagcttcaattcgttgttcaaatgacagtccttcaatttttttcagttcacgaacaatttcagtcttctacttgcaccttctatctcgaactgaaaacaatttgt

SEQ ID NO: 15972 - DNA, 2606 bp, Cannabis sativa
aaccttcgtcttttgatatgtacacatcttcgactataaatgccaattagagaaatttgtttgccaacttgattcaaatgttataaaaactgtattctgtttcaatcatgttggtgattaatagatcgatcaatgtcgacatttttatccaattttgtgatctttcttcatagttcaaattcgcaacctcaaaagaaaattttaacatttttcttattccactactgccaaaaagaagatgagataaccttcatattggtagtgacaaaagtgccatgaaaaagcaacataaaggttgggcaaaaaagatgataagaaggttgaatatgatagatttgataagggagggaatagaggtaaaactagttcttacagattaagagctcttttattcctaaagttaaggtcacaacaatactaaaaacaacaaaggctgctgttttcaattgaagcaagtcaaaaaaattagacatagccaaccaattataacatttgctatggagacaatactgccctactgcggattctgcttgatcgcctaactggagttgctttagcttctccttttctgctgcttgatcgctttgctgttgttggagtcatcatctcattatttgactcaccatcctgtatttgatacaaatatacacacaaattatatcaacaatcataaattaattgtaacaaatattaaaggtagtggtttaaaatctaagaactatattggaaagatgaaaaaagattagattttgggagaaacttacatctttcttattcccagcatagcttccttgtgaaggggaatcatccgtgacagaaaactcagagtgagcaggttgggattgaatagaaactgaatgagatttatcaccaaagttctctgtagaaaatgaaaaattgctttcttcaacttctgttctcctgtttttgacaccagagttcctaatatctctaaccacaaactcgccaagaaattcaactgatggggcgtggggttgggtatgatctctaagagagacaatttcatcaatgagctcatctttcttattgggaatttcttctttgcatttctctattttccaagattcaaaataaggctttgagggtaaaggattagaatcacctataatgatctcttcttcctttacttgaagaggttcagtgcaagggtttgctctcaaccggaacctcaaaaacaaagttgcgataatcgttgaaagtatcaaacccgcaacaagaattttgaatgagaatttagtttccatttgcttcagattctcatcgtttaacttggtatcagtatccatattctctgacaaaacaacttcctcagtaatgcttccagttacatcctcatcttggcttacttcaatgtcattttgctcttcagagaaagtcagtagctggtaatcttcagtgggttcaagaagatccatagagaactcatccatgttatcttcaacaatggacttattttcaccttcagcaacttccacagcagcatcatcatcttcgttcacttcatcagtactttcaatttcatcaaattcaatatcttcatcaacatctacatttccctcttcctccacattagaatcaactgcattcttaaaccagatagcttcaaccatgttttcttcctctaaccctctatcaaaatcactcttctttaattctataggatccccattttgtgaaattgtatgattctgcatattgcagtaaccactcaaagtgctctcatcaaacctcaaactagacataggcgtcgaagaattcatggaagatataaacatggtagagagaactaaaacagctaacaaaaataaagatttgaatagacctttaaagttgcaacctttatcttcctcttcctctttttcctccacaatttcgtcttcatctctttcctcggattcaccaatagctccctcaactacatcatcttctttcttttgaattattgaagatgatggtgaagaagaagaagaactgccaccggagtcggaagcagcctcttcctcatggctggcattcagagaatcaagcgaaccacttctactagttaacccctcttctttggcctctccatcttcaatttctctcccataaaagatcacacggcaatgtcgcctattaggcttgtagcggagaaattgaggcctcggagaaagataattggttaaaggatcataaggcggagaagaagccagatcagcagatactacaagagcatcttcattctcctcctcctcaccaccaccattcgattgtgacaaagactcatcagagttatcaagaattgatatcttttcgaatttagtctcaaacgaagaagatggttcggaagcctcgttcctgtctcctaagatcttctttctaggaaaatttgccttggaagctgctgaaatagttgtggacatgtaatgctttggcattggttttggattgttctgcaaattgggacttgtttgctgatgatactttggttcattttcatctacatctatttaagaaaagaaaaaaaaaacatattgttagttgtttccattagacagagtgtattttatgagactaaaaaaatctcgtttggttgcaagttatct

SEQ ID NO: 15973 - DNA, 2088 bp, Cannabis sativa
aaatttcatataaaatcacatatattgaactatataataatataatttctcaattattcataattatttaattagggctttgctaatcatttttttaatttcgggtattacaataaagcaattaaaattacactccctagtacacaacacaggtggtgcttgtagagaaattaattacaattgtcaactatttaaatttaggttaatcttgtaccgacatgcaattttagttctcatccacaataaattaatttttcatgtctcagataagtatattttaaggcgatggaggaaagatgtgaaaaggaatcacacaaagataaaaataagacatgacaattgtggtaacaaatcaaaagcacatcgttttgatcaaatgtgtaacttattttataaaattataaattttgcagcagatgatgagaacaagtgcaatgtagttatatagaaatgatatataatcttactaaaaaattgtgtttaaatgatgggaagtcggaaaagagtaataagaaacaaaaaagatgaatctaatattgaaatatcaaatgaaaattgtaagattcatatcctgtgtgcagtttgaagtaaaggtccttccccatttaaacgaaagtaatcaatagttaacaaaattattcagaaaagaaagcaaaaaaaaaaaaaaaaaaaccttattgtcgagacaacaaagcaaaaaaaaaaaaagaaaatgttaaattaattcagatttttcgaataaatttttatatcttatctttatttttttcttcaattttatttgttatgatatttttgctatgttttctaatgataaatgcagatttttcaaactcctcaagttaaatgtgaaagtggataaattcttgaaagttcattcacttgcaagcaagtagtcaaagatatgagttgaataaacaaagttacttttgaaaagtactttctagtagggctgtacatcggtcagtttagtcggtttatactacatatttttaacccaacgtaaagatcgggttgtaaaataaaattctgcatgcaacctgccaattcaaaaaaatatctgaacccgaccgacggtttgggcagtttggtcgggttaacccgcccaaaccgaattaagaggaagggagcaattagctgtacaaaagaggaataattacatgagttttatgagacacgttgtacatattctctatgtactggttatttgattaaaataaaaatgccttcattagatgcattaatccagattccagcatccacttttgtaatgtaaattagtggtttaattattcccttatgtttattctggatatacttgacaatttgtgcttaaagaaattaagtatttagcttgtgggatatgatatcggagacccttttgcacaaaaatttaaaggaatctacgtacatgttgtagtggaagctatctaaatatctattgacaacaccaattaacgtagtatatatgcatacatacatcagccgaaataattaaacaagaataccaacagagctgctacactggaggttgggtggttgactattggtgctgctacgctgcctcctctcccgccgctcgctgttacgctggaggtgatgacggtgatggtcgttgcacgctgttacgtcagaggtgatgacggtgatggccgctgcacacgaggatgataatggccgccacacgcgaggatgatagtaggatacgagagagagagagagagaggcgggctgagaaagaattttagagtttggaactttttttaatatatattatatattattatatattatatgatatatatatataaaataataaaaaaaaaggtgaaaatcaggttaaattgttttggtcaattttcaacccgcccaatttactgggcggtttagaattttatcgagttatgtcggtttgtattttttatcaattttgtcgatttggtttggacggattatttcgagttgggcggtttacggaaatttttgtacaaccctactttctagtacctctttaaccatttagtttgacaaatatatagaattggaataattatattatttttgtttcaagacgtatcaacttttatc

SEQ ID NO: 15974 - DNA, 5758 bp, Cannabis sativa
aactatgaaattgaaaggttaaaaaactaagaaaatgtaaagttacatatgaaccggtcaatattattccccccaactccacatctctttgtcatccatcttaattaggtctaatcccatccattcatccattatcatagtggtagtggttagttgttgctgtaattggacactaataaaatcatattttgactttaaagagctagtgagtttttcttgtcatctcatatatgaacacattgacttgaaagaaaggaagatatatagcataatatataaagggaaatattggtctctaccaaattacaaatataatttagttacaaaaaaaaaacataagaccatacatacatggattttctttcattattagttttgatgtttttaacacttattgtactactctctcatgctcaacaaccttcttgctatgatgaagagaggaatgctttgattcatttcaaccaaagttttaaaatagattgtgataaggttagatcaccttattctgatcttattctccatccaaagacattatcttggggatcgaatggtactaattgttgctcatgggagggtgttgaatgtgacatgttgaccggtcgtgtcattagccttaacctcagtagttcttgtctctacggttcaatccattccaatagcactctctttcaacttgttcatcttcaggagctcgatcttcattataataacttcactttctctcctattcctaatgctataggcatattttcggagttgaaaattctcaacttgcgatcttctttctttcaaggtcagattccattagaattttcgcttttgtctaagttgtcttttcttgacttgtcatataatgttggtggtaatgatccattacttgtgaagcttttgaaacttaaaaatcccaatcttagaagcctagtcaaaaacttaacttccttagatactctttttataaattatgtggatataggttatgaactaggtgatgttttggcaaatttgacttctttgagagttcttggtctagggaattgtgggttgtatgggcctattccatcttcacttggtaaattaaccaaacttaatgctctaaatctcaaagaaaatgatttcattggtaccatcccatcttctattcagaatctcacacagctttttttcgtaagactaccaagtaaccagatttccgggccaattccttcttggtttggaaatcttactaaattaacatacatgaactttgatttcaaccatttgagtggttcgtttccaccatcattgtttcaactcaatcgtctcgaaacactctcgcttcagggtaacgatttaaccggtacgttgcagttggattcttttcttaaactgagaaatatcatgatcatcgatctaagtcacaataaaatttcgttacacgttgaagaaacaaaaaaaggatctcctaacacaacactttcaaatttaaaatatctatcgctggcttcgtgcaacttaagtaagtttcctgaatttattgctcatcaaactaatcttcacttattggaccttgcatataatagtctatttggtcaaattccccaaaatctaatgaactcaagcattcatagcttggaagggatatatttatccaacaacttgataacagggtttcataaccatacaaccattctaccttggtctagtctgcatttgttagaattgcaagataacttgttccaaggacaactaccgatcccgccatcatctgtcatacattatgatgtctctaataatattctcagtggtgaaattccctcagtgatatgcaatttgagttcaattttagttcttgatttgtcaaataataacttgagcggagactttccactttgttcgggcaatgggattagtgattctttgttagttttgaatttgaaaaacaactcttttcatggcaccgttcctcttcaatgtcagcatgaaagtgagttgagaatggcagatttcagtaacaatcgttttcaaggaaaacttcaacgaccattcacaacttgtatgaatcttgagtatcttgatttctctttcaatcaactcagtgatgtgtttcccagttggttagggagttttccacggttaaaagttattttgatgagggaaaacaaatttcatggagttatagggaaacctcaaaacactacgagtgagtttcagatgctgcaaattattgatatgtctcgcaattatttcatagggccattgccttatgaatatatgttctcttggaattctatgaaagctttcaagatgagcaatttgacatatatgaaagcatgggaaaatatcaccgttaactcaaatgctattggtcaagcagtcactggctatgattattcaaccacaattgtgatgaaaagtgtggcaacacattatgggaagattccaataaacctagccgtcattgacctatcgagcaacaactttagtggtcaaattcctaaaattattggaagcctcaaggctctttactcactcaacctctcaaacaatgcgctcagcggtcacattccaccatcactagggacactaacagagttggaatcgttagacctttctcaaaaccaactgtcgggaaaaattcctcgtcaactagtagaactgaaattcctccaaatgtttgatgtctcttacaacaatctcacaggtattataccacaagaaaaccaattccatacgtttgagaacaactcatttgagggtaatcaaggactctgtggagaaccattgtcaaagaaatgcgaagcactgctcccaccatctgcttttaataaagatgttgcttctgaatctgcaatcgaactcgactggaaattcattttggcaggacttgttagtgggtttgctattggagtctctcttggggagatagtgatcccaagaacgcggttggcgtggttggtttacatctctagaacaagattgagggaaatgataatcagaaactgagtgtgtatctacaatagctatttggtaagaaagtttttctctatgttatttgttatgctataagagtatgtgcaactaaaattggtttgttattggcttcagatttgggtggagtgtgagacagagaatctagcagaaggttgaaagactgcaaagttttgcttgttttacctatcttttttgtgctatttttccatattttgtttccttagagaattgtggtattatgggttttgcttattgttttcatttgggttttggttttgtacttttttaaagggcaaatgactctttcaagttacatgcttttataaagtttgatctttgctttctaattgctatatgtgaatgtcaatttctgttttgatttgcaaaaggattcaaaataattcaataattaaaacacatattgtcatattgataagctatgctcttcatttgagtgtgttgtgtttcaatactagcacgagtagtcttacaagtggttttcagcatattgggaagacttattttaaaatgaaatcttgctaatttctaaagaaaacagaacaccatatgtgtttcaatggtttgtattgtactgtttctaattcaacaagtcacaaatcaaatagtaaacaaaaataaaaacagaggattatgctctctaatctctaggatcctagtatgcattataactggtcataataattatagtctttacagttcaaaacatttgaatcatgcttcaagtaacacaacctattgttaagaatttcctactttgtatcatgttcaaagaatgaataaaaaagaagtattttgattaattataactctgctacataagcttgttctttgtgtttcaacaaattcaaaatacagaaagaatacctgatccaaacaaaaacacattcagaaaggaaatcccaagttgcagtttttcttcgaggtcactgccaaacgcttaatctctttcgcgtttatgtaaaactcgatcaattcatcggcaacttccttaggctgacaattcacaaatgccttgagaaatctcttctctgtcatccttaatgctctcaacatgtcacaccctttgatatgcaattccaaagccatgtctttcatcttctctgcgagaagaaaccgaggtttcaaaacagcttcgaggttacaatacaacaagttcgggtgatcgaggacacttgaagccggaaacttcattgttcctaatataaaagtcatgtttctttgaactttatcaactgataatgtcaacaaaagaggtgaccttcccaaaagccgaaaaacctcttcttcactaaacccgaatttctcaaaatttgcaatcttactacgaatggtttcgaggcgagaaacaccaatgagtgtgacaatgtacttgtacatcttagacttgtgggaaatcccagttttgtgtatgtattccatcttctcatcgttaaatgaagttcgcgggatcaaggtcggtcggagtagaagcattgcagtcaaatccttcttgcttaatcccatttcttcatacaattctatagttggtttgattttgttctgaaaatcataagtaagcaaagaagggttcctaacaatggctttgataagtacttcattcgattcaaacaacgacattagataccgaagacgctcatcgaaacaacgattaatacgacaactaagaaatctaggacgacagttaatgatcttaacaagttcagaagcagtaattcccaaaccactcaaaagactaagctttgactgaagttgaacaagatcagcattctttaaagaaggtcttctaataaatatcttagatacatcatcttcattacaaccccaactcctcaaaacctcaccagaaccctttgaatggtcctcaccttcatttttaacattctctgtttcagcttgacaattcgtcgaacagttggtggtcgagcaaaatacacgtttttcagacactaatctctgcgaataagagatcaaatatggaaaattgttcgtaatagaactaaccttaacgaaaaaaccaagcccagatttcatagtcgagctttttcacaatgttgagagttgttcgtatagcaataaaaaagattcgaaccttttcaactacgagtagttaacatccaaaatggtgaaatgggttcgtctgaaatcgaagttgaatcgtgttggaattgtcttcatcggcatagacttagtttcactgaaaaatttgaagcgccaaggtccaagctttatgaaaaggtttcacttttgatgactgtgtaatgggtgaagaaaaagagaatatcgtgtggaattgttgcaagagaaaggtgagaaattacgagaccatgtgagtgagtgaatgagactgagagtagttggtatggaaggagatcagagttgagtgttttaacgaagaagaagatccaaaccaatcgtgatattggctatctgagttgagtttatttctctcttaaaacaaattaactctcacttataaaaaacggtaataataaattataattttaaaacttacctaattgttaagtatgaattaaattgaaaccacaatctctaattggtccaagacattaaatttttactttttaaaaaaaaaaataatttaaatatgctaataaaaaaaatgacatgggaatatgacttaacatttaattgtcagatacctacagaattctaaaagggtaatttacgtcaaaatctcctaaagtggacaggtttttacaactaaccccctaatttaaaattttggtggtaaaattaccaaaac

SEQ ID NO: 15975 - DNA, 16257 bp, Cannabis sativa
aagttgggtcttggggggtcacccaacgatggtggttgtcacccccctcaagttggatgtccaggggtcacctagcgatggtggttgtcacccccctcaagtcgggtcccagggggtcacccaacaatggtggttgtcacccccaacttgttgggtcttgggggggtcacccaacgatggtggttgtcacccctaacttctcgggtatagggggtcccccaacgatggtgtttgtcacctccttttcaagttggatgttgggggagtcacccaacgaggatggttgtcacccttgtcaacaagggtcctggggttgttgcccctaagtatgggcttcatccgcagaggtggttaacgaccatgccacacccataagggaccctcatcatgagtagctccttgaaatgttcaaatcccatgaaaggctcaaagacagttgtcaattcacaaaaatagtgggatattatgataaaaattagactccaactacctccgaaaatcaaggagacggttgagatagcttcgcgttggtcgcgtatcatgaagcgagaagcaccgaccccctcccctatataaagggtcacccatgacctgggagggggatccgcaatctcaaacacttctccttctttacaattaagagtctgttcttgacttttgcaacttagacaataaaattcaaggggagtaggctattaccgacacccggggcaaaacctctttaaattctggtgttttttttatttacatttattgcaaattctgattttattaactgcatttattattgtgattttggtttaaatatcatttattacgactccgcgtcggtaggctaaaaatccagtcaacattaacaaattaaaaaataattaaaaattcaataaagatataaaattatttttaaaaaaagttacaaattaaacaaaaaaatgttatgtttacttaaacaaatctacatttttcgataaaaacaaaatatattcaagtttgttcctgaaaaatttaatttttagtatatttttacaaattaatttttaatatctaaataaattttcttataataaataaataattttttatatcgcgtaattaattttaaaattttaatttattttttaattttcttaatcattcaaaataatttttcttaagatctaagttaattttttaagatttactaaaaaaaaatgttgaatttttctcattttaattttgaggcggtacattttgatagttgtaaaaatttagggggcaaagttttaattgataaagatacgtcatcatttaaacagaataatgggatagaacctaacaaaaggactaaatttctataaatgtaatagttcagggaggattcttaacaagtcatatattttaggtgctaaaattaatattgtcgaaagttctgggaaaaaaattactaattattctaattattatttaatttttattttataaaatatatattagttgtaatcaaaacaccaaatacaaccttccccatgtaatttatatcatataagcatgtttagctaacacagtagctagctagctactatacgagctaagcatgcatatgtgatctttaattttttatatattttttttaaatgtgaatgtgtccttttttatatatattatattagtagcaagttgatattatatatatatattttttatttttgtgtaaattatattgctcaacaaatatcattaacatcatatgcatgcgcatcaccataaaaaataaggcctgctttaattctattacaaattagcaaacccttcactatctattaattataatttttttaaggtaccacctctcactctatattttacatcttgtttaattctgtttgttagaataattattgtaaaatcatttgataccataatgattctgtaagggtcattattttgatagattatattaatagtgagtccagtcatatctgtggttttaatcagttataactgcataccagctttctgttaaagtttatgtgagtctgatattttttaactgttggtattaattgttcttaggtaggttgaactattgtctatatatagctaatttcattctgtaaatgagttagctaactaattgatattttggttagttcagatatatcgtgtgagtttgtgtgtggtatcttgtattgttcgttgttgtctttcaggtctgattgcatagcttggagatggagatccatagcagaagggtcagagcctggtgttattgagttcacactgaagagagttcagtgtcatcttcgtcattagatctgaagggatttagactgaagaaaagtgtcgaagacgaacttagctgctacataagggatcttgtgcaaacaatcaagattcttggttgttattggtaattcattactaattactgtaaagattgtattaaattctaaattgtgaactggagattgtaatacgaatcttttagatttagtggatgttattactctggttcgagaaactcaagcactagtcggctcaaatttgttctcagtgcagacgaagcttgtaaatcattgtgtgctttactgtatcttcaatccgaatcttgaatgcataagttgaaattaaccaatataatcttgaacaactcagtaacttaaatcatgaaatttggataagttgttctttcaattggtatgagagcttgaaattttctaaaattttgtgttagatcctagacttgtctgattcttgattctgaaaaagtcagttgatatgtgttcaagatttgatcagttgatcttgttgccaataaccttctctgagttccttctcagagaactatagtacaagagtcttttttttccttctctacagaatggaaatgtttatggaaggtggatcaacctcgaaacctccaatgttggagggggctaactacccatactggaagactaagatgcgtgcattcttgagagctattgatgaaagagtctggatgtccatagaggaaggatggtttagacctacaatgatggagaatgaaatggttattccgaaacccatgagccagtggatctctgacgaaatggaaagggctaactttaactcaaaggccttacatgcactgtttaatgctgtctccacaaaccagctaaaggtcattgctaactgagaaattacaaaggaagcatgggagaagctgaaaataaaaaatgagggaacaaatgctgtaaagaagtcaaggctgcgtgctttggctaaggcacttgagaatctgaccatggaggaagatgagacagtgcctgaaatttatgcaaagttgtgcgatatctccaatgagtcctatgccttgggaaaaacctactcaaattcaaaactggttcgaaaagtacttggagttctcccaataagattcatgtctaaagtgacctccattgaagaaataagaaacattgaggaacttgatcttgatgagctcattgggtccttgcagaattatgagctgtcactgtccagatggaagaaaataaagaaacagaaggatgcggtcaagaataaatctgatgtgagtatagctctcattcattaagaaaacattaaaccgacaatagaggaatttaatggcattactgatgagactgttgccctgttaacgagaaattatgccaagttcttgaaaaagaactacaagaagaattgtcctgctgataaagaaaattccctcaagaagaataaaggtggaaactttaaacaaggacaaccatttactgatcaaaagaatcgaggaatcaagtgcagagagtgtgacagatatggccatatccaggccgagtgcacaaacaaactcaaaaagaagaaggcctttgcagcaacatggagtgacaatgaagaagaaaagaactcaactgccagtgaaagcacggaagaggataaacaagtattagcattcatggcccaaagctgtcaccgtgagtctgaagatgatgcagtctccattacattaaaagtagacagcgtaggtagacaaaaagcttatgaggaaatgtttgcccaatgggagtacatgactaaacagatcagaggcctaaagagctccttagagcaagtggagacaaaaaaaggcaagttagaggatacggtcaagaacctcaacagacttcttgatgagaaggataatgagatttataagctcattgctgatctgattagaactaagcaagcactgtaattcattaccccaggcatagtttccatcaatcagaccctacaacttcagaaaccgtatggtggtcgaacctccttaggttataagattttgtttaaacaacgcaatgatctgtatgttgagaatccactcacctcaactgtagatctgaccaaaaaaggaagatgaggtaccagacatccttaccactgttaacgaatcagatccctctgagaagagacaagttccatctggactcactaaactgaagtttgaagggaaaaggattggtataggaaatctggctcaaaatgacaaattcattccaacatgtcatttctgcaataggaaaggtcacattcgccccaagtgctataaattgtagaactacttgaaagcaatgattaatcgaccaaatagttttcctcaaccaaacaaacatcgagggcgtgaacctcgtcgagaatggaaagtaaaatataacataagttcaaatgttggattggtggctaacctgtctctgtcagcctttgttgaggggcaatggtattttgacagtggatgttctcgacacatgactggaaataaaaaactactggttaattacaaagaggaaaaggagggggtcgtgacatttggtgatgggaacaaaagggagattgttggcaaaggtgatgtaaacctgaatagagtggcctagttaacagatgtcatgcatgtaaaaggctcaaaagccaacctcatcagcattggtcaactgtgtgacaacaacttcaacaaagggagacttgtgcttgagattgggggtaggtgttctgttaatgaggtaggtggatgtgttaacacactctccccaataaggtaaatgaatatgagattgaaaaagcaatgctctaaccacattcaacaaatgttgatgtttcctctcaacaacaaaattttattaatgtgtttgaacacatgaatggtgatgtataatgccaagggaagtaaacaaatcaggaaattggagttccttggcatagtcaaatataattcctttaatattggcattgtattgggttttgacaagttgaataaaggctggtatgacatgttgtgcgtgagacttatttttaataagatgaatctaagtatacctagagcaatcatccacaaaggtgataaaatatataaaaccctcaacggtagacacatgataaggaccccaaatgtctatatgaatcaaatcaaaacaagccttagcaatgttataattagacacaaaagacaattttttttgtttagcaaaatggcaattgaacaatgaaattcaaaagagccagaatattaaaaatgaagttctttattcaatgaatgagtttttacacaagaggcatgtccaagtctataatgccatatagtatcatcattaattttggaatctaaaattgaaaaaacaatagctaatgcattatgtttcaagacgtagagttgcccaacacgttcacccatcctaatcacttgattcttgcaaatatcatgaatcacacatttttttggaaggaaaagaaaagaacagttagaggagttggaaaaagatgtaacacatagcaagttacaatagaatttaggagcataaagaacattagtgagaataaaattagacaagtgtatggttccaacaaaagaaactgatgcattactgccatcaggtaatccaacattagtgattttaggattattttgaacagtatgaaacaaggagggatcacaacaaacatggtgtgtggcaccgatgtcaattttccaagtagatttaggaacacaaaaaattattaccagaaatgtttgaaacaataggttgatcattaggctgagctagggtactggtttcttggactttctgtgccagcatagctataagtttctgacatttagaagagaaatcatggtctctaggaggtctagcatgattgtcaacatgtcctgaaaaattggctgagggttgatcatgttgatgattctgctggttacttggcttattaggaagatgtctaggcaccttccatgtaaacgatgccaaggagggtacccatgaagtctgtagcactttggtgttgtatgtccagaaattccacaatgagagcctcttggttttccattggtctgactacttcccccacgatttgcttgaacatttccaggaaactagcctgcattatcattagtagatttagaaatctcatattggtgattagtgattctttgtctttcttcttggatagccgaggcataggctttgttaatattagggagaggatcttgaaggagaatttgggatcttgcactggaataagactcattcagtctaatgaggaactcaagaactttatcttcatcttgatatccctgaataatcttcatagcaccacatgaacaaacaagttgtgatctatattcttgcaaaagatcctaaagacctttgagacgagtatagtaagaagtgacaccattagatccttgagctaacatctacatcatccttctgaccacatagattcttggagcattcttttgctcaaagctttcctacaattcataccaaatgcaagaagcatcttccatgtacattatacattctataatggaactcgaaacagagtgtaagatccacaaaatcactatgctgttacatcttgtccaagcttcataatcttcatcctcttcttctggtgcagaaagttttccatcaatgagtttcactttattcttggccgatagagctaccatcatggaatgacgccaagaactataatttttcagctcccagtaagaatctttggaacaagattgacacacggattatctccatgggttaagaagtaaggacttcgaggatcatcaggagcttcgaacactctgattaagaacagaaaaatgattcgaatcaccattgttggtggtactacgagtttaagttccacctcccctggccatgatcgaaaaacaagaaacgagcggaagaagagaagagcacacttaatctagcggctctgataccattttagtaacaagagagggaagaaaatgtaaattttgattaattgataaaattggtacaatattgtgtatatatacacaaggcagtagagaaggaaaaaacagagtcggttaagactctaactaactcagctaatatatactcacacttaactaacttagtacaacaaactcaagctaacaacatatacacacaacaccttacaatctaatattttttaaacaaaaattcagcctatttgagtgttatgttttagttttaatacttcttttaatttttaaaaatatatttatgcatgtccattagttaaacaatgagagttgagttcaaaaaaattaaaactgggagttttatcacttcaatatgattagaagagagagtttatagtaatattcccaaaaacggcaatttaatttcttagtagccatacataatactctcgagagaaaagtatgttagaagttcttttcttttgaataaataaaaaataaataacgaaaagccctatcaatataaatgggtttaaatgaatctaaagagtcgaatgtagtgaattttatggaaataatataaatgtgttgtcattttgataaggacaaaattatatgtgcatggcgtgtaggtaggtggtgacagcaacaaggggagggtatatcggtcactttaaagaaaatttaatgtatcagccgtagtagtgcggtcggtaaggctgttgtattcatagaatcatatatatatataaatatatttatacactttcggttgataaaccttacctgtctagccggtcactctctccagtctccagtctccactatcacacaccacacatatatatcacatatattcacacaacagtttatatatatatatatatatatttaataaattatattgaaacaattggaatcaaacatataattatggtggtggcggatttaaagactggaatagtactagtgtattaccaaccaaagaaaataaataaataaaagaaaacaaaaacaaataactcgctacctatatgtatatatgtgtataaattatatatctacactttaaaagtttgaaatgcttgaatttttggtggggtggggagcaaatactattattcaagctaatcttagtgcttcttatctccacaaagttcgttctcacccaaattgaattgtctcctactataatttggctgctcatacatttttagaatgtatgtctatggacaccttataatggatgaaattacaaattattagaagcaatttttttagcaatatgcaatatagtatttctaagatgaaactatgttatatcaaaaatttgtacatacatataaaatgagtgatatgatgtgtttaattaggtggatggatatgagcctaaataaggcactaaaactccatagcttagatttagtgacctaaaaacgtgtttcccatttttctcatggaagtgacttgtttttctataatactacttggcattatttacgttatctgacaacaaaataatgaaaacaagaacaagaaaatcacatagaaaagactagtattggtgagaaaccatttaccctaagtaataattctgaggtctatagaatcgatatttatagatcgataaagaaattggcactttaatagatctacccctaatatataagaacaaaattagtcacttgattacgtagagatagatcatcatgatcatgataaacacatatctatatatatatctttggaaccacaaagacttttttggagcaaacatgaaagacatatccactttaagtggcccttaaattctaaggttcatttcattgtgcgcatattaacgtacatacgtgtatacaaagatcattatacaattggtataccttctaggccttttcccaaaattcatcgtgggttcctggtggtgattcacagacatatatatatataaaatatatatatatatatatataatgtaaccctttttcaatattttttaattatgtatttagtttgcgaataaaaattaggataaactattattattaatattatataaaatcgcaattattaaattaaaatatataaaaatacttaattatacccggtatgagatctctgggtgtacaaaacaggtctatttgttgtctaagtcacctcaagagtccaggggatcaagcatacgtggagggtgaacctgctctatgactatcaaagtcttcaactttattaagtgtaacatttctattaatatatatatatatatatagtcacttttttcttttacagtttaatattgtaattttatttttattttctcaacttttattattattattaaaaaaagtttagcaataagctaatatgcattaaggtctccgataggtatattcatggaattgactagtcagtgttgccaataatatttccaccgtctttttgactcttttcttttcaagaatagccgtaataagagttctgcttatcttttggccacatatatacaacatattgtatatatagagagagagatatgagcattacttcgtatcactaagaagaagcatatgtagcttcctaactcattcatcatattcttgttattctctatagactcacttaaaagtccctcatggaagccaaagggtatactcaagatggtactgttgatcttcgtggacgccctgttcttgcttctaaaactgggaaatggagagcttgtgctttccttgtcggtaagcatccctaatatatatattatatagataatagatatagacatagatatgtttatactcttttgtcttattggtacaaaaagcaaggaaaattaagctgacattctgtgttgtttggtccttttgaatattgctcataacatatctatgtctcccaaaccaataaggaagaccttaaacataacgacttaacaggcttaattggcagtaatccatctgagcttgatgcttgttgactggtatagtatagaaaatggaattagctgatgagactgattttcttctattattcaggctatgaagcatttgagaggatggccttttatggcgtggcttcaaatttggtgaattacttaacaacacagcttcatgaagacacagtatcttcggtgaggaatgtgaataactggtcaggtgctgtgtggatgacaccaattcttggagcttacatagcagattcctacattggtcgtttttggacattcactgtttcatcactcttttatgtcatggtaaaattattattatatagaacatccactagctaattactttaatcatctttaattaatatattattttaatctcgagataaggcatgctgttttttatttatttttacttttatcatggtcattaacttaattatatgaacagaatattccaagtacttataattaagatcattacagccactacatttttatcttccaagttcactctcccacttcaccacctgtgtggacaaagttatattgttatgattgcttaaaaatctcaaccaccaatagacagtattaaaatttgcctgtgggaccaattagtgggttaatggtttgataaataaaaagaaaaaaagaatgtttaataatttgttttgttatctggccacctgcacgagtgaaaaacttatgcctttttagtgctatttaataactaggaccattatcttgcatatgtgttcagatacatatatatagtagttatgctgtccatattaccgtaaatatgaatgtgttccgttttaatgctcacattcatggaaaatgaacttcaactgattcgaaaatgacagaaaattttgtattcatccataaaaacattaattcttgacaatcatgaagcaaaactctttgaaataaaacataaaggaaatcatcaaaatttaatgactgattcttaaaccagatcaatagaactgtatggtttttgtctctgccacgtgatgtgtcccacatgcactatgcacaatggttggtagatatgtgtttcaattttattttttttcattaatggtcaaaggttacaaccatctcttctctgtttctctctttcccaaattaatgtatacgaacatgtttacgaagaaaacttaaccaagtctacttctgaacagggaatgatgctattgactttagcagtttcactaaaaaccttaaaaccaacttgtacaaatgggatctgtaacaaggcctctggttcacaaatagcatttttctatgtggctctctacactgtagcaattggagcaggtggaactaaacccaacatatcgacctttggagcagaccagtttgatgactatgaccctgaagagaagaggctcaaggtttcatttttcaactggtggatgttcagctctttcttgggtgctctaattgccactctgggacttgtttacattcaagagaacttgggatggggtttaggatatgggattccaacagttggtatcctattgtctttatgtattttctacttggggaccccaatttacaggcacaaagttaggaaatctaaaagcccggctaaagacttaattcatgtcccagttactgcctttaaaaatagaaagcttcagctccctgaccacccctctgaacttcatgagtatgagatgcagcattacaccaatagcggaaaaagaaaaattcatcacaccctaatgttcaggtatatctctacgtatttaatacatggctgtttaaatgaagcttttgtattagaaaagctttacttaataaacattaagtgtaatagtactgctgaatcacatagttaataaaccatacaggtatggatgacactgctgaataacgagtataatagtagtaatgggtggtgttactgtaaattaaagtactttttgttgtagttaggattgtacgggtgttggtaagaaatgatggctttccatgtagcatggaatattccaaaagaatggtcaatatatagaaagattcgtctagtaagatgggggaattggtagcctttcactcatgtgcataactaggaaatctactatgcaaaaggaaaaggtgggggtgtctaaggaccacatcaggttcagtagttagccacttattacaattaaaaaaaaaaaccatattcactgttcactgttcaaccctgtttgcatctttaatgagtgctgggaatctttatatagccaagtttctgatagaggaggtatcaccatagatgacctgacattcataccccaccactgtctcagatccaaacaaaattgcatatcaaacactacatatcgttagtgggcaacctccactatgtcactagtcattgaatgaaaacaagcttcagtattaaggaaagtgagttcccattctcagcagaagttagattattgtaaatagttctgtcaaggaaagaaggacttgatgattgactaattatatgaaggtgaatcaaaccgtgtcattaactgatttcaggttcttggacaaggctgcaataaaggagggcactgcagaaaactcaaggccaccatgtacagtaactcgagtagaaggagtcaaactcgttcttgggatgatcctaatatggcttgtgaccttagttccaaacaccatttgggcccaaatcaacactctctttgtcaaacaaggcaccactttagacagacgcataaactcaaggttcagcatcccagcagcctcacttgggagctttgtcacactctccatgctcatctcggtgccaatgtacgaccgctactttgtgccattcatgcgcaagaaaacaggcaatccgagaggaatcacactcctccaacgccttggaatcggatttgtgatccaagtggccgccattggcatagcttatgcagttgaagtccggagaatgcatgtcataagactacatcacattgcggggcctaaagaagttgtccccatgagcatattttggcttctccctcagtatgttcttctaggaatagctgatgtgttcaatgccattggattgttagagtttttctatgatcagtcccctgaagatatgcaaagccttggtacaacatttttcactagtgggattggagttgggaatttcttgaacagtatgctggtgacaatggttgataagatcacaggcagcaaagggtcaaccggttggattggaaataacttgaataactgtcacttggatttatactatggtttcctcttggtaatatcaatactcaacattggggcttttctttgggcttcaagtaagtatatttacaagaaagagttgactgaagatcagaattgtattcagattgatcagctcaagctcaaagctaagccctttgacacacctcctttgggtttacaagtatgaaaatcgttgttttaggtttaaactagaaaggtttagttgatgggccgggttacatatactgctgtataatataagctatttgtttctctctccttttctttagtaggtataattttactatgtcctctgctagaatatatttataataagttggtttgatttaattcctgttctttaacttgaaattcactaattaattagagagccttaataataataataaaaggaatcttataataccaaggaaattttagttattaaaaatggtttattttccccattctaaataatctttgtgagcatgagagttgtgaattctatcaacaatgctaaaacttaaaattgggaattccatccctgatatgcctaatgaatcttgattacaacacacagtaagagaacacgccacctcattgtacccgtggcaaatgacctcaccgcgtggtagcgtgtggagctgatggcttagtgggctgggcttcaatttgagcttttcgactttcaaaaatatcaacttttcatgtattaggatgtactcaatttttccattcgaatatcccacaaatactatttttcctacaaaattaatttagtactacaatatttttaaatatatattacattgttcgcgatgagaactcgacaactaaaacttacttaaaaaatcaaatgtaaagagtacaatactcttgtattgaatatgagaactctattgcaagtaatgattatccaaatcctttacaagtgttcaaatgcggctttatactcgagttctaattgctctgaaatacaagtggtcccaaaaataagggaacaaagttgtgattgtaccatgagggtcagagtgtcagatgggtagtggaggagtgttggtggaatgttagcttgcatctaaagtgagacaaatagtgtctctactacttgtacttattgtatcttttgtacaaccacttcctctcttcacgcattgttggagacatactagctttgatggacttgcccttagtcgtacatcctttcggtatcctttccattacaacctacacttataatgagggagccacactaggaaatttagctaggtgttgggagagagagcaacacttggtattttgactaagtgtcgagagagggagcaacacttggtaattttgctaagaattggaaaagagagcaacacatggtatttttactaagtgttgggagagtgaaggggatggggagcgaaggagttgaggagagattacgagataaagagagcggggagaggaaagtggagcaggcagtgttggaattttatgcccttaaaatccaatttcattgtaattttatttactttcaataaagatcaaaaatcatatattgaccttgtcgtatgctttgttcacatgttttatacgtgattatatatttaatttataatttctattaaatctcgaacatatagttattcacaattataatgatgtcatgacagtgaaaataattgtgattatatgctttaaatttatttagtctcacaatttatcagtgcactgaatttacatggaatatcttttcaagtgcactattaaagtaaaccatgatcggatgtattggctatacatcaatacatcgaattggaccattattaaatgtggaaaagatattataaacttaccattatatattttctaagtcaatattacttagttgatcatatataatttgatctcaatccagagatggttaagctctagcttaattgtattgcacaggttctttgacttgttcgttaccagcttacaggtaggactagtccatacttacatcttggaaattcggtagtaaaattgagtgagagtgttaatcatagatatggacatctataacttctatgtctattagaagtgaaaggatgatttccttttaggttggctaaaggcaataaatgatagagacgtcatttcggaaattatattagtatctcgaaatattatgtacaagtagctaagtattttaacaataaaatacattaaagggtaaagtgataattttatccctacccaatctaaatcgtctatagaagatcaatgattgctgtgattgaaataatagataatacataacgtatctatatttggtatatagagtgttctatgtaatcaagagtgcaattctaaatcaatagtggagttaaaaggagttaataagttaggaaatttacttagtaaattgatttatttaataaattataattcaaaagtaaccatgtcaaattttgaattttcactaagatgggcgaaattgagaagataagtgcgatataggcttatttgttaattatgacaatttggtgtcaaattaattaattattatagttatgttttaatttataattatttaacttgaataaaggtttaaatataatatataaggtttaattaattaggattatcattataattaatattatctcaatttttgcccacgtgacctggcatgtccacataggtaagtttgatgccacgtggagtagtacagcctgtcaataagaggacaagtcaccatgcacaacgtaccagttgatgaagagtctaaatactcaagcaggaccaagagacaataaaatggccaattaggatggtctggtcagacttcctgtggccggccatattgaagtaagggccg

SEQ ID NO: 15976 - DNA, 5896 bp, Cannabis sativa
ctattatcagcccaagcccattaatgatgaaagtaatacaaaccaaaaggaggcccagaaatataaaatcagcaaatcctccaactgggcttgcctcaataaaaccacccagagttatggcccaagcccatttcaaacgtgcttctactattttacaccacaacggttttgataattccaatggacaattttgttcattcctacatgatctcacactgtccaaatcttaagggtattatcgtaatcaaagtcatctcctcctaatccataaagccaaacgtagagaaacaaccacggaggcactgctcctctagtttagagagccagcaacgaacatggcttactcgctctgctcatcacactccccaatcgtccacgaacgtcacactctttccttatctctatcttcaaccaaaaaccctagaataagaaacttcaatcacccttcgaagctcaattttctttcttctcaatacaaaacaccttctctccaaataagccatgtatccgtacacgacccagttactgaagaaaccaagaacgaggttgttggggaagctgcgacgacaggaaacccagatggaaattccggttcttcatccaaaagctacatctgggtcaatcccagaagccccagagcaccgcaacttcggaagaaatcttatcataccaggtacactaatctagtcgaagtagctgaatctttaaactcttgtaatgcaaacgaggatgaagttttaaaagttttgggaactttaagtggtaaacttttagagcaagatgcggttgttattcttaataatatggttaatgcggagattgcggttcttgcacttaagtactttcagcagaacttgaaacctgagagggaggttattctttacaatgttaccttgaaggtttttagaaagtctaagaatttgcctggtgcggagaagttgtttgatgaaatgctcaagaaaggtattaaaccggataatgttacgttttcgaccatgattagttgcgctaggatctcttctttgcctgagaaggctgttgagtggtttgaaaagatgagtagttttgggtgtgacccagatgatgttacttactcggctatgattgatgcttatggacgtgctggtaatgttgatatggctttcagcttgtatgaccgtgctagaacagaaaaatggcgcattgatggagtaacattctcgactttaatcagaattcatggtcaatcaggaaactatgatgggtgtttgaacgtgtttgaggagatgaaggctataggggttaaaccgaacgttgttgtttacaacactttgttggatgctatgggtagagctaagagaccttggcaggctaagaagatttaccaagagatgatcagcagcgggtttgaaccgagttttgttacttatgctgctctcttgagggcttttggtagatcccggtatggtgatgattgtgttaatgtgtataaggaaatgaaggagaaagggatgaagctgaatgtgattctctacaacacaattttatctatgtgtgctgatcttggctacactgacgaagctatttccatttttgaagacttgaaaagttctgagaccatgcctgatagttggacattttcatcaatgattactatatattcgtgcagcgggcaagtaccagaagccgaggcaatgttgaatgagatgttgaaagcaggttttgcgcctaatatatttgttttgacttcacttattcagtgctacggtaaagctaagcgcatagatgatgttgtgaagacattcaatgacctcttggaattggacattagtccagatgagcgcttctgtggttgtctattgaatgtgatgactcaaacaccaaaggaagaactttctaagcttactgcttgcatcgaaatagcctatccaaaactcggatatgtggtaaaacttttgctagaagatgacaatagtgaaaatttcaaaaatgaagcctcagaactttttgaaacggttggtgctgatgtaagaaaggcttactgcaattgcttgattgatctttccatgaacctggatcagttagacagagcttgtgagatactaaacattggggtcacacaagaagtatatactgatatacagaccaggtctccatcccaatggtctcttaatttgaagggtctttctcttggggctgctctcactgcattacatgtttggataaatgatttgaccaagatattggaatctggagaagaatttccaccattgcttggaattaatactggacatgggaagcacaagtactaggacaaaggctttattttggcaggtgtttttgattcccgcttgaaggaattaaatgctcctttccatgaggctccggataacgctggttggtttttgaccacgaaggttgcagccaagtcgtggttggagtctcgaaaatcttcggagttagttgcagcttaactttgtaccgtccttgatttgcttttctatgtattctctacacactactgacatgcaagggtttagattgcacggtatacttcttcctttaccttttgtagttgtatcttaatcttgctggcatcttctctctcgtagatagagatcatttttgtactttagaattcaaatcgaactcttcctttgatgcttatagagttaaagaaatgttaagaattatttacatctttgttggtttagattatctatctataatctatggttattatttgatcatgttttcaatgaagagttatgccatttgaagggatgtcgtttctaaacatttatcatttccattaaaaaaattgttgtatgaataatcctcgaatttacttccgttgtattttctgggcaactgttgtggtagtcagtctaaggggtcccctgtttcttgtagtgaaaactgaaaagctagttcacggttccagttagcaataaacaaaattgagaacgttatcgcagaagttctaggacaagaatcaatcaaataactaatttgaatcttggtcattaatcatctcttaaaagttactaaacaaagcaacccttgagcgatcaaaatttcaaaatccagaaaaataggaacctggtatgagatgagagttcatctaaaactcaaaatttgtctacgtttaccttatttactcatactgccgccaaaacaaaaccacatgtattaggggtcacctttgaaggctcacaaccatggtagatgaagtatatatgctcaaaaccaatgtcttcttttaattttgtctatttcctccttgcaatacccattgtcttccagttagagaagtgattgattccttggtacatgatctggagttttttgtctggaaaatggaaattaaggccaaaatttaatcttttcttagaattgtattgatcttaatttcagcatgttaactatgttgttagttttatataaaatatgtgtttaggaatttttgtttaactttgttacagcaggattcaggaagttacgataaaggtgttgcaggtggaccttaagtgtcatgtatgctataaaaagtagatcaaaaaagttctgtgcaaatttcccgtctaatatgtaatatatatgttatcattgtacgtatataaaattcagaagaaaaatattttctagttaataaattggcagtttagtgcatgagaatcatgtgctctgtgacagctttgatttcatatcttttttctcattgcattagggacactaatactattgcttagccaatcttgcattgagtatggaacaaacaaaggtttagtgtccgagatttccttcttgtgtattgcgcctgtttgctgtaattttggcgttatactttgactaacacaagttcattcttctccaaaaaaaaaagaaaaaaacacataaaattatattttcatacaatcagcaacatattttgataattaaagtacctactcattgtatcagcaacaatctgcaaggctggagactatcttattagcattacgagaaaagttcccagctcccataataaaggttgagaacttgagatgtaggtagtaatgtcatgtagctgcccctgcctaggccagttttaccaaagaagctgtatatggagtgtttggaaggtagacgaccttgtgggccatgttgataggatcatgttagcagccacagccaacctgcttcaccatgtaaatgtaatcaatacgatagttgcttccactgccactggggaagactaccagcagtaccgtgttagtgttcaagcttctttggtaaagttaagctagtttgcattatgtgtgagtttaggtttataatgattaattgttgatcatgagtcatgacgattaatccattattatctgatctctcgttaaacatttgtagtccaactggtttgttaattggagttttcatatttggtttttcgtactaaagtaaaaaaaaaataaaatattttttattgagggaaataaaacaaaaaaagcttccgataagaaagttgaatgtaacacgtggcgacatacggttggaagaaaccatatccagcttatccgatttggaaaaatggcagataaggcattattgtccacaatgactctacatcacaaaaaactaagaaccaaaacaggagagcatcactggtaacacccaaaaatatatttccacatcactccctcagcctaatcactttagataccaataacacagagctaaagaaataaccaattataatcatcttgggaggttgagaaaatggcacacgctatggcttcaatggctggtttacatggctcctcccagactgtcttggaaggcagcattcaacttagtggctccaaccgcttgaacattgtcagcaacaaccgggctctgaacaaccgaactgggttcacagtcagggcccaacaggggtcaaccgagaccgaaaccagcagccgtcgggctgtgttgggcctcgtggccgctggtttggcttctgggtcttttgttcaggccgtgttcgctgaggccaggtccatcaaagttggcccacctcctcctccctccggtggattgcgtaagttatcgatccttaatagtatatattgtatctccatttggtgtttttaaggaatttgtgtaactaaagatggagaaattgtgttgtggcagctggaactctgaactcagatgaggcaagagaccttaatttacctcttaagaataggttcttcttgcagccactaactccttctgaggctgctcagagaactaaggagtcagccaaggagattgttaatgttaagggattgatagagaagaaggcttggccatatgtccagaacgatctccgactcagggctgagtatcttcgctatgatctcaacactattatctcttccaaatccaaagaagagaaaaagccccttaaggaactcgctggaaagctcttccaagacatcaacaatgtgagaagctcattcaaatcctcatttgtttatatttaaaagaatttgtataattaaggaaatactttgatggcaaaaatttaacttttttttttcttttgttttggtgcaaaacagttggactatgcagccaagatcaagagctcaactgaagcagagaaatactacgccgagactgtatctacccttaactctgtccttgctaagcttggttaagaggaatttgtgtatcttaatgtaatgtacgctttttttgaatgtggaggaattagttttctatggtggtggtgggtttggttatggtagattctggagtgctaatcatgttttttcatgataattataatcaaatcgtaacttgttgatatttttggaaataaatatattacatttgataattaccaaaactcatcgtcaaaccaaaatctattaatggaaaattgaattccggaagaaacagagtg

SEQ ID NO: 15977 - DNA, 9350 bp, Cannabis sativa
tttttttttttttttttttcatagttgaggtttattttttcaagcctcactctttattttaactaaagagtgtgtatagattatgattagagatgctcgtaagataatcattcatttatatttgtttactttattaaaattaagaaagagagaatttgattaaataaaagataaaaaaaaacacttcctcacttattttttaaaaaataccattaaagtttgtgacttttatttatttttattttgtaattttaaatatataataataattttgtatgtctttatttaataactaccacaaaaagataatttaattaatttgagcattttgattgagctgtcgtgataaagaaataaaatattataaatattaatcctaattattttttattaattctgttatatttctctattaatttattttgattctgtataataaacataataaaataaataaaaaaaaatcatatcatttgagttccgtgcaaaaattagaaaatggacatgccatattgaagtttacactttatttggagtgaacgtcacaacaaataacaatagccgcgtaatacctaccaacacgcacgaacgtttccatttctctttagtaaccaaataaaaaaaatattaagtaatgatatattttttttcttcttaacaacaaattaagcaatgatctttttttagaaaagatcttgagaacatgattttgttcactccaaactaagtaatgatcttgagaacacgattttgttcaaattatttttctttagctctaatcttaaaacattatttcttaatcctaaaattagtttatttctccttacaaaaaatctgtctctaatcctaataatgtaatttgatggataattaaaatttcaataattatttaagatattctctaaatttttgataaatttaaaataatatattgtgttgaaaataaaatttaaagaatctattgcatgtttgcctcttttatttgaagtaagtgtaaaatagagtatttgaatcatactttttgtgctataaattattttaaacttatcaaaattaataaaatatcttaaataattaaaatttatgttgttatataagaaaatcgtgattataatttattatttttgctttatatgaaactttaattaaacatttttgtgaattaaaattattttgatttgaatattattattaagtactttaagatatcatatatcatatttatgtgtgacattataattaattaattgttctctatattatttattaaattaaattatattagagacccatatcaaaatgcactaataaaactaccccaactcttacagttctttgacaccttatccttagcattttccatttgatttcccttacatttgttgttgttgttttttttttttttttttctgatctgaagatttcccttacatagttaatgtattattatggcaaaaagacggtagcacgtgagcatctcttcgtgttgacgtgtaaaaaacgcgcgcgcgtgggttagcttagatttataaacaagtgacatgagtcacacaaagccgtatttgaaggactttttcgtactttcacaccttctccttccctccctttcccaagactcaactaaaatagctttcactctctctctctctctctctctaaaaaaaaaagacaaaagcaaatccaagacgacggggctttgctaacttacgctgtggtgtcactcagcgcatcccttcccttccctcccccacccaccatcaccagaaccctcttcttcgtttcctagctcacctgcaactgcaatgagggtccgatcttcttccattctcgcattcttcttcctccttgctgttccttctcccgcttttcccctcttcgccattgccgattcgctccagtccaactcagcgtcggaggagatcaatgccaccaccgccactatcctcgacgtcgacgccgacgccgacgccgactccaactctacgcgttcgagatccaatgaggacagctttgcggacatgatcgaccgggcgcttgagagggagtttcccgagaatgagcagaatgaaggttcgtatagagaaattgtgtttccttaagtaccgttggttaaagaaggggaattcatttttattattttcggtgttttgttgttcttcattgcgttattgttctgattggctggtggtaactgtgcttgcgagatttaaattagaacatgcgttgcgaaatggaaaattgattatttgttttaatgtttcggttgatgaattaaagtaactccaatttgtgtgttctattttgcagccaccgatgctggtagcttcaacaacagtgttgctgagcagcaggttggcattttcatttcttagaactggccttaattttgatttcaagtttttaaatttatgttggtaatactttcattgggtaacatatgggactattagaaagcgaaaactcaacttcaatacgtgtagttgtagtgttatattgttaaccaaataagtaacaaccaccgaaatggtttattaatttaataatttggatttggcattattcatttcatggaaaggtagaatagcattctagaagagaattctagttggaatacattagatgtgctcaactttttcctgtataaacagttagcaacgtcgtcattaatacttcatttagtgcgaaaattgttcatggtagttaggaaataaagtagaaaatgcagagaatgtagaatcaaatcaaataagaaatgatatagtctatagacttttggtaacaataacataattttgctatatcaatgtacaataacctagaatattttacttaaaatgctttagccatgtcactacttactgtagagagatgagactttgagaatccaggtttggcaagtgctctaatgatgtttagctgaaattggtggagctgttggctgctgttaaaacatatgggaaagcagctatatgcagccaactggccttgtgaacttatgctatactctggttgtcttcaatgacaacagtcgtaaagatgacaaagccattataagtgtttgaggaaaccttgaatcaggaattgctctctttcggttttgcattataaagagaagagactactttggattgatctcttgaaattcaaggccctgtaaatttattattaggacgttctttcctttttttagagagtaagtggggggtggggttaccattacagtgtcttcagttacctggattttccttttcctggtctgtcttgattatcctaattttttcgttattagttttattttcctatcaattagaaaaaacaaagaaaatattctaagttctgacttagaaatggaaaatctttgttttcaggccgttttggaaactgttgctagagtaaagtccaagaaaaatgacaccaaagaggaaaagtaagtgcttctatcttgtaaaacaatggttttgccccattctttttaatggagtttactgagtttacataaatctatttctgttgaagttatgctcaataacacaatggatgctgaatatttatgagccttgtgttaggtcatttcagtttcatcatgttttcaataatgagaatcaagctgaagatatgccaacactgatagatcgcaaggtacgcctactagttgtaattgaaagtttatgttggcattggttctttcgctacacataacatcactatcataataatgctttggcatgtcatgttttattcagtcttgatgtgctaaaattttatcttcaggacaatgtcttcgttatatctaatcggaagtcaaagtttcctgtgctacaacttgatgcaaggtagggtttttttatttctttcagtaaatttgtttattctttaattattcatgtaaccaccagcagcttggctgatctagcttgataaaataaatattttctaggcttatatcagaccttgtagtcgtcattgtctctgcaacttgtggtggcattgctttcgcctgcgctggacaaccggtccgatcactattattttctttgtaaatattgatgttttcatacatgtttaaacttgtctctaaatgtttgtttcctgaccttttgacaatctgcaggttattactggatatctgcttgcaggttctgtcattggcccaggaggcttgagttttgtcagtgaaatggtgcaggtatgtctttttaactatcacacctgatatgccactttttttttttttgatagtgattttcttgttagagatccttttgatatcattttatattaaacttatattttctcatccttcaacatgaagtctcttgaaattatttgcttattggtatgttaaagttgaagattttttttggttcttatcacgtgtttatttactttcactgtctttaattattcatgaaggttgagacagttgctcagtttggtgtcatttttcttctttttgcactgggcctggagttttctgctgcaaaggttagcttgttccataaattgtttattatttagctattatcaaatgatttggctgtgataactgtataactgataaaaatgtctttaattttacattttcagcttcgtgtagttcgggctgtggctgtactaggaggtctactccagattttcctgtttatgtgcctatgtggaataacagcctctgtatgttaacattttgtggactaatatatcttcttgtccctattaaatacttatctctgggtggactagtttgctgctaaattaggttccatattggttctgggcagtgtggtactattctgccttgctttatggtggtaggtttgtaacaagttttagacactaatttgaaaagcttgatttataagttgacacttccatgaacctcttggctgttgtaggatcaatgttgagaggatttgagttgagactatctatgattgtttttaccttttcttttttcccatcatttcatgtgatgatcgactctaacatgaaaagtcatttgccatttccagttatgtggtggtaaatcttctgagggagtatttgttggagcatttctttctatgtcttcaactgcagtggtatactctttgtacttgtatctttgatttctcattatcttgttcatgtttatatgaagaaagaataaatgacttaaatcttttttgtatttcactcttgctatgttttttgggaagtagtttgtgtaaacattgattcttattattatttataagtgattataatttctttacttctgttggtaaggtgattcaggagaaaaattatgggtcagtgatttgttctctgatcttgtgtaggattggagtgtttatagtacttgcttcatttaatattttctatgtggtttactcttccactgttttacttgtattgtattatctttaatcaattagtcttgtttctgatgaatttttatttaatttttagttttttaatgggtaagaatgtcatcttttggaacacgtgtccattttaagtaatatttaaatgtgtaatagtcttgttctttctatttcctttttgtcatgattttccagatatgtaactgtcgaaagtcctctgcttcgggttcttatgatgtcttgtatgatgctccttaggttttgaaattcttgatggagaaaaatagtatcaatgcccttcatggtcaggtcacagttggcattcttattttacaggtatgtgctttttgatctgttctgtacctctaattgtagaatctgaatgttaatttttttctcctcacatcagaactttcctcagtgtcaaattagtatagctacttttggtgttgtgatctattttaaatagtactgttgtgtgctaccaggattgtgctgtcggtttgctgtttgccttgcttccagttcttggtggtacttccggtgttcttcaaggagtgatgtccatgaccaaatcgtaattatgacaaattacctttctttacacagtccactaattatgaagaatgtattcttttctactttgtgcatgttgtattttgaataaaacataagctgggttcatatcgtaattagtaattatgtatgtgtcgtttatggcatgtttttgtatagcaattttcctcatgtgaagtcctctgtcattgctgaattgatcacatgatatagatgcagtaagagaaacaaagtatactttttaaaatatagatgctgaattcccaacaatacctttgatatagatgaatgtttagtagcctttgaaacttcaattaagactgcctttttttccctttacctcttgatgtgcatgtcatatgtctatttgctataacaaatttagggtcttatttaacctgataattggaaagttggcagcttcagttgcaccttagcatataacattgatacaaacaatttataattattttcaatcaagcaacactcctccaatcagcattgcagttaattgacctctgcctaggtgaattatgcactattgcttttctcacaactactcttgatctcaggttggtggttttgatatcatttttggctatcttgtcaatagtatctcgtacttgtgtgccatggttccttaagctcatgataagcctatcatctcaggtactagtaatggctctttcagtttgttatatttcatgttctcaattaagtttagctgatgattatgttttcatttttttcagactaatgaactctatcaactggcatcagtggcattttgcttgcttgttgcttgggtttgtccagttcccttttgtttcctgtttgagtacagaactaatttatcaattattttatagtatggaaataagattgacctattatattatttttttattattattctctttccccttctcttttctgctttggtaagacaacttatattgtatcatcaatgagatgcacagtaagtggggaggagttctgttgcttcatgtatcccaacttgtttattgctttatcaaaacatttccatatgtggagcaggttggataattttatttattttgcatgtttaattgcaaatatggacgcataataaagatttatgtcatttcagtgtagtgataagctgggtttaagccttgaacttggctcatttgctgctggagtgatgatttcaactactgatcttggtcaacatacacttgaacaagtaagatattttttatttgtgtatctacttgaagagtgaggagcttaacgagtgatagcgttcatttgactttcaacctgctgtctacatagggacatataaatacataaatacatgcatgcatgaatatttatataagaatcccctttgtaccttctggggtggagccaaaaaattggttgagggagaaatctaaggccttgtatggttgggaataatcaaaatagaggaatagaatgagaagggtgatggtaatagagcaaaatagaatttaatgagtaattttttttttcaagtgcaatggaatgacttccctcctattttggaggaataaccattccgctaaaatggtggaaaacttattccaacaggatgactattccatgtgttaaagactcaccaaatataaaaattgaaactaaacgaaatttttatctttctcttcccttccattctattctatccaaccaaatggatctaaaagttcaaaaaattatcttattataattaacaaacttatgagtaaatacaattgccccttctcatcaaggcagctctgtcactgtgtatgtttctcattagttatgtttcttggaggttgacagagctgtggttttagtctcttctcttgtctcttctatatgtttgctggctgatttggtgcgtaattcttttttttttttttttttgatgaataagatcattgtattgctcaaccaatcaattacaatcagtttgtatccccaatttacaaccaataatgacatagtaaatcccccgtatgaaaaataacccctgtacagactcaatcataagcataatccacctgctgctttagataaacaggctatatcccaagcaataaaaccaggagcttgagttcccgagctttctttccacaaaaatgctctacaaattgcttcaacatcttcaaacagattttttggtataatcatgatatctgttcttggaaattgttgtatatattggtaaaattcatacttcttttttgtttttgaaattactgaaattgttgtatatactggttactgatgtgtatttcactataattaaattagttactcttaagaactgtatcttcctttctatcctttcatattgctcatgaatgggatggaatacaaatatctacttgacgctgcttagttaaatattttaacctttaaatgtgatggtctcgtctgtttctgttattaactggagttgtttggctggcaggttgagcctattcgtaacttttttgctgctctattcctcgccagcatagggatgttaattcatgttcattttctatggaaccatgttgatatattacttgcagctgttattttggtgatcattataaaaactattgtggttgctattgttgtcaaggggtttggatataacaacaagacatctcttcttgtaagattttacaaagttgccaatacagtttgtgatttttacaagcattccattgacgaagggacctttgattgttttacttgtgtaggttggcatgtccctggcacaaattggtgaatttgcttttgttcttttgagtcgcgcatctaatcttcatttggtagaggtgagtgcttaatttcgaatcgtacagtttaagtgaactcgtccatttgctggtcctcaattttgttatctcctttgcttctttttggtaccttaataatatcgcttcttgaaaagaaaaaaaaaaaaaagagtaaagttaatccatgaaccctgcacccaattttgtgcttagagtgacagtggagtttggtttcttattgtacttttgaaaggaatgcatctctttccttgtgaatgcttgtagagaggtacaaaaattttggtcattcagtggagtttttttaaaaattgttaattttgccaatgtcaactatatcaaatttaaaccgaactgcaagtttttcttctgcaatttttctgaaggattaagctcttttgcagggaaaattatatctgttgcttcttggaacgacagctctcagtctggtgagtgaaccatctttcgcatttatatgtctgcattttagttcaagcctcttctgcgtaactgcttacatctagtgaagtccagttcaccttctgatctcactctcagcatattgatacttgcaatctgtggtgcaggtaacaacgccactgctcttcaa

SEQ ID NO: 15978 - DNA, 8357 bp, Cannabis sativa
  modified_base (5328)..(5340): a, c, t, g, unknown or other
tgtacgttgttttttgttattatttatatgttattttcatgttgcttttatgtaattttgttttcctattatttttatgaaaaattataaaaatgtaaaaaaaaattctttgtaatttttttattgtcttatctaattgtctcctaaaaattgcactgatactttcacgaatcactcggcccctctgttgaagcccaattcttcagttaattgcctctccaaaccaaacccttcccagctcagccgtcgagttcccagtcgcccccaccgccttttaccctcgctcgttcgcactcacgcttcggcctcgctcagtcactcgcattaacaagtcaattgagtatgtgtttttattcattctcttgcgtgtttaattgtttatggcatttgtatataatttaatattcaaatgaagccttttatttttccttttctctgatcgtttggctatggaaaacaggggccttaccacagtgcgtgagtatatgttgtggctatgtaagttttacacttgtacataatttgttttattgtgtacctagttattgggacagtctttttcttctaaatatattttagtttgatttgacagtcttatttgctgcacttgttttttcaatttggataaaatgtttaaactatggaagctaggaaaacgagggtcaaacttaaaactcaaaatggtgcatttctttttaatctttcttaattctgttacttttgttttgtgccactggaaaaagtagaaaattttctcttttcatgtttgtttttttggatatgtttgggtttgaataggttaaggagatttagcattgccatagattaacataaagattatctaaacggatgttatcccactgtgtcaaatccctccggcactttaaaatcttgagaaagtcttcagaaactccatggaactttctgtttcattcttcttatgcggacacacccatcaagaaatcaaagcttgctcctcttcaggttgattgatattcttcctctttaagctgtgttgcaacttgaaatcagattgattggctaatgaatatcattatttgtttgtacttcatctattgcaggagaggagaatgatagacaggtttagcttgtatgctaaaggaggtgaaggtggcaatggttgctctagttttcgccgtagccgacatgagtctcgtggcaaacctgatggtgggttataaatgtctttgtgtaatcacgatgttgttgaatgttgtgctacatgtttctagtcaattcaagttagtttcaaatcacaatatcttaatgattgttctctttgacgaatatatgaagcacctatagcattgttggtcttttcatttaactctggaacaattgcaggtgggaatggtggaagaggcggtgatgtgatattagaatgctcccccacagtttgggactttagtggtttgcaacatcacgttgtatgtggtatctttgtttccataaatcccaagcaatatatacctaatactccaaactcacaaatctgagttacagttacattgttttgcagaatgcgaatcgaggagggcatggatcctccaagaataagattggaaccagaggagctgataaggttgttatttctaaattgttctgtttgcataccatacgcgagttttattattattatttttgtttggtcactcgacttaagccagattgtaacagctccatgtgaaaatattgtacttgttaggttgtccaagtacctgttggcactgtaattcatcttgtaaagggtgaaattccttacgttgttgaaaaagaatcttcaagagagttggatccttgggagattcctggcacactttctaaagatgcatctcaatcagaccagggaattgcccttagtgacccaagtatggcagagaacactagttgttcatctcattctaaaagaagcatcaaggaattgccaaaagtggagcagagcactcatgttgtatcacctaaattgaattctatttctgcttctgaatcttgctctgaagaagaggatggggaagaaccagaaatgaaatgtaatgtcgcagaactaacagaacaaggtcaaagagtaattgttgcaagtggaggtgagggaggtttgggtaatgtgtctacatttagagtttcaaagaagcctaaaactaaagatcctgtgctccatggggacaaagtccctgaagtggaagcatctgatgagagttcgtctctcaacattggcgcacctggttcagaggcagttcttgtattagaactcaaaagcattgctgatgtgagccttgtggggatgccaaatgctggtaaaagcacactattgggtgccatatcaagggcaaagccttctgtagggcactatgctttcactactctgagaccaaatttagggaatctgaattatgatgacatatcaatcaaagtagctgatattccaggactcattaagggtgcccatgaaaaccgaggacttggacatgcattccttcgccacatagagcgcactagggtcatagcttatgtgttggacttggctgctggattggatggaagaaaaggaattccaccatgggaacaactaagagacttagttttagagcttgagcaccatcaagaaggcttatctgatcgactttgtttaatagtggcaaacaaaatcgatgaagaagggacaaatggagtattagaagaactgaaaacaagggtgaaaggtgctcctatatatcctgtttgtgctgttttggaggaaggaatccctgaactcaaagcaggtcttaagcagctcgtggatggtcatatgtcatacaaactcaaaatagatgatatcataggtgactagtttgtctggatatgtccttgttgccatttgcaggcaaggtgtagtttctttctcctattaaatcaacataattgatttttaaatggtacttgtttttttatataaatttatttctctttcctaattcgttttttaaaatagattttttatttatttataaatatttatctttcttatttatgctaaaaaaataccatagcactactataaaagatacttttggtgtcggttcgagtttcgtttaatttagaaaactgacactatagagtagtacttttagttttacgtgtcggtttaaaattgacatttgaaaagcccaatagtgtcgatacgacactaaagccaaaaccgacacttaaaaaagttaaagagaaaattttaaaaacaaaacaccccttttagtctcagttaagaactgagacttaagaggttatataatcctcttaagagattgtataaaccttttaagaggttatataaaccatttaagtgttagttcaaaaactagaccataggggatttaaaattaaaaccctaatctcttctctttgaccctcaaatctctctcaccctctcgttcttaaactctcaaacccaacagaaacgctctgcaccaaattgccccacctaattctcctgcctctctctaaactcgatttgttgtagaagaaatcagagatcttcaccaactgaattgtgggggctctttttttcgctaaacccaatccaaataatgtccaccaccaaagcgttgctcaatcctctcctcacctttgagcacaagaggtactccttctctcaatatctatttcttttgaataagttgtttatttatatatgtgtgttgagtctgagggagtgatttctctgtttgtgctaatgagaatttgattgttgtgaattttcaagtatttttttagttctttgttttttgactttgtttttataaaaaaattattgggtcgaatattggtctggttttggtcaattgaaattgtgttgatgcaatgttaggtgttttggtatgtagaagtgaggttacgtatagtgtatgttataatcgacggagagttggcgatctctcaaagtattgctgctgatttgagccatgttgaacattgggtttttcagtcagagatttaattgggattttttattttcagagaaaaaaagagtctatctgagttgtttaagtatacgcctggggtttggtatattttattgaaatggaaaactaatgggcattggtattgaccagggacgcttatggcgttgctatgagacctcggcacgttcagagataccgggagaatgcctatatttacaaggtttttttctactcaatagttgtctctatcgttgcacttctttttttccaatgagattaggttgcttataagaggaaaatgagaagaaaaggatgataaatactcgcttccagctttttgctaaataccgtgttttttattttcaagaagagaaggaaagatcagatcagatcgatggaattctttcctggaactccaagcaagtctgatctgtttccggtcatttgggaaatttaaggtagaagataaaaagtctttgcaaaaagaaaattcagagaaagtagcagatgctagtttggagaaaattctgaaactattttcagtggtcaattctgaaactaaagggttatttatttgtctgatacaccaaatattagatcctcttttttattttctatgtgaattcttgttttctgtaaataaaatatatttatttctcttagttttagactgttttcatttgaaattgccaaacacattgcttttcttctcaatttgaactctccaatcattaaacctttgcttaagatgagaaggatctcaaaggagaaagagcttgaaactttgttagcagtggaacaagatccttgctcatgttacatggaggttatttgaaatatacattactgcttcctaatttactagttttttactatcatatttagtagaaaatatgaagttatgatcacttctttttcactgaaaaaactaaaattaaggagctttgtattaatgttatggtcatacagatctggctaatcttacatcttttggttctgactcttaatttgatttcgcagagggcaactatcaaagtagacagtgattatgctttggggtatgctaaagcacaagttggagtgcacaagctggtaaggatctccccatttgacagtagggttgagcataaactccaaaaaaccgaaaaaatcgacctaccgaacaatgttggaactgaaactgacagaaccgaaaactgaaaaaaccgctaatggttaaaaccgccattgaatagttggttttttttatagataataaactgactgaaaaaatcgaaaccgatcgttatacatatatattaatttattaagtttttttttttgctttatatattgtggttactaatgatatataataataatatattattannnnnnnnnnnnnaaagttaaaagaataagataattagtttgtgaacaattagtttatatatttgtagttgtaaaatgtagaataatgtgtttatagaataaattggatcaatttttttttttaaaaaaaaaaaaatcagtttgggcggtttaaaccgactaaacagtggttcaaaacggttagctttaagatagtttttggattgatcggccggttttcagattgcaccaatccagactgaaaatcgaattatggatttttatatagaaaaaaactgaccaaatcgatcgatgctcagccctatttgacagtaacaagtgtctgcatacatcatttgttgctattgttgtaatttcgatttgggtgatgcttcttcccatgtctaaattaatgaattcgatcttcgtattaagcggtgtcgttttgggggacctggagttcaacatgttaacacaactgagagtggtgaggatagtccatgttctcacatgaattacaactacttttttttttagtaggatggacttttcttattgcaattagtcagaatagatatagtactttgttatattatttattgaatatagtataagtatacttgatttgatgttcttactatttaatttttgttgatattttgtgttaattctgaaatcttaccgtgtaggtgggaaaattgataaataattgtaattttttttatgtcaataatactgtcgttttaaaaccgacactaaaaatccaaaaaaaaattaagtgttggttataaagcaaagcaaaaagaaaaaatatcaacaaacaagtcttttggtgtcgttttataattgacactaaagaacctttaagtgtcggttataaaatgataccaaaactcaatggtatcggttttaaattgaacataatatgtatgctttaagtgtcagttttaaaacaacaccaaaactcaatagtgtcggtttagaattgacaccaaaaaaatgactttttttgtcgctgtggaataggtgttggttttatgaaccaaaattaaatgtataagtgttagtttataactgacaccaaaagtacagtttgtagtagtatcacagcttaatttttaaggagattattttctttttttgaaattaaggagattatttcgatatgtagaaagcattaaactttttattattggcaaaaaaaaaaaaaatagaattaacagcgttatttttgtttcttttatatttgttaaaaaaaataattaagttataatcttaaaacaaaatttatacaaagttattacaaactattttgttattttaagataaaattgaagtaaaataatatattaaacatgaaatcacttatattacattactttttttaccaaaaaataaatttattttttcttatgtcttaataattttttttaagataatttaaatttatttacaaaaattattgacttataataacattgaagaaataactttattgcttaatagcaatattatcaaaattagtataattaattattatttacagcactaaaagcttttactaaaaagaaaaaatatacattttaataactattaagtttatttttaatgtcaattagttgtcatataatataataatttatcatattctgttaattatattataaatagaaaatttaactaattatatatttattaagctaaaattattctcttaaatttaagctatttaatattagtagaatatgttatttttttttcctaaaaccccattatacccctcccgtttgaacaaccctttctctctctctttcccccttctcactctttctttgttctctttctcgctctctgtaaacaagcacccgacgcacgactcacagaccacctcgacctcgcgaccacatggcccacacaacccatagaccactgtgaccacaccacctaacgccaacaatgtctttgtgaaagataattcttaatttttttcataaatttttaactgtaatcgttttatttttttcatgatttagggttaaaacaattagatatagggttaggtatgtgtttttggtggagaatatgtgatttttgaagtttttaagcttaaatttgtgttttagagagaatttataatttttgcgcctaatgtaggtccgatggtaggttaatgttgaagggattgaaagttgaagaatatactccaataggtccgatatagggtccaatggtcctcataattttaagttttattgtgacgtgatgggttcgatacaataccaataggttcaatatcaacaagacaatatatacaacaaattaatctattgaatatatatatatttatttatttcaaaatatctatttattaactcattaatttaattagcttttcactttcttataaaatatatagtgtataattttattttaatttattaataaaaggagctaaataaataataatatataattaaataatttgattttaaaatatttataaattaaatttatcatttttaaattaatttgtattaatgattttctttcttttttattatactattttttttttttatttaaacccactgaataataagaaattttgacctaccagcaaaatgggtacaagtaagcattgaattttaatatgatatttgatgatattaagatagtgaaagttattactataagggggcttttggaattaactattcaaaataatttgattatagagaattatgaaagataatatgattgtagaaaaatatgtaaactgtgtttggttgtgtagggtagggggtgttcataaaatagccgatcaaattcaatccgcacgatccaatccaatccgcaaagtgcggatgtggattggaaaattcaaaattcgcacttgtacggattggatgttgattaacatgcaaaagtaacatccgcactttgcagattggaaaattcaaaatccgcacttgtacgaattggatattgattgacatgtaaaagtaattgatccgatccaatccaatccaatccacacatatttataacaaa

SEQ ID NO: 15979 - DNA, 2230 bp, Cannabis sativa
tatatgtacccgtgaaggggtgcggtgggtattccattgttcaaatccttcgtagacttaaaaacttggggcatgtgggaggtctcctggtcgaactgccaacaccccatgggattagttgggcaaagcccagaatggactactgaatacaaacacaaaatctaggaaaacttatagttatacatatgaagcacaccaacaacaatttgtgcaaggattgtgacaggatttaaatgtgatgattagttggatttgcactctgctgcttttcttgacccaataattttaatctagattctaattgatcattatagatatgcagttgtttggctgcctgtatctgcttgttttgatttttgggattttctttagtagtatgtggtaacaatatatttttaaaaattgatatatgtgactttgaatatttttgcagttatgacatacatgcctcaagattttcgaggaaaacttatcagacaacaaagagaacgttctgagaggaataaacaagctgtagttgatgctttaattaattctggaggaagtatacatgatcgatatgcacttctatgggaccaacaaatggagaggtaagagatgcttgggtgtatattataacatataatgcatttaaagaaaaagagaagttaatatttttctaggagtttagggaactaataattttgaaaatacatgcatgtatattcaaaaaagactaactgaaatcattagcctaggggtttattcatagactgattaatcagtcttacttggagtcgtaattttttcgtttttattttaaaatataaaaaaacaagttaaactcctaataaaatggtcctaagaaaaaaaaaagtattaaaaatcattttatctgtcttacattagtttctctttgaaagaaagtttgttctcaagttggctgttgaagaaaatagtaaatgtcatttccttgcatttgcaattaagcttacgtggagcctttgtaacctcgagcttgtattacaccaatttgatgccaaaaaattatcatcactatgaacttcaataaaatatcccttttagaaatcaagtgtatggtcattgaaagagaagtaaagctaattatttgaactagtttaagctccttctacatcttcagttttatcaacttatcattcacttttcgttcaacagcactttgaagatggcaagcttgctcaatttctatttatctcttctaatgtacacttttttttaacaccgtaatatgaaatttctggttgtatctttaattgctagtgactttttccgtaattgtaatactgctgtctaccatcctatcagtatggcaacaatttagcctttgctaaccttttcatctttgcctaagtgcatattgttattaggccttggtttcttttggaataataagttgcttccaccatgttgcggcacattcttctaatttttaccaccaatttagcctgactttgacaaatttcaatgataaatacttattgaaacttgagatttcgatttcatagtcgaaatcataatcacgaataattgtcaatcgcttctattatcacatgattagaatcgtaatatgcacgatcctttcttttaggattgctcagtggtgtttcttggagagaaatcttttgcttcctgttgtgagagtttggattaaacccctcctatttcataattggtagttgcaaagtcagtgggagaaccccatagagtcataccttgcagtgtgatgtccccttggttattattgaaattagattcatatccaaccttgcttggatactaatcaatgtaataaaacacaaagatgcagaagtgtatactctatgtttagagagcttgtaaatctgaaaatacttgtatgtaatttaactagtgacaacctaattacctcttttaatcatctcactaggagtcctatttcaaattaattaaaattccttgacaaattcatctcctaaaaacataaaaaaataaataatcaattctaatgaatcataactattaaaaatcacattatgcatttagatcaccatatttgtcaagctatgaacaaaaaatttatgtaatatctcccgctactctcccaggaggaaacagttagctcagcttggttcagctacaggtgtatacaaaaccctcgtgaagtacttggttggggttccacaggtattgttcatgaaccatttttgcatgtactttcttttatgcagtt

SEQ ID NO: 15980 - DNA, 5620 bp, Cannabis sativa
gtcttctttatgtttagaaattttaccattttttgtttgaaatttgaatcttttatgaatttagtttatgattttaagactgaagtagtacttttcatgagttttattactttgttatggaattatgtgctgtttgttatgaattttatgagttctatgatattttatgaagttttccttcttattgttgaggcgtacacctggaggcatacaagaatagggaaaatgcctcagtacccttctgtttttcaaaatcttttaattgttttgctgatttttttttttttttgatttcactgttttctacttctattctcataaacattgtctgacatgaagtatttaagcattctttatgaaaagtatgctgtctgttaatgctgttcaatgtttgattcttatttatctatctccgtgttactaaaagtcatattatctactcgtattagagggccataaaattttcatttttgtatcttcttcaccattgccgtcaaggttcaattgtcttttgttcgattatcctcttttgtggagcgggctgtgttcataattgcatagggacctttattgctcaagaaagatttttaaaattcttttgtcagttgataatgggcaaaatggaaaaagtgtcttcctacatatggagaaaataatcagattgtgcatttaaaaatgttgattttggggatagttttatataatgtgttcatcttttataaagttatatttgtgcactgccagaatgttcttaatttttgctttcttttgttttgcaagatgatactcacatctccgataaagaacaggaaatgagccactcaagtgagcccctattaagtgtcaaggaagtggatgataaagaacagcagcgtgcaccactaatttcaccagaatgtagcaagctgcaggatgctccatctgaaatgcctttacttggattcttcaattctcgtgaacattgtgaagatttaactttaaaatctacttcagattttcatgatcaagtcatgaattcagttggcaatgctgaatgcttcttcgacaaccatatagagaaaaatgattctccggtaggtgatgatttaagtgcatcttttgcttctgtagctgttgaagccaataattcaaacaggtgctctgagcttatcagaggtggcagcccaattaggcttcttcaagactatgtttctgatgactgctcagaagataatcaactcttgcatgaggacaataagtccttgccatcatttatagaaggcgcttcaattcatagtggagatactaattgtttggagaaagaagcgagttcgaagagccagcacagtattggagaaaatgaaaaggattctggacgcctatctgaatccagcctgtttgaaaaggcggcagattgttcccaagatttgcaaggagaggtaaaggatgctgatgtggtatgtatcacaactggaaaaactgatgatcaagttatttctaagagggctaagaataaagaaaatgaggaaaaaaaggcaaacttagaatctacttctttgaaagtagatgagtttgggagattatttagagaaggttccagtgatagtaactcagattcagcatatactaacaagcatggtagaagagaaaagaggggcagaagtcaaagtcgcagtcaatcacctctaaataagaggacaaggagttcacggcagagaaaagcgaaacgaagtcgatcacgcaggtaccgactgcattatgattttgtgccctttttgcaggacctgttatatataattttatcttttagtattatatgcagaatacttttcttgattgtgttccagctggtctcctaggaagcgcagaagcaggagccgatctccacaatacaggcgtgcaggtgaacacgctggggagaaattgagatcaaacaggggtcgcattccagaatgcttcgacttccttcgaggcaagtgcatccgaggaggatcctgtcgattcatgcaccctggagttgacaaaaatgacaattcaaggtgcagtaggagaaataagatgaatccagaggtttcatctaattcaaaaaaggataagagagatgacaaaactaagaagttgcttccagagcgaatgagcagggaaacccaaattcaagtagagcaagacgaaaaagttgattggaaatacaatgataatttcattagttctgatctggttagatgttgtagcccgggcaaggtagctgatacactgttggagaagcaaacaattcaagaaaagtcagctaagacaaatccacaaatccttgatcacagaacatttatggagtctcaccagccatcatcaattgaaattcttccctctcagtttgttagtggtactactaatgtgaatccatgtgataatacttcccatgaggtggtagcttcggtgaaaacctttatccatcaacctcatcgtaatacttcagttgcagaagttcaaaatactaaatatctatctcatcgaatggatgattcatctgtgtttgatgcatcaccaaccaatacatccacaatttctctaaagaagttttctgacagtgatttctttccaattaacatcctaccaactcaatcattgcctaatgcaatttcacgtcaatcaaacttgcctgaatctgtagccttgccattcactgctcctaaagtgccatcttctcctagtcaacaccagtccccgcagcctcccccgcccccttctacctattttggtccacctaatcagcaccaatccttgcagcctccccctcccccttctacctattctagtccacctaatcaacaccaatccttgcagcccccccctctccctcccccacctccttctacctgtcctgatccacctaatcaacaccaatcctctcatcaaccccttcaccctcccccttcttttcctccactgcctccccctcccccttctcttcctcctccacccgttcctccctcttcccttacgcctcctccaccccctgctccctcttctcttacacttccccttccgccaccaccgccatgttcttctttgacccctccccctcttccttctcttcccccgccccctctcccaccaccaccacctcctcctacacagagtgtcagtgctcttcatatgccacagttgcctatggattattacaacttgacgccacaagttgcatctgctcatataagaagtccccatacctatcatcaagcttctttggacaaccattatccaccactttcaattccaccaagttcctcttggacctccttgacaccactacctcctcgaccatcctatgatttgcacttcagtaaaacatttgcaacacctggcgtctcttctcaatttcaacacaatcactttcctccacagaatgactttggatctcaggtgccagttatgtcctaccgttctgaattttgttccaattctcaggttagtagtgaatttatgcaccaagtttacccttcgatgcaggagcttcatcaaccaaaacttgaatcttgtgtgtcagtcaaccaaattactccatttggagtagctggtcttctcagggaggaatccattactcatgatttatgtacttcttccgatcgtggaagcttgtatcagagatccttgcctcctccacaggaattagttgtgaatagagtgttgtcatatcctagtgacctttgtttaggtgaacctttaaagtcaacttctcatattcattcttttccacacaggcaacatggtgccagccatttgcaacctcatggggatagtaaagaggtctgtcaatctcaatacccattgaatctattggaaaataagaattcatctggtgatcctggttttggggtctcaaaaatttctgctcattataacccttatgcatcaacttttgatcagccattgagctccaaattcagctctagcgcttttagtcgcgataaggctgcactccgtggtaatcaatatgatgcttctagtttaggcaatgtcatagttgatgggaaagttgttggcagcttcgggtctagacagacaacttcctcaccaagttctgcgagagctagtggacagattttgcctaggggtggtggcgaacagtatgatccactttttgatagcattgagccatcacctaaagctaaaagaaaagctcgtcgaaggtgggaaccagcagtagatattgactccacagaaaagcacattggctcccaaaaccctttgcattcaaaagagaacaacgaacttgaggttgcagctgctgcttcaacctcgtctgtggatgatgagtttggtgagacagctgatgcagaggtgggtgttgtggaggatgagagtcatagtgatccagttgattttgctactacaggagagatagagactgagatgaaaacttcggggaagaaaaagaagaaggattccaaatcatcaaagcctttcaagattgccattgcagactttgtgaaggatgttctgaagccttcatggaggcagggcaatatgagcaaggaggctttcaagaccattgtgaagaagactgttgataaggtatctggggccatgaagggccaccagatacccaagtctcaggcaaagatagatcattatatcaattcatcacagcggaaattgacgaaacttgtaatggtatatcctcttctttactgtttctttttctgttcataactaaaacaaagttttttaaaattgtttcaaattaaggatcaacaaagacccacgttaaccataatataaaatatttctgtttagtgatataatgaagttgttgaaaagaaaacaagagggccgtaagattttttaacctgatacttgatttatggaaatttttctcatgacgtgtttggtgatggaccaatgaatctcattgaaattgtcttaaactttctacataataaattccaatcaggcaataaaatggttgtacacgacatggtatactgggagaagattttgttgaaaaaccctcagaatcaagagataattgtttggatttagattggataatcctctataggttctctttgatgtttaagattgcactatgattttttctgtcattattatattcattctctgatcattattctccttgtttttcagggttatgttgacaagtatgtcaatgtgtgagactaatgatcacaatgaatccaccatgcaatcttcgaagattttgaacaagtatgttgtttcttcatcattagatatcttattctatgctggcgtgcataagaaattgattttgtatcgtctgagatctttgaagctagatgggaaatatataacttgataacattgtcaatattttgtaaagttttgtatgtgcaactaggagattttcagcacttgcaaatgttcaatggcaaaatagttctgtagcattgcctgatttccaactcaggtttttgaacgtgggtatcttttttttggttcactggtgggccagctactttacagttatagtaaattgtagctgccattttagtttatagttccatttagagtaatttgtggagatattcttatatcttgcaatttaatatctaagtaaaaattgatagtaaaagtactatgtgaaattttatggtgcacctcc

SEQ ID NO: 15981 - DNA, 8909 bp, Cannabis sativa
cttctctttctctttcttcagagaaaccctaaaaccttaaaccctaaccttttctctttctgcaacaaaaccttcaacgccatttctgacacccaatcttcttcttcctctcattgctctgctctgctgagctctccaccatgaacaacaagagaggctccggccctaagggatcaaagaagggcaaggcttcttccatctccgacgaagcattcttcggcaacgatcccaagaggcggcggaagaagaccaaaaatgacgactttattgagagcagcgattccgatgacgaacttttcggcggttccgatggagaagacggagctaatggggatttggtggaagagactgtggacgaaactaggaagaggttggcgactgaacttttggaaaaaatgaggaagtcggcaaaggaagaaggtgatgacgatgatgagggaggtgatagtgataaggaaattgaggaaggtgagagagactctttggttgctcagcttttgcagcagaagcagctcgaggagagcggcaggcttcggagattagttgcatcgaggtaatctcttcacaaaaatgccaatgttgatttttcatttactcattgaagtgtttttcgttcatggttcaagttgaatcacctattagcattgtgagatttgctattaaagactaatcccaataaaaggcgaagttttctgagtgaatctcttcaaatttagtgacccaacttattatcaaatcgaaattcattaggaggttttatttgtaacaatgttgaagacagttcttagctgatttgaactttgtaaagggtaatctaaatcgtgataatcattcgtaggagtgtataactatatttttaacttatgttaatgaatatgtttttttttttgacaaattttctcaatatttagggtgcaaaagccagaagcttctgatcaatttcagttattagtgaagcatcggcaacctgttacagctgtggttctatcagaggatgactcgaagggcttttccgcggctaaagacggtactattttgcattgggatgtagaaagtgggaggggtgaaaaatatagatggcctagtgatgcagtactaaagtcccatggtgccaaggatccacaaggccgggctagtaagcacagtaaacttgttttctcgttggctgttagctcagatggacggtatttggcaagtggaggttctgaccgtcatgttcatttgtgggatactcgtacaagagaacatattcaggtaaatattttttcgtttttcagctactaagattgtcactgaatataattaacaacatgtttcttagacttgaatggagttggaatgaaatcaccattcctaaacatggaggattcctttgagcaatttaaactttctagagggatctattaacaaagtcctgctgaactctaaaattatgaaacttcctttaaatgggttaagagatgagggttagatatatgttttcatgattgcctgacaatattttctgtctagataactcttatttgggccaatatgctgatatatattattgtaaattataatctgagagaaattcctaattgagaatgcgggtcgtatttcgctcatgtgaagtcaatgtatgtgtttgacaggcttttccaggacacagaggacctgtttcatgcttaacgtttaggcaagggacttctgaacttttttctggttcttatgatcgaactgtcaagatatggaatgcagaggacagagcctacataagctctttatttggtcatcaaagtgaagtgttgaccattgattgcctacgaaaagagagggttttgacggttgggcgtgataggagtatgcagttatttaaggtagggtaaaatgacttctttcaacagaattttttttcacacgagtgagagagttgtctattatccactctagcacatttggttctgatatcagtctcttgcctaattaggtacctgaggagtctcgattagtgttccgtgcccctgcttcctctctagaatgttgttgctttattagtaatgatgaattcttatctggaaccgatgatggaagtgttgagctgtggagcctactgcgaaagaagccggcttacattgtcaagaatgcacactctttgttggctgcaaacaagaacatagaacagaaggattgcccaatgattcctaatggccatataggtaaggatagtgatttatttccctttttgcccctcttttttcttgcctttgttgaaacctgaagcttctttcaccacattgcttttgtatgtttattttcattctacttaccatgaaagatgaaagataccacctttggatgttcttgcaatttatttacaatttcttgtgctggcttgtttacctctattttcgttggatcctaaaatgcagaaaatggtcaccacacttctgaaaaatatgattcttcatctgtatattcctgggtcagttctgtggccgtctgtagaagtagtgaccttgctgcatcaggagccggtaatggttctgttcgtttgtggagtattgggagtgaaaccaaagacattaaacccttatacaatctacctgtggtaagtgaaaaagaagtaaaaaatttcttttattactccaaaaggatggaaaaagatatgaatgaggagaggtgggagatgaaagaggaatgatattacctttcatcaccaaattttgaatcattctttttatcttttgtgcaatgcaggttgggtttgtgaattccttggcttttgcaaaatctggaaagttcattgttgctggagtggggcaggcaattttctttcccttgttaactcccctctatgatttatgttttcctttatgtgttctttttcttttatttgcatgtgttgaaggaaaatttaacttatatttggttttagtgaagttgaatcataaaaatagtcagtggaagcatatagtacacaactttggcatagtgaattagtagagactagccgctagcattaagcatgtttagttatttcatcatttgacaacatttgaaaagggtggggtagataagatgtgaagaaagaattgacttgagatgctactcttagggggtcatgtttgaaaatatgtcaaaaaaaaacctgaatgattctcagtcatacctaatgattcttggtccgtcctgatttctggtttcttacgggaatctttgattttacaggaacctcgattgggaaggtggggacgcatcccggcagctcaaaatggagtagcaattcatccactcaagttgctttcttaagatggcaaaatcaaaaacaattttgtagcttcccaattttttattatacagtgagttgataatataaatgaaaacatttttcttttcctggttaaccttaatatatatgattctgctcattatcagttatcttctttgtcttgctttttaattgagcatattatatccccagacagagctgtcaaactcgaataattacattaagttttccagcaaaaataataaataaattattacattactatggtaaattaatgtgttgaaatcataaataaagatagatttacaaataaatagaaaaggaaaatgtcaacaatatcgtttcaagaaagaataacaataatagcaatcaatatatattcagattagcttctgaaatcatttggacatacatggatgtacttaagaataatgaagaagaagagaaaggaaattatgtattgacagatccttgatagaaaaaaaaatgtatgcaacacgtgagagaaaataccaaaatagttgataaaaaacattgtactactaaatactactacaactaatggctagagagttgttcgcaaatcagaacctccccacaattggtttttgttttttcttttccttaaaatttgctttttcttgaagttgaggcgaagaagaaggggagagcaaattctcaggtataggacaaaaaatcagcagccttgctttttaatacactgcaccatcaatgcacacacaaggcttctatataatacagttgcctagccaaccatccgaaatgtctaaaatccaactttcccacctgatgatcatcatcaatgtgttgcttaaattccgagttagccccagttaaaactgaatttgagaatttacatcagttcccttctacttcgttttcttttttatcttcagtagtggctatggaagcgctggcatctttgtcaactgctgtctcagtaatgccagtagtggcggggtctgaaactgcagtctcatcatccgattttgatggtgggttcttgtcctctgattctgctggaggtccactggcagcttctttgtctactactttatcaggagacgatggagaaggttcagcagcatcagaagattccaaaggttttgcagcatctggggattccaaaggaagctcgccatttggcaggatactagatgggtcaccagagtccgaagtctccctccattcaacccactcaggaggtttatcggtttcctttgattccgcttctcttaaagtgttagattcctgcaacacattatcttctgattttgcttctggttcaacagaaggtgttgcagtgtcgatcaattcatcatcctcattagctttatcgtgttctgaaacagtttcgacttcaactgtaatgtctttaccaacattaacaacatcctcaccaccgctgagagcactggttccttcagcattaggtgatggggaagcaagtggcccagttgaacgctcattgggatcactgttgtcttcttcgaaagcaaaccagttggaatttgtaaagagagaaccactgcaagaacaaaagtatcacattaagaaacctttgagacagctcaatagacaggatggaggcaaaataaaatcgacctacctatcctggtcatctcccaaccgcagcgaagatatgacaacttcagcagattcgtcatcgaaatagacatcctgtccaagtgtcatgcaaaaaacttctcattaccacaaattctctacttcaatatacacgcgcaagaaaaaactgatgctcaagctaaagttagtaaacacgcctctaagactctttatattctgtctatggctcacaatcacaaaaagttttttgcttattataattactatttagagaaaagaatgaataactgctacatttgtatatattgtcaagcaccctaatacaagttctacagattttatagcaaaccatccatgcagcaaaaaaaaagatgagattgaatattagcaacagaaaataaaataacaggctacagatcctgctagtaatacaggaagataaagcaatgcagcttatagggtccaagatttatagttgcgaagtgaagcaaagtggtgcatgtttgagaacacatacatatagtaacctcaatcagtacatagaacaactatttagatcagcattgacttctgtatagcaacttaacttgtataaaatacatggctcaatcgagtaattatcagcgccaaacaataccctatatactacacaagagtagattcccaataaaaagcaaataaaaaaaggggaaaaaagtctcgtacctcgtcatctccgcgttcaagcgatccgtggccctgaaatgcataaagattttccagttacaaagagataatcggaacacagttgaaatagcatttaggaacactatcaatgttatgaattcaagctgtagcaatagatatatacaagaaaaattatcaatagatcttataacaatcagactcacaagacaagaattagataatcagattgcattctatacaaattttactgtgaaaaatttcatcatatcatattttttattatgcacctcatccatatcattgctatacatgccgtagcggaaagcctgactcaagttgtttgctagagcagcaacatcataatctctatcttgataatcatcatcgtcactgtcccttgtccgatcctgtaatgcggtcggtcgcctgttatagggggaagagagaggtgttacataaatacatgcaaaaaagcaataattttaacccagattaaatatatttgtggccatggtaggaaatttttgaaaagaagcacttgaaacaacaaaactatagatacatacttgaagaaacaattttaagcaaaagaacatacccacaagcccactgataaacattctccagagcattacgctttgctaggacatttgtatgatcagaccattcactgtttgcctataagaagataagtaaatatagaacaatattaatgaaaatagtatagaatactctaatttctggaattagcttcttttaatacacgcattttacttgagattaacatatgcagaggtaaaagatatagaagtaacttaaaaaggaaaaaactgctcgcaacctaaaacttgataaaacagtgaataaaattttcagctaaatgaattatgcctgcaaacacttctaagaaaataaagaaaagaaaacctgcagaagagcctgaacgtcactatttgtattcccaagttgattaattttgttggataaacgagtgatatgtccaatattccctatccggggtagcgatctgccctcagcagggactgttggctgcacaacaagaatgaacatgttaaatcacacatctaacatttgcactaaaaggagaaacaataacaaaatgcaacacaagctcacacagaatacacaaatcctgataaatttaatgtataatcaccaattatgaagaagtggaccaccttgtttgaatcagctgtcaatgtggtattcttttcagcttcaagaattttcccaacaagattacagtcacggagaatatgttcaacaagtggagcattcttgctctccaagcatgaatttataatgttctctacgtggtgatgcagaaagttattataagggtacctaaagaatcaacaaaccaagaaataagagaataaacaatccatcacaaaacatgtgttacagccttctctttttctttttttttttcagcttggaaaagatcttaaagacttactcaaagaacaagtctgaaatcctttgtagagctccaagacggatcaattccttctcagcagcttcactaccaactgccagtaacactgaaataaactctacaatctgaaaaatttcccaattcagcgcaatccagcacagagttcagacacatgttagctgataagcttacattgatgatattattacacaattcaagcagacatcaaacaaaaaaaaacaaaaacatttacgtaagaaacataaaaagtccccacaaggggcaaatagaaacaaaccaaaaaaataaggcaaaaactgatctagaccagataatatggcccatgaatatacctttaaacgatgctttcctagcgggggctgtaactttccatatgtagttaacaagatgttgtcagaagatgaaacatctaaaagcttgagcaaatcacctggcgcaacaaaagagataaatagtcaagccataattttaaaactagcaaaaaagcttcattagctgatcatgtttgaggataagaaacaagagcacacattgatcaagcataagagacataaagattaaagggaaaccaatgtgacacgtataaagaacttggaatataccacaagcttgactctttgaacacccctcttaggtaataaaattatataatatagctcacataaaatgcaatactaaggcaatccattaagcaagcttggatgcaatgccttacttgaattaccgtttgtttgaatgcttgaggcagtgccaatggacaaaacaagttttgagaacaaaatagtttatacaaacctctaattgtattaaaacacagctaccaatttacaccgagacatggaaacatgagctaaaatagatcggcaatgaaagaaacaaattttcacctaagctctctagcatgccctcaactgtctccggattagcagttacagtggacccaagagtcatttgacggccaaacatatgatatgctcccatgtttaacctcttagggtctaacaaagttatgcatattgtcagcgagttatttagaacagattttggacgtgattcctccaaggcatgacgaaacaatcttccaacaaaactgacaatagaaaaattaaattaattctaatatgaaagctagagcataacactataacagtataaagcatgatgtataaatactaccttgggcttgaaattttggccgaaagtccagcaggtgcaaaacgcgtaattgcacaaagtgtttcggctgcgttagcatgaacttcaggagaatcctgtaaaattcattttaaaaagattcatcatgtaatgttgagcattggaagaccttatcactctctagatgttatatttacattgtcattttcttcacagacttcaacatacaaccaagcatcataagagagaactggatcttctatttatctaatatagttaaatataaaatgatatagctcaactgacatgagaatcagctatgaagcacaactacagaaagaagaaaaactgagaagagctgaatgacgaaaaatatgcaagctcactaaacatagccctagtgtacacttcaaagtacttactgaagagctgaacttgtccacaatcatctccagcacatttgtatcttgtatccactgcactgcgtcagtataatttgcgtacatatgttcatcagccccgatcaaccttattaagacctattcaacgagaaatattatttttcattataacaaatgtgtattctagcacaccaagtgcatggggtcaggaaaacaataattttccttcaatagagagtagtggcaataagaagtcccaaaggttctctacagttgggtaaattgaaaacagaggacaaaaaatgaa

SEQ ID NO: 15982 - DNA, 8561 bp, Cannabis sativa
  modified_base (3471)..(3482): a, c, t, g, unknown or other
  modified_base (4410)..(4410): a, c, t, g, unknown or other
  modified_base (5164)..(5165): a, c, t, g, unknown or other
  modified_base (6774)..(6776): a, c, t, g, unknown or other
tgcctttactaatccaaattactaaagcggtcattacatatcgtttatcgcttattaaaagactcattgtcgttggctaaaagtgaagtcaacagttacgctacactgcgtctagcgatgtgcgcacctaagggtggtgcagttagaaaggtcttgcaagccaggcaagaggatgagataaaatttcagagctctgatgcaaagggtggaaaaagttgaaacttaaaaaatgatggttgctgtaagtatttatttagcaccaagaagaggtgccttcctcgaggagtgaacagttcgaatcgttcccaaaaggggtacctgaaggttaaatgaatgggaagttaagacaatgtattggctcccaatgtttaacttccatcaccgcacgcattgcaaaaagtgctcagtaaatgaaaagtctgctcaatcagttcgatgtcgttttggcgcctcccaaacacgcgcttagcacgcgcgtaaattgtaaaagtcaacatttaaagttctgtcagtaagaaaaagaaatgataacttctaccagtgatacttcagctggcgactacttgcatgacgtaatgagaaactcacattatcctacgcgtttggagtcaatcatgaggaagcactacgagctcccagactgcgctacgtcccagaagcttggggggtaaatgttgtctagatttttgtaagcttgacatgtggaccctaatctagaaagactcaatattaatcagccggtctacacctttgaccaacgatttcgagaagatagaagccctagctcgcggaaagggcctccatgaaaggaactcccctgcaaagcaacgatgcgggggactttcgcaattagaagtctctcccaatcctgggaactgaagccaactactcccgtaggacttaagttgagtgctcccacaaagggtatgaatttctcgccaagtgcccgaaggtgccttggaaaatgtctagctgagctgtaatcccatttcgcggaggctctgctcatacatgtctgactacagacttagtagctagactttctcaggtaacgtattaccgagattcgcccccatgatatgccatagtacaaagcatgcgcgcctaatcgtacccaccagaatgatccaatgaccattgaaaagggaaatttaaaaaggaagaccttgggacgacatgtgtatgatattcggtctgtaccatttgacacccttaaataccatatggtaaaatgaccacctactaaaccaatggtcagatctcgtctaaatgtgatcaatccaagccagcgcatggaggaagctgacctataatacccctgcgttcaataagatagcgacaagactctttaaagacaaaaaagagaaaacactatatactacttacttaaaaactcttacaaaaaaattcttatgaagcttcttcttcttcaacacaaacgagagagataaagagttttggtccattgcatatagatttgcattaatattcaccgaacgaagtgcctaataaaatgaactcgtggactaaggatagttaacgcctgaaccacataaaaatctcgcatttgttatttaatctgttatttcttttctaagttctatttatttagtttttgaaaatttcggtaaacaatttcacaaacaagtataaaagaaaaactaaatgaattatgcatatattacttttaaattaaaaaaaatattaaaatatacttttactttttctatgtgcaaaatatatgcacattattctttgagcattataaattaacaataagaagaattttcttgttcttcaataaaatttagtcaaataattttataatttattgcatataattgatcatatcaaaacaaccccattcatgaacttcaggtttgctataatttatatttcaatgaaattttcgtatgataatttgtaaaatcactacaacatataaataattattacaagttctatttttatatacaaaaataaaataactatataattctccaaaatttatacactcttcaaaagtcactattatattttctcattatcagttcaatgatgtatacattcaaaaggtacaagacaacttcatcatgttgttgtaaaggttaaatagatataagggaaatttgcggcataaatatctattttgttcaatttgttgctattaaatacctaaaatctaaaaatggcggcaaaagtactcaaatcctcaatttctattatttctgttagtacttattttaacagttttgttaagtcctccaagaatgtcacatgtcgatttccaattggtatattattattaaaaattattaaaataattttaaaatgaaaaataaataaaataaaatatttttttctttctttcttctctctcttctccgtcccttcaattttctccttctcgacttccttccatctcggtttacaaacttgtctgtaccaaaatgccactaggggaaaaccattaagtcatcttcctaaacaaagaatacaaagggggttgataaactcgagaaagaccgtctacatatagctcggagaaagaccgtctacacatagctcgagaaagaccatctacacagctcagagaaagaccatctacacgtaaaaggtctcgacctctgcataggcctcattctccacatcagaagatcccatttcctgcagccgagacctcattcccagcctcaggaaattcctcgatactagagagtgtcttgtacaaaggtcttcttatgcaagcttgggtcttgggctggttgagttctttagtagaatccaagaacatgccaaccagtactaccttcttcctggataccttgtcagcttgaggaggacctctaagctcgctctcaaaatctatgtccattcctgtggagactgagataaaaaaaatcaatggaacaaaaaaaaaataatgtgtataatccagttcaaaccaccattcacaagggatgatacttaccctcaaaaatatcttgtgaggatcgcccgtaatgatcaacggtgtttccttgccttggattgatcggaagctcctcagccttggaatccttcgttttcaattcaaattgaggtttgaagttctgtggaacgtacagagaagaaaagtggttggtgcattctggtgttatgaatttggaaggataagtttctgaactaagatgggacatcttagcgagagaatgacaatccaatctcaagatgaaactcaccaaaaaaccagaagtttgtggaatatggcaagcttaagccaccattttatactcaaagtccagtaataagaaggccaaaggttgggaaatctaacggttgggagtgaggcgaaagatgaaaagacggttcataatgactctcaaaaccatacaaccgccaaaatcaaaggacgtgtttttccaaaagggaattatgatgaaaatgtcctctacaattattaaaaggcactttttattaaaaagaactttnnnnnnnnnnnntgttatacccaaaatttggctaccattttaatagaggacacgtgttaagacaaggggaatatggatcggtgaaatctcttttgatggaataactcattaattgcgtaaataacatagtatacttgcaactcgctgactataaaggtcttatgcgaggtaaaggtatacaaactgttgcctcaggtattaatgagaaaccaaacgtcattggatgcataaagcgagacatcaacttcgttacacctgggaagacaaaagcaatgcatatcgattgagaagacacttagcgtataatataaaaactaagtataatagttgggcagactcatgacctaataagcgaggtgcttatatcgctataggaaggcacactcctgtgactttcgccaattaacttcagacatcttttagtaagacttatagtcttgacgagtcagaagctaacattcaaatgactgctgaggtactctttgtaaataagaactgcaattatcagaatgaagcatcaagcctttaagcaaagaagcagcaaggtgtacatcatcgacctcagaaaggtaggggagaaagctcatgcttgctatcaaggtcattggaaccaagttcctgtcgagacatcccagaatggtacaattacagacgtgtttaaacacaccatcattttgacccagtaaaagcaggaaaatcatagttgtgtgatattcaaataataactgcatttagactacgtgatatgtaatcaaactccacgatttcaaggaataaacggtgtaaagattacaatcaactttgtaattaaccgcccactatgtgattataaatagtgacaagttagatcaaaaaagaaacgaaaaaaattatacaaaaaaggccctaaaagaatcatcagaaatctaataagattgactcgtgaactatgcagaatttnaactgcaaaaccacgtaaaaactcccttgtgctaagacttttttctttactgcttttatttttctgtgtgatattgtcactattaggctcatatttggttaacaaaaatctgctttaacagtttggtgctttcattgagagcctttgtgaaaaagctcagaaaaaaaaccctcctttcttttgaagaaaaaccatttccttcatggctgaaaacctagaaaatgttaatacaccacatggggaaactcatcaccgttctaggatagagcccatgggctccagaaggtcttccaacccacaatccagacagaccacccgctctaggaggactcaacctgagggtggccccgacacttggaccacacgttcctagaggaccccacctgacgttggtcctagtacgcgaacaacacgctcaaggagaactcagcgtgtgaatggctagaatcctggaatgaggtggaggtactcagcctatgggagaaggcacttatgaaatagaaaactaccgccttagacgccgcctaaaggaggcacagtagcgaaacgctaaattaaagcatgatgcagccgcaactagggaggcgcaagggactaacacttaaaattaacctgaacatggagtgagaagaccacgaggcaggcctcgtggctcacgaaccaagagataggaaaatgtccaggaaggacaacctagggaaaattagattccccctgaaaatcagaatgatcagccagaaccctctcatagaanngagaatgggaggcaaccagaaactgatgaacaagaaattcctcatgaaaatgaggaagattttaggactcaacttggagaacgtaggtcacctgcgagaaatcaccagcattcttcccaaacctatagagagagggctcgtacagaccctaatgggggaaatacgacaaaccacattcagggggaaagaatagagcgtgaagaagcaagtgtgaactcagggcgctcaagggcccatagtcaatcaactcaaagaggagaaagtactcgacgagataatgatcgagaaagcatgggaccagtaaatttgcgagtcactcgaggatgaagtacatgagaaaaacgaggtccgtgagtgggacgcaatctgtgagtaaaatgaggtctaccagcaattactcccaaccgaatttgtgagaccacttgaatcggaagaaacctgatcttcgccaacaactcggtccaaagcaagaggatcctatccaattacgaatagaggagttggaggacaagttcaggagatatcaagtgggagaattagggagacaatctggatatgactcatacgaggagcttgagccgtatcacccagatatcatgaataccccttttttcttaagattttaaaacccacatgtctcatcgtatgatggaaccaccgactcggtctcgcatttaaacaacttcaacacaataatgcgagctagtaatgtgacaaataatttacgatgtatcttgtttcccacctcgcttgttggagcagcgagcagctggtttaacaagtttacttaccattcaataacttcctaggaacagttgtccaggaatttcaagaaacaattccgggctgcaataaatagacgacccgaagaggcctcgataaccaaagtaaagcaacagcccggcgagacacttaaggcatacttaagtcgttttagcacagctgctgctagggttagaaatttggatgatagtacacaacttacagcccttcaggcagggatctctactaatccattaaccgctgagggcgagctgtgggatgacttacagggtcgtccagtgagaaacatcactgagttcaatgaaagggcccaggtgttcgtttgaaaagaggaagcccgaaaagaaatgaatttgttgaaaacaggctcgggaggcaaacctagcaatgtttcaacaagcactgtctcaacgagagttgataactcggaggcttctagctcgaagagaaatgacagttctaatgaaccgtcaaaggataaaaagaaacagaagaagcatgataaatacgtgccagtgtatactatttatgccaagcttaatgaaactcaagagaatatttacctcacacatgagcaaaagatttccttcgacaagcccgagcccatgaggcatgcgaggaacaaaagagatcctaacaggtattgtaaattccataaggatattgggcacacgaccgacgaatgtcgccagttgaaagatgagatagaaagtctcatcgctcgaggccacttcaaatagtatgtgaaaagatagggcaatggacacaaccagcccagtctgtccaacaacccaaacaactaggggttacaacctcttcctgttgnnngagaggacatcctggttatttcgggagagcccatgaggcatgcaagaaacaaaagagatcctaacaagtattgtaaattccataaggatattgggcacacaaccgacgaatgtcgccagttgaaagatgagatagaaagtctcatcgctcgaggccacttcaaacagtatgtgaaaggacagggcaatggacacaaccagcccggtcagtccaacaacccaaacaaccaggggttacaacctcttcttgttgaaggagaggacatcctggttatttcgggagggtcgcatattgccggggagagcaataatgcccaaaagagatatgtgaaagagatgaagaacgagcagtcggcatttgccccaaaaccttccaagaaggtaaaaactaaagagcctccaatcatattcacggaggaagacgagaaaaatgtgagatatcctcacatcgatccattggtgattaccattcaactcgccaataaaaggataatgagggtgttaatagacaacgaaagctcagtaaacatcctttataaggaaacgctgaggaagatggggctcaaaaaagccaaattgaagccttgtatagtaaatctttgcggcttcactagtgatagtattgccagtctgggcataatcgagctcgcattaaccttgggcgaggcacccatatctgccacagttatgcaagactttctagtcgtcgacctgccatcgacttacaatgtattgttaggtcgtccaacattgatcggactaggggcagttagttagatcaagcacctatccttgaagttccaaacaccaaaaggtataggagtggtgcggggcgaccagatgctagctcgcgatttctatcgcatagagctgcagcacagaaaagccggtcataagtttatggcaatcttcgctgaagaaagtgtaaagaaggacaaagatcttgacccccggggtcaagatgaaagaaacttattaaaaccaattgaagagttggaagaagttattctcgacccaggaaatcccacaaagtgtgtttacattgggaagaacttgaacgagcagctgaaatagtagctaataagtttcttaagggcgaaccaagatcagttcacctggagccatggagtccttaaatccaacaatctcaatagttcaggggacatttttaaagaccttaaaagttcagggggcatgatttagtacaatttgttgtgactaattgtatttttcgtcacaatatttattgtgactaaaactaaattagtgacaattgtatctaaatactatgttttagtcgtaagtaatattttattgtgactaaaagtcatatttagttacaaaaaaattatgttgtaattaaaaacttgtcactaaaggtaatagttttttgtagtgtaattttagttttgttataatttttttgtggtatataattttattactaagtatattgattttcagtgctaggatctataatatattattatatatatttaatgatataatatatttatttgttgtagttataatatattaatatgcaatactagtaaatttatataacttaattttattattatataatttttcttaaaaaattgatataattaaagtatgttcgtaatttttattaactaatttattatatttaactattttgttaaactttttaaaaaataaacatactacaaaaaattttatttttagtcacaacataacttgtgactaaaagtgaaaatgttgtgattaattgtaaattatcattcctatattgtgattaaaa

SEQ ID NO: 15983 - DNA, 4123 bp, Cannabis sativa
ctcttttcttcactgcatcataatatataatgaaatcgatgacagtcgacagataggaggaacaacagttcttaaatattttaaatataacttcaggaattaccgattagatgcacctgggcagaagcggtggacaacacaccggccacaatttggcgtagaatggacaacaacattagcttgcctgtacagagattaacagatacagtgccccacatcgattggaagagaagaaattgcaaattttagagggaaaaaaatgaaaagattgtcctattaattactgttattttccattcaacaccccctactaagaatcagatacaactcacatgtgtatcggtgacggtttaagcacaaatattaatagctgcaagtatctataatttactgagtttgacaatttatttgcaaaaatattgagaataaaaattagagcgaaaaataataagcttgccaccagtgatatcatctacccaactggttagcattagcagagtggctaataagatctcattcataaataaaataatcaaacaaatactcgactaactgtgaacttctacacaaaatctagcagcaaagttatgaaaacttctctcacaaagttaagaaaaaatgcaaaatcttttgagtacactatatcatatttggtacccgattttaaataagaaccaaatggaatgaacatccgtattccagtaaattcatttcctattttcacttcactcatgatcattgatcaacaagaaacatataagttatttcacgaaagctatcacacctgattgttttcctcgttacttttgggttcatcgacaccatttagaggatgcaccttcttgccttcttcagctgaatcaacattggagcaatggttcttcagaaccattgaaatatctgtctctgaagctccagcaagtttaaaccgctcaactgcagcatccagattcttcttccaaccacccattcctagtttacactctacttgggatcgttcaaaaagcatatttccccagaataaatgaatttgtgatctcatcactgctgcttgttccgctgcttcctcagctgaaatctcaacctgaccaactactccagaggactcactttcatttccaccttgttttttccttcttttcaggaattcttccctcttgactgcatttggatccttgagttctttttctctctgctcctccaacttctcccacatctcagtggcaactttcatcttctcttctgcactgtcaaacagtttcaatgtttctgaagaatcccaacttgcaagatctattttcttagcaacagcaaaagaccaatgaagtttagccatttcaaaatgttgttgtcccagtgccaataatccctcgtaaaagtccggcttaatggagagtgcttcttcatatttctccctggctaaagaatatttttccttaacccagtcataagctgtttgaagttgggtggtcactacttcttttccagcagcttcatctaaaggaattcgtttcctagctgcacacatatgaacatttccccaattgaaaaaagccaacgcagccacctcctggaactttgaggctgccttatcaaaaagactttgagcctcttcactagttactgtctcctcaagtgcctctgaacacagctccattccaagctcatgcaagtcaatatgagcatcagggtcaataccaacatgggtgcggaaaagttgagcaaactcaaacagccaatcatccatttcaagttcctttccctcgggaatttctgaaggtgctggtttctcttttggaacttctttatctgtcttatcagctacagaatcaacagcttccaacaaagattcaccaagcgaggaatgagatccactttcatcacccttaatctcattttcggaaggtttctcctcttcttcttccagaagaggtggctcttgttcaggacttacctccacaatatgcagcctcaacatcccaactgaatcaattttgtcagttccagaatcttttagaacatggttatcagcacaagactcggccaacctaagttcatctgtagaggttatagtcaccaagtccccatcactatccttgtacttgatcaagactgactttgacgaaggaaagcgtttggtcactacttccctcaatactctgaaaccacaattaacaggcatttgggcaagcctaatgtcatgatcataaacaagcttcaatggtctccattggactgctgcatccaaaaactgcccatgagatgaaaatgacacagaggaagaagatgatggttccttttgattacctaaactgtgaggttttgttgaattgcttgacggcttcaattgaagttttggtaactgtgttttggactcagcaccattttcagctgaaagaattgtctgagacttgtcagctttgttgtttgtagaagcagcagatagccctgtcaaagtagttgtcttcttttgcactggtcgggttggtagacacggtcctaacccagcaattggagcaccacggacagcagatgctccaagcgcagcaggggaagggcgactctgaaggtcttgctgtgcctcttgacgaggccctagtgctgtccgcagccgctgagcaatatccaaggcatctcgatgattcggttcaacccccaacaacaactgcacatcctgcatagccatttcatgcttcccaatagcctcaaatgccctagccctcctaagaagggccctgacataccttggctgaacctgaagcgccatagaacattcagcaatcacaatttcataatctataggcttcatttgcataagacaagccgctctattgccatgaaagactgccctatctgggtgatttttcggtgtgagcttaagggcattatcatactgctcaagagcacccacataatccttattctgaaacctcttgttcccttcctctttaagctcatgggccctcttcaaaaatatggaagaatccaaatccacagcaccattagcaataggggttgaaacgttatccccagaaacttggttcgaaccaccctttttcttccttcccccagatttccccatataaaaataacactctccctcttcttacacaggcagctagggtttaatcacacttgcactttgatagttcaactgcaccgcacggtttgagacggcaacaccgaacagggaaaaccaatttactttctgttttgaacgatttccacacgtaattggaaatttatctagtaaaaaaataaaaaataaaaagtgttaccatacatacatatatatatattgtaaagactcatttctagccttgaaaccttccaaatttcttctagttgaccatttttagatttgttttcgtctaaatgagtagaatgattatggtaaacatgatcttataataccacagtacacatttagaatttcagctacgatatctgggtaataaaattcaaaaatttcaaagaaattacctgggatacgacggagccggcgtaagaggtagttaccgtgctatagataatcggtgtgaggggagagagttgccgagctaccctgagagagagagagagctgtgagagaggtgagaaggttgttgggacttgggagagagacagtagacagagagaacggagagagagagagagagagagagagagagagagggggggttagggtttgactattgggctgtctatagtttgggcctggcccaaaatgtagctgacattattaaaaatattgaaatatatcagcttggtttaacaaagacacttttatacaatgtatcatttctagaccaatttttatatttataaggtcaaaatcaaaaaatttataaaaaattaaaaatattacacggttaattagtttttttgaacaatgaataaactttcattgagaaaaaatagtatttagtacatagtaaaaataaggtggaaaaactttcatctaaactaatttaccatgcacaattaatttatgagcaaccttacccaaccgaaaaacatgaatcaaaattaacagtaaactataaatatcatctaaaagaatccaatacagtctaaaagaaattaccacatatagttttacataaaaatattgcataaaata

SEQ ID NO: 15984 - DNA, 3326 bp, Cannabis sativa
  modified_base (816)..(817): a, c, t, g, unknown or other
tctctctcatgccattatataagaatagttggagagtaactttttctcttcacttgcctcggactcaaaagaaaagaaattttatattgtattgggtggaaactcgaaacccaagagaatgggtttcccattgaaacctctgcttctctttctgactctgtttttgttctctcaccaaaccatagcagaggatttcattgctttcaataatgcttcttcttcttcttctactaatactactagctcagtagccagaatactggctggaaaatgcaactggtaccgtggttcctgggtatacgacaagtcgtatcctctctacgacgcttcaacatgtccttttgtagatccagagttcaactgccaaaagtacggccgacccgataagtcttacctcaaatacagatggcaacctttctcttgcgtcttgcccaggtaccattttcgcctcttttccttgattttgggatcaaacttggcaaatgggtatgtatctatatactactactatgagtcaatagcttgttcgtcattattctattttatattttgcaggtttaatgggttgtatttcttggaaaaatggagagggaaaaagattatgtttgtgggtgattcattgagtcagaaccagtgggaatcattaacttgtatgattcatgcatgggtaccaaattccagaaccacagtgatcagaactcaaggactctcatcagtcacatttgaggtaagaaaaagctactcttaaattaaattatcgctttttcactctattccttccttccttccttcaatttattattattattattgttnntattattattattattttctttgagagtgtaaattgtctacaatcattgctggctggttttagtgcgtgaatatttcctctctactttagctgtctctttaaacccttttacacaaggtaaagttattgttctttaaaaattaaatttttttttggagtttgtacaaacaaagtcgaaagtatggaatatagtataaggctgttgagtttatcaatatatggttaaatttctttgactttgcactttcttttaggtccaattttaattgaatggggcaatgtgttttgatagacagagtagtagaactgtagaagtaatatcctctcttgtctgaactggtgaggtccaacttattattgctttaaattttgtgagagtggagccagccgtgattagtggtgctgttctgccttttgtgtatctcttactttcactttatggttattcaattttcttgatggtcctttctatttagtaataaatgttttcacgctaggataaataaagactcttcctttactttcttacatgaatatatcattataatttttaaataataataataactatttacatcttctatgttccaatatataaactttttcctttcagtccactcatacttacgtaccacccatatatgttttacatgtgcgagagatcttcttagcttaatttgattcaacagtatcgacagatgtagaaactgctacggtacctactccctgtgtattagttccatggttacgtatacaataaacaaatccatcgatgaaaggtgtgaaaccacataattttttttatgtactttgtctgtggtgtttggtgtgcctgttactgagggtgaaattttgtttgttgtgtaaaatgagtctacatctatggagtatggaccacttgtgctagttattactaattccataattgatatctaacttgagtacacacgacttttctcgttaaaatattggaccacgtcacatcacgacttacaaatattacaaatgggtaacaaataacatgtttcaaattttaatcagaggaaaaaaataaaataaaataaataattaacatccctttagatatttgtaattgtaatttgtagtctcttctgtgtgtgtgtgtgtttttttctggaaaatctcaaaactctcctttgtgtttgttaaataaatactgctatgagaaatgctctttggacaaagggtcaaaatagtaatatctcatctcattattactattattattgttcaaacttatttgaacataaatatagttttttttagagaagaaaataaataaagatttaaagaatattgtttattacattggcaggagtacggagtgaagatactgctgtatcgcacgccattccttgtagatcttgggagcgagagagtgggacgggtgttgaagcttgattcgatcaagaatgggaatggatggaggggaatggacatgttgatcttcaacacctggcactggtggacccacacaggaagaactcaaccgtaagatcgacttactactatattaatttatttatatttaattacaatgtttttagtatatattaaaaaactaatgcactctcatcgatcagatgggattacatccaagacgggaacaaattgtacaaagacatgaaccgtctagttgcgttttacaaaggactaactacttgggctagatgggtcaacttcaacgttgatccttacaaaaccaaagtcttctttcaagggatctctccaacacattatgagtaagttaaattttaaaacgtaattaataatcatcaacattggtacatataataatttgaaattgaaatgatatcagggggagggattggaaccaaccatcaaagtcatgttcaggagagaaacttccttactttggagtaagatatccaggtggaataccatcggcttctgtggtggtgaacaaagtgatgagtaggttgaagaagccggtgttctatttagacgtgacaactctgtcacagtaccgtaaagacgggcatccctccgggtatagcggcgaccacagtggccaagattgtagccactggtgccttcccggattgccagacacttggaatgagctcatgtacgctgctcttttcagttgatcgatcaactagctaatattagtattaagttgaaagccattgctattttttcttctttctaattgttatttaacattaattattgggagacaaattcatcatcaattaatgttgtttcccttcaattaggaatatcttcatcttgtatccttgcatttttcgtgtgtattgatttggggggttgataggggaaataaaaggggttggtgtagtaatggtaaaaattgtaattttgtaaatttcatttttgcattatattggtgtaggaaaaatatgtattgttgcccttttcaattaaatgaaatataagtctcataagagcaagtcatgggttctagtttgtatacatctcttaaatttacagttttgtttttttt

SEQ ID NO: 15985 - DNA, 3992 bp, Cannabis sativa
ataagggccgcctcctcgcccgggacaaaatttgggatagcatctatacgaacttccaccaggttcagttctagttccaagttcttctttagatcttcatcattattacttgaagtatttggggtagagcacggttgagctttgatcccaaaaattgaacctcgtgtccttttcttgttctttctttttgcattggagccattcttggtgccgctactccccggggtgaaagtgttaatatcaagagtatgaaggaaggttgttgaggacgaggctgctttgtttcccaaattaacgatatcaacttcaggggagataacagggataatggataaacaagcttttctcttcttggacccagagaaagaatggcccaagttagagaaaatagtagtatcatgggtaacaattgtttgggctgggccttcattgccatgggctggatcaaccaattcatttaccacttcctcaagggtttatcagtaggccacgtgacatatgttggttctagatgttgatgtggcacccttgatttataaatttcttcatgaggcctttccactaactgatctcttgtgggccctatgtcagccataagacttgcaatcacccctttgtctctttcatgattttgaatatgattcattggatggaattatttcctttgggcaggatgagggcgtggcaaacaagtatttccactattggagaaatcaaatggagaggggcgactggcttttgaaagcctacctccaacaatgccctgaatgggatgtcctctaccaacgttcgaatagctagcaggcccttgatcagaagctttcgaagtgttgttatcaacaggagcaatgactgtttttcccttgtcattttttgccagaggaaccctctcgtcggaggcaccagagacagtggcgtgttcaggtaatttcaggcgaggtattcttggatcaaagcaatttttgatgggaactcccactttaatccaagccccatatagaggaacggccttaccaaccgggggataagcgtattccgtaggtctagtgcattttgagtatgagtgcaccaaatgaccacagttgaaacatatcgccggaagcttgtggtatttgaactgaacccactcttttcggtctcgagaaatattgaaataaaaaccagctacaagtttctggttgagaagaacatcaacctggaacttaaggaacccacgacaagctatagttgctctaatagctctatcaaagtcaacataatctcccactttcttggcaataactctattgttttcccatgtgagataaggagtgggcaggccgtgagcttcaacccaaagccttgcattgaacatactaacctcttcccatctaccatcttcgggccactccctcaaattaaggagaagtccattgactatccacggacgtttcttgagaacttcctttttgtcagcttccagatcaaagaaaaacccccagagacctggtttcagagtcttcatacgccatttttcggaaagtgaccatatcttggagagtatatctttaatacgtgctcttgcaatggttcttcgaccaaaggtggtggctaaaactcctttgctaacaacttcagcgttaagttcgaaatctgcttccagttccagagacgtggaatcaaaaaactgcagtcgcatttcatccatctcgcctggatcgtttgcttcaatgtccctggcatcgttgtcctggttgttaatgtccattccaatatcctctgtattgatttcgtcgtgagttggttccagttggatgttatcgccagtagtcgggcctataaggcttacgtcgtgagttgtttccatttggatattatcgtcaggagccgaggggttcatgtccactcctcaactaagttgtaaaaactgaatctaacagtagtcggagaagaaacaccgatatctcatgtagagtaaaagtttgtgttcacttatacatagttagagtgtctttttcattttgtaaatttgttagttttgcaaattttacactgaatttggttctttgagtaatttatatgatatacttttttttttttaattattcattttatttttatatttatacaggatgtttattggactacatttatatctaaattcaatgtagtctctaattagtaagtgtatgtaaatagattattaacatcaatttttaatagttataaaaaaaatactgaaatttgtatgtaagttattttattcagtatcttatgctccaatacatgtttaattttccttccttgttttacttttatttttttagttcttttggttcttttcattttgatgcattctcctcctccatgttctcttattgtgtctcaactcctcacatttgctgcagttgttatgttatttcttttttcctagccagcttctatccttttttttggtcttctagattttaccatttcaatggaagacaagactattacgtctttcacattttgtggtacatcccactcactttggtgtcgcattgtgtacactgttcattcataagttgcttgccaattttttttggtgtagtaatctgaatagagcttgtgtagtaatatgttgcacgtgcatgttctctctctgaagtctactgtccatgattctttcattctggttaccttaagtaaatattcactgtttgatttaatctgtgtaatttgaaaccaacatttgttaaacatacgaaataacaataaaacaacccaaaaataacattaaaaaaattatgacaaccacaatattattatgtttaagaatttaaagtgctcaaacaacaagttaaaagaatttcgagatctagagcatcatttgtaatttcggatttaaaagaatttaagtggggtttaagcttctaacctttttgatgtgttgatttatattattgacgaagcttttgggtgttgatttgacgttaattttaatatttctgcttcatcgccgaaattaatagttatttttcaatctcgaaatccaattaaccgattcaatccaattacatctaatgtttattaaaaaattattcatatttatttatatataataaaatgtatcaaaaataaaaataaaaatattaattatatttttagtgtttttttgtgttgaatttataatatttggatgttttgtatatttgttttcattttattttattttattagttgatagtattgttatttcaattatttcaaattgttaattgcattaaacttgaaatgatgatatctttatagagtatttaacttaaatgaaagacgatatttaaattttacgtatttttttcttcaaatcagatatgtaattggatatccaatagaaaatcgattcaatctaattagtaattaaatttgactgaattttgaggtccaattagtctgaattagatgataatttttttttaatttaattactaattagattagatcgaattaggagaaaaatattaaatattaaattggatcggatgtccaacccaacctgaaacccgatcccaaaacacagcaccccaaatgtgcagctctacaaatcactacaataatcaattttcttacaaaattttaatgtgataaacttttttcatttcttttttaagtacagttaggaaatctaactacaaaaaatacgtgtcttttgtttctaaaatgtgttttttttcttacaaaaatatgaagtgaaaattgtaattacagattaggaaaatgcaaccaacaattagaaaaataattacatgacatttttgtaaacgattatcacatactaatttgtaactaagagaaacattgtctttaaccaagatttatggaactaatttgtgaacttaccctaacatttatgtatctaatatttatagaaataatatattaatgcataaaactagttagattagatcacattgaaattgttcactaaagatacaaggttttcttcttctccatctacaacgtttactttc

SEQ ID NO: 15986 - DNA, 5727 bp, Cannabis sativa
tccatttcattacctccatccaaacgccacctaatttattatgtctacataaggaatagaaagttgagtatgcagttagtctgaatgcttctcgactaagtgtctgctcttaaagtagcaacaaaggggttaaattagtagggtggtatggtattatgtgccaaaagattatcctgagccagtttaatatgtgaatattcagttgacactgattttgtcgtggacagtcttgactttagaatttagatgcatgtatgttcttaaggagtaaacttttacctatctaaggtagattttcattcaataacattgatatgtttcatgttttatttgcagaaagtgcaacatgagttgttggtcgtttatgcaacccaattacttgagaaggagcactctggatgtcgtgctctgcttcgagatgataaggtttataattaccttggagtaaagatatcatatctcgactgtattagataatgttgtgatgcagatttatgatgtcacttttaggttgaggatctttcaaggatgtacagactataccataaaattcagaaggggcttgaaccagttgccaatgttttcaagcaggttaggtttcatgattacattccattttatttatttttgtctagtatctagtactcatatgcgtatatatcttatgccttttccttttacagcatattaccagtgaagggacagcactagtccaacaggcagaagatgcttgcactaaccaggttcatcatctttgctgatatctttgtagtttgttatcctacttcattcttataaagttgtgtatgctcgaattcttattatgcggtttcatattaatagtgttacatgcagaatattttaattgatgttttgttctttgcataatctctgtacccatagcatttagagttcttgtggtctgtaagagatacctgagtttttagcattatgtgagactgtactctaatgttgtcctcatttaaatttagaatggggtagtattaggagctacataactttctgttaaaatttgcagtataaaatgattaccttcttggatttatgtgattttgttgtttaaagttagaatatacactaaaatttatgagactttttttcaaacggagttggtatggtctggtggatgtggcataatctttccacttgatattttattggtttatttgtctaatagtttaatcatattataatatattcatgctctgctggctgtgcttagcaagggctaagttccattcataaagttaacagtttagttagttaattcatcatggtactaagagttgacaactgtgcttatgcaggctgcaagcggtgctagtgctcaggaacaggtatttattttgcttcttcaaaatatgtttgtttattcatcatctctggaaagttcaaaaattgactcgctttgttgtcttcaggtccttgtcagaaaaatcattgagctgcatgacaagtttatggaatatgtgaatgattgttttcttaaccatactttgtttcacaaggttagaaatcaaagagtatagtagttattttggtctcgcttcttcaatttgtgtggctaatttttttttttttattattattctcaaataggctttgaaagaggcttttgaggtgttctgcaataaaactgttgctggaacttcaagtgcagaactgcttgctgctttttgtgataatatccttaagaaaggtgggagcgagaagttgagtgatgaggctatcgaagatactctagagaaggtagttatggaaggttttctgccacaatatgcttgtttcttgtattgatgttagtgttaagtcttaaaatgaggagtttagtctttgatttaaaatttgatattttcctgcaggttgtcaagttacttgcatatattagtgacaaagacctttttgcagaattttatcggtaatttgcaattaaatgctaaacaagtaaacaatttaacttcttcaattcccttgttaaattctcaatactgtttctttttacaggaagaagcttgctcgtcgtctactttttgataggagtgccagtgaggaacatgaaaaatgtattttaactaagttgaaacagcaatgtggcggtcagtttacttccaaaatggaggggatggtacgtttacctatgtacctaccatatatattttagagtatgcatcattactgatttatacaacaatgacattacctgagattattttggtgttttgtttacgtattcccttcacttcaggtcactgatttgactctagctcgtgagaatcagaccaactttgagaagcatctaaaggaaaacccaaatgtaactccagggattgatctaactgtcactgttcttaccactgggttctggccaagctacaaatcttttgatttaaacctgcctgcagagatggtaaacatcttactttataggaatgtactaatgctaatggaaacaaagccttgaatatttttagccttccctcatgtttataccatttaaatgtagattttgttccattttgcaggtaaaatgtgttgaggtgttcaaggaattctatgaactaaaaacaaaacatagaaaactaacgtggatttattctttgggcacttgcaacattaatgggaagtttgaggctaaaactattgaactgattgtttcaacgtatcaggtatacaaataggtgacatcttctcttcattgtatagtattattagaatttagaaagaactgggaccacattatgtaactgaatcacggaatcacaagaagcgtgcttttcttcttttcaggctgctgcactacttctattcaattcggctgataggttaagctattctgagataatgactcagctaaatgtaaacaatgatgatttggtgagattactgcattccttgtcttgtgcaaagtacaagatcctcaacaaggagccgaacacaaagattatttcaccgaacgatatttttgagttcaactataagttcacagacagaatgaggagaattaaggtctaatatgaatctaaaagatttgatgcaccttttttgttctttgttaaatattattttttattaaagatattgactttcgaaaattattcatcctaagattcctcttccgccaatggatgagagaaagaaggtgattgaggatgtggacaaagacagacggtatgctattgatgctgcaattgtgcgcatcatgaaaagccggaaagttttgggtcatcaacagctggttctggagtgcgtcgagcagctgggtcgtatgtttaaggtattactcactcactcttgcattttgacatctaaaaattgctcttttagtttattgtttcactgctgatgctggtatgaacatgcagcctgatatcaaagcgatcaagaagcgaattgaagatctcatcacacgggactatctcgagcgagacaaagataatgctaacatgtttaagtacttggcgtgatatatgggatgttgggtgattggcattgcggattctccaattatagatttgctgtaaatgttgtgcagcttgtttttactatttctaggattttgaaataggagtgaactcagtgagagatttattacctttgaaattcatttttgcgcacttgaacacttcaccaatccttgagaaaaggttataggaatatccattttatgtgaacgaatgaaagttgttatggcagattcttttaggctgggaaattcgagcttttatgcctaaagattctccgtccgtaaaaatataaaaattatttttgcggaatccgtataacatatttgtcaaaatttaatttttttttttaatgaaaatagaatttgtctaacaaaatagacaaacattcagcaagaatgtcttttctactaactctaagaacaagaaactcgagctaagagaactcgcatttatacatatatatattaatttatatattatatattatatatgtatgtttatgtttttattcttatatgtttgattattgagttcatatatatgaatgtttatggtagagattattgttctgtccctgtagtatagaagtttttgtaaccataagtaataaatctaatgattataaataaataagtgaagaataaaagttaatttttagcttgtattggattatttattatgttattttaataatatttaataagtaaatatttatttataaaaaattaaatattatttttatcctttcttctctttcaattatctctctttatcacaagatactgtttaacaaacttaataacattaatacatgaaaaaaaaagtgtttattttatcactctttattttatctctgcattaaaaaaaaatcattaagattttgtaaaaaaatagctttttttcttccaattgcattttatattgttcagcaaacttaatgaaatcaatacaatctgaaatcaatagttttatggcataggtgtaagagagtaagagcttcaatcatctatttgttttatgaaatgcaattggaaaaagaagcaattttctttttttacaaagctttaataggttttttatattttttattattttttttttaatgtaaagatgaaataaaaagagataaaagatttaaggtgcatttaattaactgaaattaactgtctcgcaaataaaaagtaaaaagatgacgaaaaattaggttttttttttcctcaaaatataaggttaattttagttgctagttaatttgttcaataaccaatagaaattttaacttttcctattttggtaatatatgtataacataaggacaaaaccataatcaccaccataaaattattctatacatatatagaagcatacataaccataaccaagaaaatagcttaacactaccagatcaacaactaacccaaatacccaaagctaaactaactaaagacttgtcctactctttcactcaaaactatttagataaataaccaaataaaatattgtgatataccaccactccataacaacaactatagccacgtatcaaattcctccctttgaaggctttccgttacacttaaaaagcacaatcctttccttctcctttggtcgatctcctctgttgtttaattcttaattagtgttggaccgttttgagcctcttcttgtgtagatgaaacattggatggagtgaggtctcgtacttcatataatcgacccaatccaatgggttatgggcagatgacagagtttgtggtttgttggctctaacattggggcacaaaggcctccaacgaaacaatttacttgacgagcttgttctgacgaacttgtgttggtgttcttggactaatctcatttggtgcaaccatgtgagctctccaaataaatcaagatattggtttcgcatgtacctagtgttcatcctttcagtgaaatcttcccataaaatcattgtaacctcatgtaattgaaaaaattgctccgctttaaacaaccagatagaagggtcaatttgtccatcaaagggtggaaaatcaattttcaaagttttcaacatttataattgattggattgatttacccaattccctccagtattttgtcgagcaattggtgttactaagcttgttgagaatttatgtcaattgatggagaagctctccctgcacatttatggcttccatagttttttattaacttgtccacttgttcatccatggccaagtttttatttaacttc

SEQ ID NO: 15987 - DNA, 7412 bp, Cannabis sativa
  modified_base (3458)..(3462): a, c, t, g, unknown or other
gctatttaataggtaaagaaatgagaacttatataacgtattgatataaatataaacacacatatgatgtatatacacataatatgcagtagtaagatgaatatgaatacgaactaacccaaatgaaattgagaaaaagaaaagaagcagaagagaccttttccaagttgcgaatctcagatgagatgagattgagaacacgaggcctcttggcgatggtttggaaatggcggagttcttccaaatctaatgctacctccttttctgccattgatttttctcagagtaacttagctttcttgttgtggttgttgtgaccgtacagctgatgagtgttattcaacagaggaaaatgggattttggcctttttgaatgaaatacagagagagagttgggaggagggtttggagaaaatgctagaaccctttgatttaaaaaagaaagttctagattgtacgaaatttagacaaatatcatttttgaaaaataacacttttattaacttcatgggagaaactctagcaagtaaaaataggatgggaaatttgagtttccttttaatatttagctaaaaaaataattttgtaatatagtattatattataaatcaatttttagtattgtattaaaacttaatacaaaatttaatatattcattaaaaatataaaaatgaataattttatcattaagtaaaaaatttataatttaataaaagttaatgtatttatcataatctaaatttgtattatattatgatctaaatttagataaaattattatatgaccaatttaataaacttttgagatactattgaaacaaatattttacaaaatcaactatatttttaaacaataaatcattattttacatcactattagaacatcatacgacaaaatgacttaattatacgtaattctcccttttaaaaaaaaaaaaaaaaattatacgtaatcctgaattatataaattctaataagttgacctcaaaactttttttttttttgcaaattagtttccaaatatattaaattttagcgaattggtctctaaattttttattttgataaattaatcccaaacttttaatttaaattcccactttcttttaattgaattgtaacttcattcatataaacaataagtacatgttgatgttacaaatgaaaaaggtaggaacattgccaatccatacttaccagctctctaccaagccctaaagtaatatttgcaaataacatgagccatattcttgtcttcccttcttagatacaatcaattatattaattgcaagtccttgtgaatcagtttttatatacctaaattggaacttaacaccttgacaccatgataaagcttgttttaatgctattgcctcagccagagttgaattgaagctcaagcaaaactgcaaaactagcagagaacccaactactcttccattatcaaatgctgttaagctgattcaactctgagttaatcaactatttctctatttgtaatttcagtacattgcgaggtctgttaatggtcaagcattggtctatgaaacttgtaagtcacatcctaagtaccaatatcaaaaggatatgggttataagttttcattatctgagacttatcacaaatgcttcttttcaattgtgattatgaactgtgttactatcaacgatccttcacattagtatattaggggttgaaaaaacacaagtttctacacactaacgattcttcatgattttattattagctcatggaattctttcataacgatcaacaatgtaccaatattcatatcaagttattttcaaggactttgacaatgtaccaaaataggttcatagttctcaatcattaaacataccttgtttagttatttggtattatgtatagatgagatactctgaagttccatctgcaaatgtgttttcattctgaaattggaagccaaattcttatccaattcatgttttgcaaccaagagttgagacttcatcctctcagctttagctatttcagaattactactatatccattgttgccttgaaatttcacaaagctcttctgcaactgaaattcatggatctgaatctcaattctcaatgacaataaaaaacaatattataagttcaaaaaagaaaagaatgttcaagaattttacctgattcagactacatttcaaattttgtactcgcattcttaattccttaccaaatctctctaccttttgtttgaactctttcatttcagagatcttcgactcataaaactgatctttctgcttctccaagtcctccagatcctctgcttcaatcatcaaaaccctaaaatcaaagccaaaatcaaaatatcgtaagagaaattaatcgttcgcaggaatagaacagctttaatttttcaacctcagctgatttgaatccgtttcgtatttggaatcgatcatttcgatttcggttttaagagctaagatcttgaaattttgggcggcgattttctgatcgagcacaaagcatctctgttcggtggctcgaatttccgccagcttcgatgccaggacgagagacttgttcgattgcaactctttctctgcctgcggatattgtaattctccgtttggtaaccgagaaagtggaggaaaatcaaggaaagaatcaatctcagcattaattagaaagtgaaacagagagtaagagtatgacctggagaagagagagacgtttgttacgatcaagttccattcgttcaagtcgttcatggaaggcctcggaaaacgccattgctgagaattgagttcctcactcacactcgaatagtttggtatttatacctgtaactggaatgaaaagtttctgtttggctgttgaggttcgcgccattttttctcgaaactttatagtttgttttaaatacggctttttacaaaaaaatattggattttgaatttacaattttactgtcctaaagaattttttacaaaaatatatacttttttttttataaaataatagtaaaacaataaaatagaacaattaaaaaataattgtggaacaactaaaaaataacagtgaaaacttaacacaatataaaaaatatacaatatacaatatttttgaaaaaaattccgccctacaataaaaatagaaaaaaatgaaaaatttcaatatgtgaggtaaaaacctctaatttatttagggtgcttatactcatacactctctacttgtttcggtatcttgaagaattttttagtctatttttttttatatatttgtatacgttatagttatttaaaatatcctacaaagttttgagaaatttaaaataatttacaatataaaaactagtatttaaacaacctattttacacgagtataaaataaaatagtcgcgtgcaagacactgtttgaaccttattttgacgtgttaaaattttccaaatttcttaaaattttacannnnntcttaaataactataatatacatgataaataaataagagtacaacggcaaatccctagtatataatgggataagatgagaaatatgtcttttttgtatttattaatcaaaaataccctcaaattatattttattaaaatatacctacttttatgagtgagtttcctattacacccttaccctctacttaaatttaacacataatttacattaatataagagtataataaggacatcacctataaaatattttttatttaaaattatacatattttttaaataaagggttcaataattttttttttcctaagaggccggccatggctttgagcttattgacattgactgtagttaaacagaccacgttgctggttaagtcatatttaaaattcaaatccaatggtgtaataattacacactttttatcaatattatttattatatcattgatttttcatggaacttgttattattgctcaaaaattcatcttcttgtattttcaatataaacaggaaaagctaagaaagagaaaaatgagaaaagcataaatgtagttattagaattgaaaatttattacaaattatttcatttaaatggaaagccttccaatcagagaccttaacattcatgtactacaaggagacacagtactactaaaccactggagtcaacaatggcttcttcagaaagtgagcttcaaggttaccaaccaccagatcagccatggcctggcgtgtttcgatagtgccacttccaacatgaggcaaaaggacaacgttttcaagaccaaatagctcctcaggaacctcaggctcattttggtagacatcaaggccagcgccccctaatcggccttcaaccagggctgatactagctcaggttcgtcgacatgaggacccctcccgatgttgatgagaacaccctttgtgcccaatgcgtcgatgacttcacggttgacaatgtggcgggtttcctcagtgagtgcacaagcaaccaccaaaatgtcggagttggcagccaactctttcacagttgggtagtatttgtagctcacacctggtttttctgatctggagtagtaagctatgggacagctgaatgcttcggctctcttcgaaattgctagcccaattctccccaaaccaatgatcccaactctttttccagtgaactaaaaagatgaaagaagaaaaaaataactaaatccaataataaagcaaatctggaaagaccattagagcaaaattcaatttaaggtcatctgcagtaatccttggatgtcaaacttggaacatttaataatagacaatagtcacatgcatttagtccaaaaggtcaagaaatctctaggaaaattgcattgcaggcattaaaaatgcctaatactaaaagtatcaagccagaaatgcaccttgctactaactgattcagaaaaattatatttcaagtaagcaactttattaaaacaaagttcagtcacatactactaatatcgattctagggataaagatgcccgaataacgattattttgaaatgtatctttccttctttacgccccccacatcaccatacagaggaagttatttttttagaggggaaactatgcgttttggggagctactagtgattcccgcttcatgtatgtgaaatgtaataatcccaaatctaaatgtacataattttttattggggccatccattcaactaaatagagaaatttgctgtaaatttattagtagcaaaaattctaatgtagtttatctttttgtacttatatctctataactgagggactaatattgcatcaaatatgtaacggttaagatttttgcggctaaatatgatttttaccgtttaaatatttacacaaggatttaagtgcaataaataaactatataggaatttttgctgctaacccaaaaatttatataaatatttaagtgaaacaaaatgaactacagtcaactaaataagaaatctctaggaaaaaggcttcttctgcagccattaaaaatgcttaataagaaactaactagtatcaaacccaaatttcaagtaagctacttaattaaaaagttaattaagattttacccttaaattttaacatgtactaagtcatgtctcctgaacatttctggccgttaaaaattctcctgaactattaagattattagatttaagaacttttattcaattttactaattcagtgattgtttacgtactaaatcatgctctctagactttgatatctaccaaatcatattactcgaactttgacatgtatcaaatcaacaatctcaatagttcaaaataatttttaccgaactttagtacatgttaaagttcggaaaacaaaaatcttaattagcctaattaaaataaggttgaatcacaaaccactaatatcgattctaaattatacccactaaatgtgataataatcccaaatcgaaatgtacataattaaactaaataagcataatgaaagcaaaccttggtggttaacttgtaatcacccttcttccacttgccggcccttacataccgatcactctcacacaatcttctcagaacagcaagcatgagtccaatggcgaggtcagccacgtcatcagtcaacacatcaggcgtgttggtgaccctaatacccttctccttacacaatttcaaatcaaccttatccattccaacgctaaagcttgatacaatctccaaattggggaatgtgctgatcgtatcggcatcggcaccggagaatgagtttccgatgatggctctgactgattcagcgttttcctttatgaattgggtcttgttgggtaaggtccatagcttgaagagattgaagcgcttctccagctcagtctcgagataagagttcatcgggatgggcatcagaacgcctatggactccatagttagggttttgaggaccgagtctgactcgtgaatcgtaactcagttatgtctcggcgattcttcccaactctgttttatggattatattttatgtctggacgagtaatgtgcgccaataaaaatcaggtgtacccatacgacgtcgtatcgtattggtacgcacaaaaatatatttatataaaataattattagccaaaattccatcaaagcatgacgtggagctgattaaaataaaataaaatcacaatcttattaagaaaataaataaaataaatgaattaaaagactatctagaatttttgtggctgaattataatttatgtattattgtgctcttgaatttttgagtcctttaaaattggtcattgaattattcacaagtattgtaaattagtcattctgttaaggtttgttacacgtaataaatagaatattaaaatagttgttcagataattgtcacgccaatgccatgttaacgtcacgtgcataattaattttaaaaaaataatttatttttacataattttttgaagagacttactcaatatactatttttaattttttttttaattttacagtttgggttacttcggtagtttttatgtgaattttggttgtgatttatgatttctgatggttgctatatagatttcggtaaaaatacaaaaaaaaaaatatgctttaaagtgtaaatataaaaaaaatctattttttaatcattaattaatttttagtttaataatttttttgaaatatataatttattttttaaaattttatattatagatgtggcgctgacgtggtaattgactaaacagatatgttatcattttctttgtcacatgtgataaaacttgacttaatgactaatttttaacactatgaatagtttagggatcatttttaatgagctgaaaaattcatgaggcacaataatacataagtcatagttcaagagtgtaaaaattctaaatagcctaaataaaaagaggcttctaagacagttttagagataattt

SEQ ID NO: 15988 - DNA, 4606 bp, Cannabis sativa
aagattttctacaggttcaagaacaagtaattacaatgggaaaggtggtgccccaagttctttcaaccatagcaaccccagaccccatggtcgtggatatccctcaaataggttagtgtgtcaagtttgtcccaaacttggtcacactgcctcggtttgtcactatcaattcgataagaactttcaacctccaaaaaccagtgaccatcaggcctttcttacagaatttgaggaagatgatccttaggcctacttcaccaattctctcccagattttgctcaagatcacgaatggtatgctgacagaggggccaacatgcatgttgctactggaatggaacaccttgacaatgaaactccttacttgggatcagattctttagctgttggaaatggcaaacaactccaaatctctcacctaggtaactcttccctaactacaagtagatctcctttacagttaaattctgttttaaaagttcctcaaatcacaaaaaaccttgtcagtgtctggaaacttaccaaagataatagtgtatttcttgaatttcactcaacttgttgttttgtgaaggacaagaaaacaggaggggtcttacttaaaggaagagtcaaaaatggtttgtacctactcactcaacccaccacaataacacctgtccagatcctatgtcaattagcaactaaggagccgaaatgtctttctaattctgaatgtaataatgtctgaaataacgagactactactgtagtctccacctcatgtactgattctaaaatcaataaagattccagttttcataacattgatctttcacttactgcttttactgctactagctcccaggacattaacatatggcactccaagttgtgtcatccgggtcccaacacacttgcaaaaatcatgtcaaaaattaattacaaaagcactttcaaacaactcaaattttgtgatgcctgcaaaataggcaaaagtcacaagttaacataccctgtgtccaccaatagagccttggtcccattagaattggttcacacagacctttgtggacgtttacatatcccatccaaagaaggctacagatattacattcactttttagatgactttagcaagtttacttggatttttccattaacaataaagtcacaggcttatcccacattcttacaatttaaatcccttgtagaaaaacaattctctcctcccattaaaaaggttcaatctgactaggggagagtataggagttttgcctcatttgtagcagccaatggtgttcaatttcaacactcatgtccccacgatcatgagcaaaatggcagggcagaatgcaagcatcgacacataaatgagacaggcatgacactgcttgcacaagctggtttagatctgtcatattggtggttctcctttcagcatgcaacatttgttataaacaggcttccaacacctgttctggacaacatatctccctatcagtgcctcttccataaacaacctgactatgagtttctcaaggtgtttggttgcacctgttttctctatcttagaccatttcagcaacacaaaatgaccatgaaatctgagaaatgcatttccgtggggtactcttttcagcataagggatacatgtgtgaaacacaaacaggcaaaatatatgtcactcgcaatgtagtgttcaatgaagaagagtttcctgccttactcaaatcagctacacctcaggtaaactcacaaccagctcaaatttttgcttctgcaacatttaatacagcacctaataatttctctccttgtgttactgtgcaacaacctgctgtcatcttgcccgatgagccacggcaacattctaatccaagttctcaatctataccacatcctacaaacaactgtcacctatctcagcacccatttctgacacagctcttcctatgtcgaatactagcaccttatccatcccagcatcaaacatctcaccaaaaatcagtcccacatgtcctagccagatacttccacccacttagacaaccaacacacactctatgcagactagggccaagtcaggtattcacaaacccaaagcctacctagctacaaagtatcctctaccagagtctcttttacccagagaaccaacttctctcaaacaagccttagccgaccctaaatggaatggtgctatgagtgatgaatttgttgccttagttcaaaatgggacctggactcttgtaccatacaaaccaggaatgcatgttgtatgaaacaagtgggttcatagggtcaaattgaacgctgatggcactcttgctaagtgcaaatcacgtttagtggccaaaggatatcatcaaactcttggtatagattactcagaaacctttagcctcgtagtaaaaccggccacaattcgaataattctcacaattgtagtctcatatcagtcgaaagtcactcaattagatgtgtcaaatgccttttctcaatggcatattgacagagaccgttttcatggttcaacctccagggttcgaagacaagctgaaaccgactcatgtctgcaagctgaacaaagccatttacggcttaaaacaggcacctagggcctagaacgagaaactaaaaaatactcttctcagcaagggattcaaggcctcaagagctgactcctccatgtttatctttggctcacaacctcatctcattattcttttgtttatgtcgacgatatactaatcacaggtccaaatttgactagtatcaagtgcctcatacaagaactcaacaaagaattctctcttaaagacttggggtctcttcactacttaggagttgaggtacttcaaaactccactggtatgtacttatctcagtctaaatacatcacagatcttctcaccaaactcaacatggaaggggctaaaccagctgcaaatcccaccagttctgctcatatgtcctcacattagatagtggaaaaccctttgaagatcgcactctgttttagtaggtgctctgcagtacttgaccttaaccagacctgacatcatgttcattgtgaacaaactcagtcagttcatccatgcacccactactgtgcactgggaagcatgcaaaagattgtttagatatcttaaaggtacaatacatgagggaatccatctcagaccagctttacatctatctctccatgcctattctgatgcagattgggcaagctccccagatgacagacgttcgaccggtggttatgcagtgtttttagggggcaacttaatatcatggtcagcaaaaaagcaaaatgtagtagcccgcagcagtacaaagagtgagtttagagccttggccaacactgcagatgaagtgaaatggctctgctatgttctctctgaattacacttcaccttacctgctgtaccaataatctaggttgataatcaaggtacagcatctctggttgcaaacccagtttttcacgcaaggtcaaagcacatcaaaattgatctgcattttgtgcgagatcagatactggccaaacagcttgaagtttgatttgtaccatccattgatcaaacagctgatatcctaacgaagccactcaccaaagaaagattcaactatctaaaaaccaagcttcaagtgtgcaccacaccatttcgcttgaggggggatgtcaaccaactaacatctacagttaattagtttgttcagtttttactgtttgtacctaattgtaactaattctgttacattcttattctgctttctttagttggtctctcaaaatcttctgtatctctctccctataaataatgaaatggttcttctctttggcttaacctttacaagccttagagactttgtcttcattgttttttgctgtctgcttagtattgataggttcatacatggtatcaggaagccattgacacaagtctcatatggatcctcaaattctactcaaactcaggggcaaagctccggcaatgtccttcccccacaaaactggaatcctttccagaattccctaaactcttgtctcactataaaactcgatcgatccaattacctcgcctggaaatcacaggttgttcccactgtgattggccatggccttgacgatctgctgttcaccggagttgctcctcctgaaagattggtcactagtgccctcaatcaagaattcatcgcctagaaaagaaaggattagcttctcctcagctggcttagatcatcaatggcagaatccattcttggatctcttgctaatcatctctcctctcataccctctagagagccctggaacaacgatttgcttctcagtcgaaagcacggcttctacaaattaaatctcaactctccatgatttagaaagggaacctatccatttcagattacttcgacaaggttaaggttcttggtgatacattttctacagctggtcatccgattgattaaagtgatctcatcatgcatctgctcaatggattaggtccagcatacgatccagtagttgttcatgtcacaagcctcgttgatgatctttcgtttgaatccattcagtctcttcttctctttcacgaaagtcgattggaaagacattac

SEQ ID NO: 15989 - DNA, 4941 bp, Cannabis sativa
  modified_base (4905)..(4908): a, c, t, g, unknown or other
agagagagagagagagagaacgacacatcctcttcaattttggggaaatgggggtcttcatatacaaaattgcaaaaattgtataaaatatcaaatttatagttaggtatgtcaaaaagatctatttagttggatcgggtcgaagcttcaatccgacgaatcactaatgatccaaaacattcagtattggatctctaatcaaattcgcttcgccccacctaatttttttttcaaatcgaatttgatataatcaagttttaatatattagaaaaaagttaattcatgactcggacttagaccccctaagactcgggactcggactcgggacctgaatccaaacctggacctagactcgaacctagacccaggatcgggacacgggacacagacctgaatctgggaaccggacacccaaacccgagacttgagacctagacccgttccgaaacccaaacccgaatcttacctgaacccaaatccaaacctgaatctggacccgaacccaaacctgagacccgagttttgggacatggacccggacctagacccaaacctaaactcgaactcgggacccggagctggacccataccgagactcggagccagacctataccgagacctagagccgaacccaaacccggactcagacccgggaccaggggcctagacccgaaccttggacccaggacccgaaccctaacctaagattcagacccgaacttggacctggacccagaccctgaccccgaactggaagatctagactgaaactcgagacccagacccgtacccaagctcggacttggactcagacccacatccgggcccagtacccaaacccgaggcccaggacccgaacttggaacctagacccgaacccgagacctggacttgagacccaaacttgagacttgaacccgagacttggactgtgtaagataaaaatgcaggtgaaagactatgtaagcactgaagatcagggtttgaggaaagttttttcccctctaaataagaaagagaagaactataaaaaattaatgaagaatacttgtgttgttctgcttttctatataaggttgacacatgcccttcacatgctcgatatagatacacacatcaattttttttaaaatatattttgtttttgggattaggtggtaccactccttcacttaataataattttggagaccactgaggaatcaatttgagcttatacattgtccctaagacggttgtctgagaccctcacaaacacattttactcctaaacgagtgctacttttaaggcctaagataagtgttactatggtgactcaaactctgaaggggaactaaatgagaactcagtggtatttttattaaatattgggaatgagaaatttgaacttgggatattctttgtgaggaaaaatataaaacttgtatttggctatgtctatgactatttttttaagagatctttacattgtgaatttacatgatttctatttggatacttttattagtgtgtatggctagatataagtttatagggagtagattttgttttgtcactgattgtttatattgtgtcgttgctttaatttaaagttaattattctaaactttaatatatattaaattatgcacttaaaaaaatttaggtcgttagaagttctttcgaacgcattgagcttgtttgatcaaatcgtgctactaaatttttatcaacgttagatttttattagtaaaattagacaaaagttattaaatttaacaatctcaatagttcagaatttttttttaattttttataaaatttaggtagtatgatttagtataagagtctttaaagcttttatttttgtgactctccctttcatcactaattagttctcccctcggagagaaatgctaatagaataatagatatctagtctcatttaaatctctgaattaaaatatacaagatttgctactaaattgcacacaaatgatatcacattctaaaatgttggacaccgtagagtataaggctaaaacacatttcacaagctaggggattacaaacaaactatatgttttctcttatataataagtgcctttttcttttcttttttattggaaagattacttgataagattattcataacaaacacgataacaatctcttaaaactctaatctagacattattattacacttaaaacactaattaaaaatatttttactaaaatataagtaaaatcaaagaatcaatcctcaatcttggtcaagttttctagatttgtaaaaaagaaaaaattgaatcaaaatgagaaaataaattcaagtttatagggtccccatctactcctcattatcacattgcaaaatcccattattactaagtatagatgtgaaaggaaaacattaaaaagctttttctgtccctcccactatagataatgtcttcaaagaaggagaaatccatcttatagtatctctcaaatctaattctcgatccagtttagtgataataataactttaagatgctcccaattaactaaaggagaacgacagatcctcttcaagtcttccggaatgatgagagcctttcatgtataaaattaagaaaatgtataagaatatcaatatataaatgctaaatactattttggatcctgtgttttgcaaaaattatcaattaaattctgttttgttaaatgacaaaatagatcctaaatttttcaaaatggtaaaaatagaatcgtaagctcaattttcaacaattttattttttaatgtaattaacttgaagacaacttttaacacgaacaaatacataaaatgtaaccagttttgccataaatctctagatcagattattattaagttttaatataaggtttattttatcatttaacaaaacagatagtccaattagtaattttgtaaagtagaggatccaaaataatatttatccatatataaataagaaaaaataaaatgaaatataagatatggaaattaaaaaaaaaaataaaaaagtaagaaacgtaccttctctgttctgatcttaagggttagcatgctccaacagcaattaatattcaaaagaaaattcatcaacttgataaaccaaatggactcatatttaagaagataattgcaaatacagaatgttccatgcaaagaattatgtgatgatgagtccattaatatactaacattcacatcaccttgataaaaaaatgatgataattttggagctgatttaattataacagtcaccaattcatcacgataattataattattcaagttcaaattttttaaagtttgactcgaaattgaaatgcgattcaaattcaatccaagttcgttgcacaaactcaaattttcaaggagaggaaggttcgaaatgagtgattcaaacgacgatgactcttccgataaaccccaatcgcaagttaaagagagatatgtaattgccttgcattgtgacaagtctaatttttcaaagcaaacaccatttaattccaaacactcaagatttatggcttcaatcattattttctttactataaacctaatctgatcagtgagtgtaatttccaagtacttgaggcttgaactaagtattttaagctcataattagtgcttagataacaataaaccattcttaattcttcaagtgatggagaacccaacaacaacttatctaccacatcatgatgtttaatttgaacaaaattcaatgacaatgatttcaaagatggaaaattaaacgagtaagaagaatctaactccactctactcaaccttaaagtagtcaaatattttgcgttgactactaatgttttaggtaaacggtagtaatgaagttgaccatacaaatctttgtccttgtctaggcgaagatttatttcattagctttattcttaactgcgaaagctaaccatttatctacacgaccagactcacttctttcataggaattcatccaaaccttaaaactggttatgttggaaccatagacaagaaaataaatacctctgttgcgatgttccaaacaattatcgacataattataaaacttttgtagtccctcttggactctaaaacggttcgttttagtagtgaaatagagtttagggactgaataccacatgaatttccaatatttggaaagaaggcaagtatgaacgacatcttcagtgggaagaaacgacagtatatgatgaatgatttccttaggcagtttcgaaattctatcctctttctcctcggccatcatcaactacttctcgattatcatcaataagtggaatgtagtttaatcgtaagtgcagagattttttgttatgaaagtttgttttcagagagaatatatatatatatatatatatatataaatagatgttatagatatatttaaattttaaataaaattagtttggataaaaaaaatgaaaaatcttaacaattgaaattgaatgcttcaaaaaaaaatcttcacaattgagtttttcaaaaaaaaatatcttgattaaaatacttacgaattgaattaataactaatttttaataaaacgaaaataagaataaaaatcaataacgaacttctcttttagaaaaataatttataaaattaaaaatttaaaaaaaaaaacagaaaaataattcatcattattcaattctttttcataactaattaagttgaagttacataatattggaaaacaattgagaaaaaagaggagattaatcatatagttggcacatgaccagataattaatcgtactgtataattgatattatacatattgtataactattattactattaaaatttagagcaatttgcgtagaaacacttttatgttttaatttttatacacttagttatcgtttggtaatatttttatttnnnnattttttaatcacaaaatgaaagtcaaattttt

SEQ ID NO: 15990 - DNA, 5939 bp, Cannabis sativa
cactcaagatggaaaaacaataattttattcatcaaaaccagatgaaagcaaagcactgaattcatatggttttatttttttatttttttaaactgcagctttaaattaaggggtttaactgtcaggtggcattgtagcttgtaccactacattgtattatgagtttcttacaccattattttctgctttggaacagttggcaggttatcagtccagttgaagtcgttggatatgttgttgttgtcgatcagttgctttctgttcaaaataaaacttacgagcagccaaccattttggtggcgaaaagtgttaaaggagaggaagaaattcctgatggtactgttgctgtgctgacacctgatatgccagatgtcctatctcatgtttctgttcgagcaagaaatggcaaggtaaacaattatcaaatgagtttgcttttttacgcctacatatgacacgacaataaaaatgaccaactcttttattggcaggtctgttttgctacatgttttgatcccaatatattgcttgacctacaatccaaagaagggaagttgttacgcgtaaaaccaacatctgctgatgtaacttacaggtatttttatctcttcctttcatgttgttgttctgaattatagttgaatttcctatagtaagcactaatagatggattaaaagaactcatataaaaattttacttgtttttcttaaataatttaagtgaggtgaaggaggttgagctaactgatgcaagctctgtcaaagatgttccatccaatctgaaattggtcaaaaagaagtttcttggtaaatatgccatatcatctgaggaattcacaaacgaaatggtaaaccttgcaacatttactttcgatttttatctaagaagttatgtttttatatgttggaatttttccttctcatttatttctttatgactcctaggttggagccaaatcacgtaatatttcttatctaaaaggaaaagttccatcttgggttggaattcctacatcagtggccctcccattcggatgttttgagaaggttctctcggctgattcaaataaggtcttcctctcctcagaactcccctgtcttgatgtttctactatttgatgcattattgctaaacttattggcttaagatattgaccatgcacctttttttttctctttaatcttattttattccttctagtttcattttccttaaaagaataaatattggtatttgtggacaatggtataaagatgtcgccacttaattggtcaaaaattattaggctatggcttgtaattgtaagtgttaatgaaatgttctgcatttttaatttacaggaagtggctagaaagctcgaatctttgaagaaaaagttgaaaaatgaagagttcgatgcgctgaaggaaatacgtgagacagttttacagcttgaagcaccaccccaattggtatgctctttcgactggtagctctattaattaatattaaatcaatcacttgtccaacagcatggttgtggcaatagtaaataccattctgctgagtcttgtattgggtgtgtctgtggcattctaccaaagattggatgagcaaacaaacataaggaagactatattttttcaattatgcaagaacctgcataattctaatttctaattaaatcatcgtatgcttaatgcttatccagattttataagttgctagataagaagccacctacaaaacaatctctcgattttataagtggaaaaatttctattccacaaagtaattttactggaaactagcttatatgaaagtttattttcaggtgcaagagctgaaaacgacaatgttaagttcagggatgccttggcctggtgacgaaggtgaacagcgatggaatcaagcgtggatggctataaaaagggtaagtctacttttttgtgccatgatgtactaacttattgagtcaattagtgttttagtttccatcaatgctggagagtagaaaatatagattgatcggccctgttgttgtattcattttttctttccctaatcatgttctattcgccgttttatcaaatgcaatgctgtggtgagagaatcagaaaaataagaagataatttgaatttcaatgttagccatgaacaacatgagaaattagcttttttttttccttctcctgaacaacatgtcatagtattgcctctaatatattataatccaggtgtgggcttcaaaatggaatgagagagcattcttcagcaccagaaaaataaaacttgatcacgattatctctgcatggcagtccttgtccaggaaattataaatgccgactatgcatttgtcatccatacaacaaatccatcttcaggagactcctctgagatatatgctgaggtatttatgtcgttttgattatgctctatttccttttatttaatctagtacacttatctaggtctctttactgggataggttgttaagggactcggagaaaccttagttggagcctatcctggacgtgctatgagttttatatgcaagaagaacgcgctggattctcctcaggtatttatctactttcattgatcattgaaatctagctccaaaagaaggccaatacataccatcatctatcaatagaaacaatgtcatggctctcacaatgaatcactcattgcttaccatttacactttgtttatgtggaatttttcagttgttgggatatccaagcaagcctattggcctctttataagtcggtcgataatcttcagatctgattccaatggtgaagatctggaaggctatgctggtgcaggtctttatgacaggtaactccctgaaccctgtgtttacattagtttcattccctcaattcctgttacaaaatcatgctaacacgatcaaaacttcctgcgtagtgtgcctatggatgaggaagagaaagtggtgctcgattactcaactgatccgctaatggttgatcagaaattccaacattcaattctttcaagcatagctcgtgccggaaatgcaatagaggaactctatggcactccacaagacattgaaggggtgattagagatgggaagctctatgtggtccaaacaagaccccaaatgtaatctataacagtagttagtagtcttttgatgtggcatttcattcagccatggtcaaaggaagaaaaataaaaagaataaaattggacatttttaactgtttaataggaaaataataatattaataatatatttaaatagtaaatatatatattttttaacttaaaatggcatctattttcttaaacaggaaatgggagtctaaatctggttccccacgcaaactgcctgaagcattacatgtttatgttgttgctcttttttttgctatctttgttgttcttttgtttatttctaaaccacaaaagatacgaaagctgctgggtttatcaagaaatttatacataagaactactaatgatattaagagctttgctgaagaagtatggtgcttcagactcaaaagaggaagagatcaagatctgtcaccattataaatcgaatttacaaccttaaccaatcaatgacttattactattgaagggaaaaagaagatatatttttattttattgtaaagattaaaatcactccccctagttgaaaatatactcactgtaatacatggactgaaaaattagctaacatgactcaatgaacattatttgagaaagatcaatgttggtgattatcattatttagaaagggaatgccctatattttcaaaaagaaaaaaaaagaaaaaaaagtttgtcctaagtttaaattcctctcctccgaagtgtaccaaaaataaaaaataaaaaattcttaatgaggcattttatatgtttttttaataataataataaaaaattattttatattctcaaactcgaaatatgtacacttaatacaattatgtttttctttatataaaattacactaaatatatcatttatctaattattaaaattctatcattcggttaagacttaataactactaagtactaagtgtaatatcattttaacttgtaattttattttgttagtcctaaatcaaagcttagcatgttaaatttaaaattgcttttaaaaaaaaaagaaaaagaaaaaagcttatcatgtttaacttaaaattgaaatgcttaacaaattcatttatttcatattttacatataaaaataaaactaattagtttaatggtaacacaagaaataaaaaagacatccaattcttatacttataaaaatctttcttagactccaacagtaaaactaccaattactcataggcattactaaaacactttccttactccatttatttacctaattaacatagtcaataatagcaaggctaataaaagcaagtacatttattcctcttgataaaaagggcatccttgagcagtaaaacctgaaacaacattaatccaaacttcattcaatctaccagtaattccactatgatggtgagaagaattgtactgagcaatggtgtaggaattactaccactactactactattcttattatccaccatggtcagtacttgatgagatttattaaggctgttcttaagtgattcaacttctttatcaatgttatcatcctcagcaaacccagaaaactttcttatggctatgcaatgacttttccacttattaagcttcagattcagatcttgtaagggctttggagttgctttatcatatttagtagataaataaagccttacataatagtccaacccttgtactgatgaattaacattattattaataataatggttgttaagataggagcacttattggaattttggttgagttaagattagctccatgtatgtactgatacaacctgattagaagtatagaatcatttaacccaattaataaaattatataaaatcacaccaaacataacatttattcaattaattgaggctttgggattaaaataaaattaaaaaaagtaattacctgtgaaagccttgtttggttgagttttggaatgaattagttggtagtgtaactaaagctgacatccatgaacattctgggtagagtctgacctcaaaatctgattcagaatagacaattttgtactgtggcaactcaattgatcgaccactaagcttatcaattatgctgaggtaaactactgtcacaacaactaagtagtacatcatcatagtaattaattaagtattataactattggtcttaatttcttcttcttgagtagttggaggttttgactaatttgttttgggaattgggatcctaatatggcttatataagcaggaaaagctaagagtagtgctactctcattttaatttttataattatgtttcctttgtgggtgttccacccaaactaatcttactatatcagttgtttttttaattgtttgatatagatatagatgcaattatttattcatttacagttttttttgggctaaatttttttaattattgttttttttttgtgcatttaaccctttaagtttaaattttagcgataaaaactctttaaactactgaattaataataaatttaagtgttattcggttaactgtcactataagctgcttatgtgtatactcttaaacacatgacttatttatattggtacacctaatattattatttaaaaatttattttaaaattaaataaaactataaaaaataaaaataaaatattgttcatatattccaaatacaattactaattttacgtaacattttaataattaaataaatggtgattgaagtatgtaaaataataatagtagtaataataaatatagggagatgattttgtcccgtgatgtactttcagtgaatgtatttcgtagtacattagataggtctcagggtacatt

SEQ ID NO: 15991 - DNA, 5692 bp, Cannabis sativa
aactcagcaagaaaagtaataaagagggatacattaaataactaattaattgtttaaaccataacatttaataataggtaatataaccagccatatgtagagaaatagatatgctcatatatttgcattgcctaatcaggcaagcccgtatcataattcaatatcatacataatatcgttgcaccacctaatcaggtgagcctgtgccacaacctggcaccaatatatcgcatcgcctgatcagacgagcccgtacctacgcctggtactcatatgtcactgacgtccgtacttacgctcgatacgtcgctaggaagaaacccaacaatagtttcaatctatgccataactaggaaatttcatatcaccgacgcccgtatctacgcccgatacgtcgccaggaatatcgcatcacctaatcaggtgaacccgtacctactctcggtactcatatgttactaacgcccgtatctacgccagacctaattaggtgagcccgtatattatgttcatagtatcatcacatttttattgcctaatcagacaattaataattttagaacctgtcattccatgtggtatattatacttgtcttacctgcatatccaaatgagtgtgctaaatgacatgagtggaatatattttcgagaatcctaaatcacattaacagtaaaatgataagtgttttttttttttttttttctaaaacactaacaagtatctaaacttaccttgtaataatactcccaactcaatactatttcctcataatacacaatataaaatctatgtaaaatattagaaaaacttaccactaattcttaagctagcttcaatctctcgggtaaagtgttctcttcacaatactcaaaatctcctagctaggtgaaagtagaagttgaaagagaataaataaaatgagagaaaataaatggcggtggtggtgtgttattctcgacaatggaatgaagatcagagggtgagatgactttgatgatgatatatgtgtattatatatatgttttgattgtataataaaattgtcatgactattagaatagtcacgggattaggtgccacgtaaacaaaaaataagattattttaactttggttttacttcatttggtaaataagatgataatggatgatgataattaccaataagatgataatggatgatgataatatatggggtgtatatactgtatacatggggtacgatcatagataagtgagagagagttcatttaactatggtatataagacaagggtgtaaattttaatgagtcattagatgctcggtgtcattctataacttatctcactaacatagtgtaattaatttaatttatacaacttaataaccaactcacaccaattaactaatacactctcagttaaaatttaaagtcaacttagtaaatttccattaataaatactcatcacattaaaatcacaactaagtttaatacttatctatccactcacataatcactaaaggtgctactaagtccatccctaaaatctcagaatactacactctaatatttacatattatgactttctgctacactgcataagcgagtttatattcatcgatattaataaaagtatcacataataatataaaatccgagcacacttattattaattaaataatatcgtaaatagcatataatattcatacattctaataaaatctctataattaataaattactctcatttactcacttatagcatatttaaaatttatgctaagatatattagtagggtcataatcctacttttaaccttattaacctataatataaaattataaatataaactctaattatttactattaaacttatcgagatattacatattcactttttcttttggatttaagatttttcttttctaaattagatttgagttttttatttatttctgtaagattttggattaagttctgagattgttacgggtggtgatcgtggtggtattttcggttgtagtggttgattatttgagtggatagtggtgttggtgataggcttgatgaagtagaatgaagaaaaaaaaaagataaacgaaaaatgaaacagaaaaaaagtaaaaattgttttttgattaattttttttttaattttaaatatttaattatctgggccaatacaattgtaccacgtgtatactgtatatacgtgagtgatctaatatggcacttaacaccaaaatataaatggaaatagtaaagtgctaacgtaacttgaattttgggattttaccgctaaaatttgagttttagaaattttaccgctaaaaaatgagttttgaaaattaattactagtaaagtaaaaattttgagaattttaacgtaatttatgattataataataataaaattcaagccacgtcagtaataatacttcttttcacttaattaatctatagatatagacgagtgctttaaatgaaattgttattaattcgttatgacttattagagtgtgcagacacgcccaatttgaaaactagaaaaaatatagtaaggacgaaaatataaattcgtagcaacaacacgtacaataaataaatgactcttgtttccaaatttcaagacaaactagaattcagaatattagggaccattgttacctgagggacgtaaatgcaatatactgataattggagggtgcaagaggaaaatttctagacaatatatattggtctcatcattatgcagatttggctggatcatctttggccaaaactaaagctaaagtcagtgatttcttttgtattttccgcttgagcctatctttctgtcttacttcccacgtgtacatggcaatgcttgcacgtgtgagactactgtctcttaggggcttgaaaatttctagcagaattattggtacaaactgtttgagatcaaaacatcggatccctctttgctgtctatacttgttcccgtagtgttttgtctttgtaagatttatgactgattacaaacccaaaacatacacacacaatttggaagacaactcactgtcatactcctcctgaatcatatatgtcatttagattattatcatccaaaaataaaactaattctaacaaagccaatgaaatttttccaagaggtagaaaaaagctaacatgcatttttatgtttgtatatactcaaaaatttacactaatattggtactttccgctaacaattatgttcattttgcatgcattaggtttttacacagttattattaagtcataatttactacaatgattgttggtctcatcctgttagaagatgaatgaggttccatctccaaactaattagcaatagaaggagtaacctattcatattatatatatgacaatttatttccacacattaacaatatagactaactctaatatgttatttagtcggacactcaaaaattactgcaaaagagtgcatatgatttatatatgcagaaatgcattatgatataatataaagggtatttataatggtaaactaagcgtgaggttattatgctttttatgtgaatcatttatttatttattttttaaattatatattttgtacactgaattcaggtttttaaaatataataaagactatatattaaggttgaattggggttttaaaaaaaaaaaaaaaaacaaagaaagaaagaaagatgaattaatgacttttttttttgttttttgaaattaattaaaattaaataaatgatcgatcatatacatggtaactttattcctctttcacatgcatataattgagaaaatgttggtgatcattcgttagagtccaaaattgatattaataattaaaatgaataatacacattaaagtgggcacttgacgtacaaaaacaacttgcaggaaatatagggccaaaagatctgaatggactagaggtagttaaaggtgtttgtcacatgatgtgaagctttgcatcgaaatgttgttgaattaccaaaccaagaagcaaggctgtttccaagccattctcccactagaccgttaaacaatatatcaaaataattaataatagtaataataaaaaaaaacaatatatgaaaataaattattcaattttttctcacaataattttcattaattatttaattatttactagctgatcaatccatatatataaaattaaattaagtccccccaaaaaatggaattaattagttatggattgtacataaaaacgtaacagcatgcatgcctttggaatgacccgtttaatatatgtatgtcaagaaattattaagacatcaaaatatacatgatatataatatgatggtataatcagttttaagggcaagctacaaatgcatgaaaaaatagaaaaggaaaatgagatatgatgtggatggtcccactaacgtatatgaaattatatattatagttagatatatttacatacaaaaatttgtaaaagattctttgttggggctgttccctttggaagcacgtgaaaaggatattaattgaagcaaaatagggtggtactatagagtgatggtttgtgtttgggaagactgtgtgcgagtatgatctaataattcccacttgagctccaaaagaagaagacaaatctaatcagtgaaattaggttttgttgtattgcttatttgcttttgagggtatatgagataattacttaaagaacatgtggtaggccaccaatatcgaaacatcaaatgcatgatttggcctttcatttatatatttgtttggttcggccacctgggaaatatttgatatcaagcatgaaagtcagttaaaattgtccaaacccacaggaacactatatatatatataatacatatatataaatatttatataatgtttataagtacctctacctcatatatattgtatgagacctacaagctgttatgctgttccacctactagtaggacttatttttatatatcatatatatatatatatatatatatatatcaaagatttaatggcaaagtctaaatagtttgactagttacaaattataaatatattataagactttttacattgtattctcaaatttataatttttttacttttttattatgggatagattttttttaaaaatactgtaaattaaagttttacactgcatattatgttaacttttcacggttgttttttaattgttctattgttgtcttaattattctgctttgttgttttacgtttattttataaagagatagtaattttataaaagattctatataatagtaaaattataaatttttactccagatctaatatttttataaaaagttgacacacatgttgtttttacttttcttttttctaacacatagaattttaaaccaacaattaataaataaaggacactacttacatgatataactggttatactaatcggttgggttggcactaatatttaataatatattttggtaattttatatgtgttaggtagggatacacgtataatctgacatgcattaattttcatgcatacgtaaaatataaataatctgttgattggatttttggccaaccgacgcggagtagtaataaataagatctaaactgaaattgtaacaataaatgtaaataataatactgaaattcgtaataaatgtaaagaaaggtagcaaaatttaaagaggttca

SEQ ID NO: 15992 - DNA, 10519 bp, Cannabis sativa
  modified_base (7650)..(7665): a, c, t, g, unknown or other
aatccatttaagctctcttcaactgtgtagtctcatacctacacagtctcagaatcattatacatgactttcctcaggcgatgtgagattgcacagcttacccagtatcagattttgatctaagtaaatgtttatgataattttattgtaatgacataattataataatacaataatattatgaatatactaatataaaaaaaaataacatttatcactaatttatgtaataatgcaataatatttctctagtttatcacttccgagaatttatatttttattttatatcctgcgattttgatcactgaacgtttgccacaacgggtcttctatcgactttctacgaaccgccattgctcgctcttcacttgtaacttgtaagccgtaccttcttcatcaatgctcacaaaatttagatgttagggttttgtttggttgccgaagaacttctccaggagaatcattttgcttgaacgttaattttagctgatgaattttgtattttgtgttttgtatcatagctaaaagtggatgcttgaggttgctgggctcatagtcatagagtgagaataatgagcattgtaccaaaagagaatattgaggtcattgctcaaagcattgggatcaacaatttgtcttccgatgttgctctagctcttgctcccgatgtcgaatatcggttgcgtgagattatgcaggtctttacattgctttatttcttggttgtttcttatgggttttgctctccattgtacaattatcgttattagctacttgggtgaaaagggttttagtaggtactagtgaaagcctggccattttttccttgttctgttttttttggtcccatagtttatgtaaaattagtggaggaagcaacgaaatcttatttctcacattgctacaggaggctattaaatgcatgcgtcattctaggaggactcgattgtcggttgatgatgttgatgctgcactaaatttaagaaatgtggaggtgagtctacaaatcattacatagtctatgtttttttctttcttggttgtgttctgacttgttttcctatatgtgtacagtaattgcttagttttctagctcaattggattgtaattgaagttatatatagaatttcttatggtttagtttttgaaaactttggagtttcacatttcatttgctatattaatctcatttagtgtgatcttcttgaaccagcctatttatggattttcctctggaggccagttgcggttcaaaagggctgttggatatagagatttgttttacattgatgacaaggatgtggattttaaagatgtaaggaattgctggaatatttcattcatcatatcacttgttagctgcaatatttcttttcatgttccttccatctttcaaatcctctgaatgtaggtgattgaggctcctttaccaaaagtacctcttgatactgcagttttttgtcattggctggctattgatggggtacaacccgcaattccagagaatgctcctgtgtcaggtttgtcatgtattcataagagtaggtatttccattaatagagattacttgcaatagttgtcggatgacaatgttttcaaacttaatctgtttaagttggaataactctttgctgcatatgctgtggtgaagctacagtgaaatgatagatatgtgtgccaggagccacttcattcgagatgtacttcaattaggaacactatttatattgacacaaattcaattatttgtttctatttttattttgttagcccagtttagtatctggtcattgttttttttaaaaaaaatagtaattgcagctcctgatgatgccaaaaagtctgaacaaaaggatgaaggagttgctgttgacattaaactaccagttaagcacgtagtatctaaagagcttcaggtagattacataccgtctacttttatgtataatttgtttgattgtttttctttttttttttgtttattcacatgtatttttatgtttgtgtgttggcagctttattttgataaaatcactgaacttgttgtaagtaagtcggattcagttttgtttaaagaagcactagtcagtttggctacagattcaggacttcatcctctagttccttatttcacatgctttatcgctgatgaggtgatgttttttgtctttactacatgcttaacataaacatataagagcatcatttgtgccaacagccacttatttctactttcttattattattatataggttactcgtggcttgaatgattatcatcttctccttgctttgatgcgagttgtttggagtctgctccagaatcctcatatacagatagagccttatgtaagtcaacatctgttttgtgccatgttttgctatgcaattattattattattattatcatcatcatcatcagattggctgagagactggaattttattcttaaaatcctgcgctgtatctttagttacctatggattttgcatatctttgtttttcatttttatgcatgtcagtagtcttgctgatagtaacttagtaaactcatgccctttgtttcaaagatagcgtgtcgtctttgtatccagcccttttgatctaatgaaaagttatgtttcttgttgaaaaattatatatatgttctgtattccaattatggctgtggcttgtatggcttaggattcttgtctgcaactctatgtgaagagaaacatttgtgtactaggatatgcatgtgcaactttgtggagtttagttcagatcgctgatattgctacaattgtatttggacataaatttctgcgttaatgaacttgaactggtaacttgtcctggtttgtaatacagtctgatatatacgtacagtcacacacgtactatgcatggattgggatctgtattaaagcaaaaagaatgggtcaaattcttaaacaataatgaacatatcagaagctgcataaatttgctaataaaaacccttatttgatagcacataaaaaacaaattatatactcaatctttttcttagatattacccccttcctttgttgaaattctcacttttgctcctttcagcttcatctcattttttggggtttcaatttttccataaaattatcatgttattctgcattgattatgacttgattatatatttcagtagcaatttattagttctttcatagactgtaagattgccttcaatcagtttctaattgtggtttaagcacctaatgagcatcacaaaatcaagtttctttagttgttacttgtcagtgtaaaggttgtactatctctaaatctgagaacacatttttttttctccctgccagctacatcaattgatgccacccgtggtgacttgccttgtagcgaaaaggttagggaacaggtttgcagacaatcactgggaacttagagatttcacagctaaactggttgcttcaatctgcaaaaggtaagctattttttgtaaagttgtgtgtgacaaaggtttgtggaattgagtcataattatttttttgtttatgtgcctttgttttctgcacttgagtcgacgtttcttattgatagtattagcataataatctgcagcaagagttgtatttcacttttgttttgtcgatgttgcatgcttgtttgctaatttcttcccactaaatttgtcccctggcaacctaaactgacatttggcaggagcttcattcttttgattttcgtatcaaaccccagttaaatatttcatcataattttatttctaataaaacgataccagtcggattgttacatttcatggttttaccttagtcacttctaaaaccatgattgaattgttacagatttgatataatgtaatgatctagtaacacatttcttcaaaaattaggggataattaggttgttttctaattttaaatattatttgagagatgcttagctgtttcattaatactgctgacttaccaatattaccagtcttcccttaaatttaccgattgcaactgttttgcatttgaagagtaacacttgtctgtgcgtaatgttttttttttcctttttagtacagaagaataagtttttcattttttatttatttttagatttggacatgtttataacactctccagacgcgtcttacaaaaactttgctcaatgcatttttggacccaaaacgggcattgactcagcattatggtgcaattcaagggctaacagctataggacccaatgtggtattttctcacgctctttgcaacttcgaaagaaaagttcatttgtttggtgtataattatgtatatatttaatctcttcttggttaaaattgctctgtatgtttaaatattcatcttgatgcattttgaagccccaattaaactgctactctttcgtaactttggccagtaactgcttatctgagataaattaggagaatgaagaaaactaagggagattataggtggttttttgaaagatagacaaatatgattccgattgtttcttcctagcaagaataggtttttggaatgtgaaagtttttttaaagacagcgtttggttgaaaggaatgagaatataggattatgaatgagaatggaatagaattaaatgtaaaacgcaaaaaaattattaatattttttttcatcttgtattagaatgatctttccttacatcattccactaaaatgatggaaaagttattccattgtaatgctactttaaaatgcaaccaatcaaaggaatggaataattaattttttttcctttctattccattttatttcattatctccaaccaaacgccacctaagtaagtagcttgaattaaataccaccaatctgtccttgcagacctggttccttcactttaaattgttattgaagtcagaaagatgggaataatgaggtggcttctttggctggttttagtatttttttcccggtccatttccactcttcgattctcaacaattctatcaaattgttgtagtttttggggaattttgaccccctttttcaattttattattaattggacccgattcactttatttttctatccctgtttctagattggctattggtcaattatattttatttgaaattctgatgcatttcatgtctacccttttatgtgattttgagctgtttgagttactctacaatcaggttcgacttcttatgctgccaaatcttgagccatatcttcggcttcttgaaccagagttacttctagagaaacaaaagaatgagatgaagagatatgaagcatggcgtgtttatggagccttgctggtgagatctcctctgtagctgtgatttagcatgcaaaatttccaaaagggaaaactaacaagaaatacactttttcagcatgcagcaggtcattgtatttatgatcgccttaagatatttccgtcgttgcattctcctgctgcccgtgctgtctggagagcaaatgcaagagttgttaccatcacgccaacgccaagtaaggtttctttgactttatgttcttggagatttcatatatatttttatagggatatttacagtataaaataccttattaaataactaaaactaaaatgaaaactttttttttttttgcttttatttcttaatccaattcaattgtatttctcaaatacaatatgaccagtcagtacatgttaaaaatgtttctcaatactcgtgatttcatatatagaccagaatctaactgctacttttttaatcatcaagataaacggaaggcaatcatggatgttgtggagcagccgccgcctaagaaaatggctaccgatggccttatttgttcaccgtcattgaattcgtccccatctcacctgcagggtgaaacagctgttatagctaattcaggagaatccaatgaaggtccatcgtcctcagtgcctaatgagattgtttcagacaaaaaaggtagaaagaatgaggtcaacgggcgacatttaaaaacatcagccatgcttgcacaggtctggaaggatgacttggactctggatctctcctggtaaaattgtttgagctctttggggaaagcatcctttccttcatcccagctcccgaaatgtctttgtttctgtaaccatacatggttttatatttttaggcttagctatacagattcttttgtagataagagttatggagatttcaaggacctacatttctgtctgtaactctaaatttttgttacaactttttcaatgaaaatcatattttccataggaatcacttttaacaattacacccaggaaagacagccagttgttcacttctatcaatcttccccaactaaatcacttggtggagatgcccaataatgataaaatttggctatggtattacgattcgggcaatggaatatgaacaataaagtaaaatacttaatcgatttgtatatgaatttcattacttcattttgttatgctgtatcctgtatgtgaacactgaagaggcttgattcattgactcatttttttttatttattttgggaaatgatagaaaataatcaatggaggccaagttgaatcttggacatgtgtaaacttctctcgctacaatccagacattcatgatcgcttttgtgcagaattagtcaaaacgtgccttaccagatttttgttctcatttcttttactgtgaacttgcattactgattgtttgtatttgacattcttttaccattttggatacttggaaggcctttcaaactagaccagtaattccctgctgctcttggccagctaattaaattgagaatgcattgagatctgttaatgagcaatgcaagaagatacttggcaacaaacaactacagttgttaatagttatcttgcctgatttttctggtgcatatggtgagcaacacaaccatgacttgtaactatgatgtttgaaatgcaatttttttaacatttagttttagctaaataaatgttacttgcctcttcttgcagggatgataaaacgagtttgtgaaactgatcttggaattgtttcacaatattgtgagcctaaacaagttgtaaagctcaataggcagtatttggagaatttatccctcaagattaataataaggtttaggtaatttgagcctattctgacatttacctatagtttaagttttcctaaccaattaacctttaaatcatgcataaaaaatcaaaattttcaaaaaaataagggataagttgagaaatacctttttattgtatccattaataaaaaatacacttatattaatatactctcaccctccacttaagtctagcacctaatttttattaacttaaatgtataatgaggacatcatctataaaataggtatatttcaaagaatataaaaataaaagtaaaaattaaaacatgtaaagtaaagtggatatacaatataatttcttaaaaaagtattaataataataatttttttcttagaacaaattaaatgtatatattcttagtgtaaatataattatatatattttttctattacatataatatataagttaaaaaataatttgtagcataaatatttagctattaagtgtcaagtaaattatgatgtggtaatctttaattagttcacatcattaaatttttatttttnnnnnnnnnnnnnnnntaaatataccaataaaaaaataagacgtggataatgacttgacggtaagtacgaaagttctaaaaatataacttagatattattatcgtcaaaaattaaatttaagtatttatctgcaagttaaaattaaaattaaatatttacaccacaaactattcttaattaaattacttataactattattttaaacttgaaaatataaaactatattgaattataatttcattcttacattatttttctttcctttcatcacaccaaataaaacaagataaataaaaaatctacatttaattttaatattttttaccagtaattttcctaatttttcttcctttgaggtctttcattgagaatttttcttttttaccttttttttctctttcttcaattgaagttcttgttaacgcagattttcgttaaccagatatgagcctaaatggtaataaatttgcacagaaaataaaaacagtaaagaaaaaaacaagaacatgaaggtttttaacgtggttttgcagttaaaattctgcacagtccacgagtcaatcttattagatttctgatacagttctggggccttttctcttatgaatcttttgtccctttttcagtataacatgcctctatttataataacatcatagggcagttaattacagtgttgactaatattttacaacaaatatctcctaaaatcatgggatttgatcacattccaagtaaaataagtgtggttaatatctaaaaatcacacatgtgtgattagtccacttttaatgggtcaatataaacgtgtattaaatacgttgtaacgtgtattgtcttgggatcatcttgttgcgaacatagcaacaatgactttaatagcgagctagagatcttcctatgtttaatcgaggttgacagtatgagcctcgccatttatgctagtgaagtcataacactccatctgacaattgtaattctcggcgacaaggtgaacttcagcagctaacatcatttgaatgtcagtttctgacgagactatgaaccttattgaaagatgtctgaagctaattaatgaaggtaccaggagtgtgccttcctgtggcgagatggacgcctcgctagtaattgtttgggttcgtccggatattatatttagtgtgtattatacactaagtgcctttccagccaccatgtctcgtcttctaatgtgtagggagattgacgcctcgccttgtacatctgaaatagtatggtttctcactaatgcacgaggcaacagtttgcatatctttatctcgcttgagatttttcagtcaattgagttgtaaatatactctgtcaattttgcacttaacgagttattccatttcaaatataattatctttacgtgtgttgattcgtattctccccagtttaacacgtgtcctcctttgatgtgctagccgaatttcgggtataacagttctcaaatgggagaatatatcgactaattaagatttttatcattttaactttgaaatgtattaaatcatgtcttttaaacttttaaaattgttaaaatgcccccgaactattgaaattattaaatttaaagatttttgtctaaatttagtaagaaaagcctaacatagatggaagtttaaggggtatcatttggtgcatgttaaagttcaaacataatttgatatcaaaatttgggtagcatgatttagtatatggatagtcactgaattaataaaattagataaaaaaatttaaatctaataattttaataattcaagaagaatttttagaggccagaaaattttaaaagaatataatatgttacaagttaatattagtgtaaattttttaattagcctaatacataagaggaatattaaatgatatcttatagttctaaatattacaagaaatagcatgttgttattagtataaattaatatcaaattcaaattcatgatttaatacaaaatattgatacgaagttaacaacccatatggtagagcaatgctcaatatatatggcctattgcacgttgtagtaaatgggatccactaacacacaatatcacatcacatcataatatattttaagtttttgtaaagaaaaaaaggtctcattttaaattccgccctaagtctctcaacactttgagatagtcttgttttagatctcgtgttttgcaaaaattatcaattagataatctgtttagttaaataacaaaatagactctatattttctaaaatgctaaaaatagaaccatgagctcaatttttaacaattttatttttttaatataaccaattttaagacaatttctaacatgaacatatatataaaatgtaatcagttttgtcatgatatctttagatcagattattattcagtattattttgacaaaaaatcagttcagagtcctatttgtacaattttataaaatataaaatttattttatcatttaatagaacagaaagtctaattaataacttttacaaaatacaaaatctaaaattgtatttatcctaaaaagaaagaaacaaaataccacatgactattgtccatattaagcaacgtcttgaaagttagaccacattgtagatgtggcaagtaagggtgttcataaaataatggatccaattcaatccgcacgattgacgatttcaatctaatccaatccgcaaagtgcgaatatttacacttgagcggattggattggattggaaaattcaaaatctacatttgtacgaattggatgttgattagcagtatgtaaaaataaccgatccaattcaatccacacatatttataaaaaattatatatacaattaaaattttaatgtaaagaaaatagta

SEQ ID NO: 15993 - DNA, 8001 bp, Cannabis sativa
  modified_base (28)..(30): a, c, t, g, unknown or other
aaaattattttaaagtgtaaaaaaaaannnaaaaaaaaaaaaaaaaactcaatgcataatgggttttattaagaaaatttgagtttctatacttaattttgctatttaattaaaaaaatcttaatttttgcattatatagttgaggttgttttattggaccaagatatgtataaaaaaatggaaaagtgttaaaaggcattagtggtctttaacattttcttacgtgtcaatatcgttagtggtccaactaagtattcggtctcatataatttaatataataatttttagagagtatcgctagtcaatcgcaagacgacacatctcaaaggtgctagacaatactattgtttaatagcaatactcaaaaaatgttaagtttaaggtagagagaaaaataaaataactgttaaatacatattttcgatacagtataaaaaggaagaaattttttaattaaataataaaattaagaaaaaaaaaactctaagtttcttttattatcgattattaaagtaaaattttatttttaaaatttaatatgtttaaaattaatatttaaatataaatattttttaaaagttcccatcaatcggataataatccttatttatatataaatataacctgatattttggatccaaatgttgcccttaattaatgtgctactctttgtataaagatttaaatattggcatctttgaccaattattaattaaaaaagtatatacattaatgattattagattagattaaggctttttatctatgaataactttaccaatcaaaaagaaacatattttgtagatcccaccacatataacacatcatactaataaatgttcctaaggttcccaacaacaaggtaacctttttatttaattaatttatatttcaatgtgaggatagtaatatttatgttaaaaaaatagaagaaatgatataaaacagtttgtttttttttatatcttttaaaacaatttttttatatttatttttaagaaaatccatttaacaactaacaaaataacttaaatcacaatcaaaattcatataataacttacataaaaattactaaaacaactcaaactataattttttttaaaaaaaataaaaataatatataaaataatttactttattataattaattaataaattattatacataaataaatatagagatattgggcattgattagcttagatttatagaaaccataaaaatgtgaaatttgatattactttgagatctacaatttcttaaatacacttttgtttatttatatatattatatacatacttttgaagagaatgaccgacacacaataaactcatctactttatttatttttttcttaaaaaaaaacatataaaatatccaattagtaatggtaggcctaacctcaattaatgatttcagtacattataaataggagataatcaatatacatattgttttcacattttactaaataataaagttttataattcatatacaaccaatgtgaatgtacttagaaatatatatatatatatatacatatattatagtaggggtagtattattatttttgtccatattggtaagaatgtctctatttctagtacttggaaaataattcaatttttttcatatgatgtagttatacaagtgattctacttattttcaaaaaaaaaaattagaatagttatttacattgtacatattttttttttaactaattagaatttttgtccattaaacttttacatgtatcaaattatatccctaaacttttttaggcattaaaaattctctctgaattatagagattgttagatttaaagacatttgtccagtagcatttaatttactcattctgtgattgtccatgtactaaattatgcttcttatcacatctcttgaatttcgacatgtactaaatgaaaccccttaactttaacccatgttagattttttttactaaaattagaaaaaaatccttaaattcaaaaatctcaataattcaaaaaaaatttcaacaacttaaaagttcaatgaacaaaaatcttaattagccttgcaagctctgtttgtgatattttaaattgttctaattttctaatatagttactcacatataattttaaaattttgtttttataaatacaatcttacttagaacaaaaaaaaactattggggccaacaaaaagatatacataataaataagctttagtggattttgtgtgaataaaataaaataaaaataaaaaaaaggggtattgatatgatattattagtgagtgtttgtacaacgtgtgtataattttgttggattgaggtttggtacacattacaaaatccaaaataaatttaagtgtcggtgagattggtttgtcctcacaaaattctcgtcacatttttaaattaaaattaaataaataaattgtaaagtaaaaaaagaaatttgacatcatattcatgttaatattaggtaagtctacactacactgcaccttttaaaagaatattttggtaaatttttatttgtttcgttcgacatacaagaaaattttttaattcaatttttttttttataatcgtgtatgttatatttacttaaaatcacttataaattttaaaaaaattctaaattgtttacaatacaaaaaaataagaattacatattctgttgtacgctcattttttttatacatataataagtgactggttaaatcttattttcaacacggtaaactatccaaaataatctaaaaatttataatttatcataaattttaaaatttgatttaatattcactcacactctctctctatctacctattatgaccatcaccatcattctcaagtgccatgtgtcaacatatgccttttttaatttttttttaatttattatggtcctaagtcctaactaaatttttattttatttttcagtgtatttatggacgtagttgggattgggaaagacaactaatacataagttctcatttatgcaaaccacctaagatttatttacctaccaattcatatatttttcattcacattttattacttattacaaaaccaaatttactctcttattttctctcaacattaatcattttttagccccttcaattttgaaaaaaaaaaaagaaaaaatctcaaaaggtcatataataacttgactttgctaatataattattaatttaattattttttccaaaaatgccaaattgtaaaatttggaatgatgggcttctattgtttaatattaggcccaaaactcaatatttttgaatgtgaaatacatatgaagaattataccatattattacaaataataaaaaaagtgtacaaaataatacattttaatatccaaacatcaccatctatttttttttaaaaaaaaaaaaaaaaaaaaagctagaatcaactaaaataggttgagattttgatagactcttaaaatatcaaaactttaaattatgacactaaaacttattaatgttaacttgggttactactattacatcatattaacttaattgacaaacaaaaaataatacaaaatgacaataatggtaaagagtgaaaaaaaaaattaaagattacaaattaacaaaatggtaacataatgaaaatgcaagaaataacaaagaaaaaattgtggttgcagtacaaaattgtaacaacaatgataacatcaacaatagcaaaatgacataatattaggctaaaaaaacttaaaaagtaattaataaatgattaagttttaataaccaaatagtaaaaaccaagaaaaaaaaatgtaactttaaattgttcttataaatataacatttcaccttcaaaatatagctattttaaaatatcaatcttgattcaaatccatctcaagatttttagtaatccatctaaaaatcaatatatcaataatacaaatagcaaaaacaactagttaattgaattctgagaattatcatatcactaaaattactcatagcatttagaacatatacaataccgtgcaaataagccataatactcaaaatggatttttctctgccatggtctctagaatcaaagtcaatttacttgataatacaatgaagttggtggaaatgaaaggttaagatgtaccaaactaatgcacacaaactatattctgatacttttcatctaattactccaatctaatatggaatcatccatccatctatgatggagatatgtttatttatacacctaaatacattcctgaagtttcaaggataatagaagttacagaagtcaaaagctaagagcgcataccttgaatgcatcgctaacatgtcaaagctctctcattgctgcatatcttcttccatggcactatcggaatctggattgtctacttcactctcactgctcaaactaccatcactaccgaaaaaaggaaactctttcttcgcagaattctcatgaaattgatacttgagaaacttaacctgtattcctgtctcgtccactgttcctttgcgttttcttgtcccgtcaaatgcaactgtgtctataatgccgttaagagccatagatgatacattgtccacagaatcaaccatcacaagatcattgctatcgagttttttctcatctggtttagtttctggaagcacatactcaactcttgacttgcatataactcctttggcttgaagcttggaaatctcacaatcaaatactcttactccttgctcttcaacaagtagcatccactctgaggatgatatcaatttgtgattagttcagtgagaaacaatgtcataaaggttccaccagaccagggcataatttttttacaaaacaggacaactcatctctagttagctgctcttcaatttgtccagaatgcatgtatagttcaatatgccatatttcccagaagagaaaggtgttctagtattttctctgctccactttataagtaacaacaatgccatgttgagaatcacagccaaatgggtacaaaacttaactactaagttgacaagaatataaaagatacaagagaactcacttataagtgccaccggagttgaaatgtttggtctgaagtttcttccctcggtgccaatctgatttgtaagccacttgatcaaatgagaggcaaggcaagattcagtgaaggcatttaaataagaaatgactttgctctggtcatcattgttcctgtggacaacaagtagaactgtcaaatgaaaatactctaatgtaacccatttaatcacagcaaaaacaaccatttcttgttcgtacctaacaaacctcatagcgttgtcagcaacaagtaaccatgttatagcaagacttttcagtcgttcacttggtaactgtatccctatttgaggtttgagaaatgaatagtttaccattatcacagagtcatacagaatttcttgtaaaagacattggtctttaaacttctgcatgtagaaaaatactaaattcagccgaatatttgctaaaaatatcacatcgatgcatcaagctttcttggtgacctggcaattgtatttgtatagcaaagagacgtttctagcgtgtagtcttattatcagcttataacatgcatctacaggaccaaccaaaaagagtgacttccaggctctatcaacaattcaacaccataatatatgattgtaaatttgtagcaacaatggcatagctactactagtttagaatgctagttggaactgtcggacgagataaatgcatgtataagttatcttaacatgaacaaaccaaccagatcctaagctccaagattcgcctgccctctataacaggactcaacaagttcagattattacttttgttgtttagctatgcaacactgtatgacattaatttacatatgttactcgagactagctcaagttgagagtatgagtactggggtttaaatcccaactggtttgaagactcaccaacaggttagagacaggcaaaactggttccagcaacgtcctaaacagagtctctgataatacacatcagagaatcaaaagcaacacaatttgatcaagtaataagtgaaattcgtcaaattaacaaacatgaaaatgataaattagcaaaataaccacattgacagtgtaaatttatagtcgcaaaacgatcataatgatcttgttatggtagcatagtgtaattttaggctgcttgtgcaaacaaacatgattattttgctaataaatctttagctagttatgattttcgctctttaaattttgatatgtatcatgctttctgaactccgttaaaaatttcccttaaattattgagatttattagatttaaaattttttgtctaatttcattcaattttactaattcggtgattgtcatgtactaaatcatactccctaaattttaatatctaccgaattatgctcttcgaactttgatatgtagcaattcatatgcccctaaacttatatcaatgttaaactttctttacttaaattgaacaaaatccttaaatctaaggatgtcaatagtttagagtatttttaacggcctgatttttatttatttttttacgaaaacactccagtaagaactaaatatttcaatttccatcaaaaaaaagaactaaatattttaaaatttaaagaaagttagaagtcaaactcaccataaaagggaaaacatcgaaacccagtgactgtttgagccacccaactacggacctccttctccaattccactctcgaggtttgaagaacacgaaatttgaagcaaagatttagcaagaaagattcccacatgacaaccccagctaaatacccaattcccatcatcttcttcatcccatttcgagcttcatcactaacaatagggaaaaacactttcaacaattcatctccaccgccaccaaccccaactctatccacaacccaaacacgaaccacatccaaaaaacacgaactcaaaccatcaccgccatcatcatgatcatagcttccgctacaagaaatgctaatatagcttataagcccttctaacaagctctgaacctcatcttcttcctcatccacctcagctccaaaagctaaattacacaactcataagccaccggagcgagcagagcaattctcttcggtccactacacgaggccgagcaggaaacgaggagctggaacaagtccttgacgacggaaactgtgaatttggaggtgcgaaatgtgacggcagagtagaaccagatgatttcgagtggaggatcgggaatggtgtgaagtagtcgggagaaaatggaagagaaattggagaagtcggtgacggagttttggtaatcggcgatgaagcggtgtatggagtcttggaggatggagagataggggtcgtgtgggtttggagggttagggttagggtttgggagatggtagggctttgagagggtttggttcatagttgtaattaatagtttcagaagaaaaatttgaaaccctagtttaacagaagaagaagaagaaaaagaaggagggaactcaaagtcttttcctatttttgaattttgataatttaattaaattagttttctttttgttttttgaaaataaaatgaaaattacaataggatatttgcattataacccctatatgaaaaatttgtggcaaaatttcctaaaaaattcactttaatacaaattagtctttaacctcgagaaatagcggtaatactcctgaaagcacgtttcttgtaaatctgttagtctttattttaacggattcgtttacttatttaaaaatgtcacataaattataatttaatttaaataatatagaaaataaataaatagattatttaaaagtcatatttttttttattgctttcttttttcttcatcttattcgtccaaccaccccaatcctcacggaaacacccctagccaaccaccaaccctaatggcagcacccctagccacacccaaccctcacaacagcctcacctaa

SEQ ID NO: 15994 - DNA, 5264 bp, Cannabis sativa
aaactatgatatgatttgataagtccccgaccactcgtgctttttgttagggtggttgaataaaatttgggatggtaaaataaaattttaacagccttttgaagtgaaaggagactttttcagatttaagttgaaaaaataaattataattaaattaaatcataaaataacttatcgaaaaaaaaaccttagctttattgttatttttttgaatggaattaaaacttaaaagttatgaaaaaagaaatcctatgaattttacttatgagtgagaaaataattgataatttttcttttttttttttttgatagatgataactgataattttttttggataatgataactgataacttaaaagtctcataatttctttattctctttcttttttttttttgaaaaggaagtctcatattttctagaaggttttctttttatgggcggctttgtttcggccactcatgataatcgcgtgggtagttgaaaataaattattgtaaatatatatttattttattttattttgacaaaaaaaatatatatttataatggagaatgaaaaaaaaaaaacttagaaatttgataattgtagaaagaaagaaattacattttctgatttcaaaaatgtgatattggttgatgatcacatatgagtccaacccaggtagttatcattcctcatgttgtaaatcataattgctttttaaaaaattaattaagtagaaattatatccaaaaatttactccctattaaattaagttgaaaacttatttttatttttatttatttttttaaaaaacgtgttagttttattgagctaaaaatgatcatattcataaccacgtgaacaaacaaaccatccgtagatatggtaagtttaagaagaaagggatcggattttactaacgatttatttagtgatttttcacatacgtggcagagatataattagagattaaataataacagataaaaactttgaagtaaaaacaactaacgaagactcaaaagtcttaacacagcgaaactaactaatccaatttcatcaagttgcaacttgcctaattatttttttaataataataaaataaaaaaaaaaaagaaatagattgtactattctgtttgtaaatttcaaagaaatttagtaatctacaaaattatgttttggactgttcttggtagctccgttttgcgtcatctgtttttttgatgaaatctgaaaattggtttgaacatcaaaggtggtaagggatcttcatagagggatgacttttttgaagatttgaacactttttttattttaaggtatttttagaaaccattattattttgaagaaatttctggtcttatgtttgttataactgataaagaagaaaatttctttctggaatttttttttaaattgtttatgcttactgggtttctgtcaaaaaatctgtttctgcagtttcagcgctttgtttgtcatatcattcttatctatattttttcttagaaagaagcaatgagtataagagaaaatgttgaagcagatgaaaggttttcaatggcaacaccttcatgtagttcagagattggtattgcaatcaatggaaacaagaatagcaaatacatggttcaatgggcactaaacaaatttgttccagagggaaatattaacatcaaattgatacatgttcatcccaggattctgactgttcccacggcaagtaagattttgctattttttcaaaaaaagaaaaagaaagaaaaaagtcctttgtttttgctgctatggttacatagagcagttttttcattctagcatctacctttttgatattctgattcagtgggaaatttccttcctatttcggacgtgagagaagacattacagaggcttataaaacggaaatgcattggaagacaattgaactccttcttccttacaagaaaatgtgtcttcaaagaaaggtatttctgagtttctcttcttttgtttttgttgaaatttgatctggtgttgtcattagcaagagtctaatctaaaatacttgtgttcctttaaaaccaggtagaagtagaggttgttgtcattgaatcaaacgatgtgccaaatgccatagcagccaaggtagctgaattagccattaccaagctcgtcattggagcgccttctcgtagcatgttcacaaggtatttttttttttaatgtcataacaatttattcactttgattgttatgctttatagctttgatttgtaaactagtctcttgtaacattgtgcttgatcttgtaggaaacccaagggcctgtcaacaaagatttcagaacgtgccccaaaatcttgcgcagtctatgctatttcgaaaggcaagttgtcatccgtacgtccatcccaattggagagagttcaaagtgtctacagcatgaacaatgacattagtgattcatattctgtcatatctaattcaagccatgcttccagctcccaatcaggtaatcaatgattatgtatgtttagtaatcggtgactaatatgttattggttacaagaaatactgagctcttgttattttactctctttcaaatcatcaaacaagtagttgaaaaacttaatacctgttctgtttcttgaattggcagaagttggttcggttacttcatcttgtagttaccaatcttcttcgctgacattgcagcgatttcaagctcttaaatctatgaatcagacacttctcaaaccaagaaaactttcatgtgatagctactatttcaaatatcagttgacggatcttgaggaaggaaaggataatgcagattcttgttctagtatttctgatgctgaacacacagtgagtcacatctctagtagtgggagctttgcaaacgataaccattcctttacttcttctgatcaagcttccacctttgatgtgtgcacagaaagttcaatgtctgagagcccggtatagtcttctcaattctttctcttaaattttgttggcctttacctgttgcattatgaatccattgtatcatagacattgtgtatggtgtgtactgatatttgttcgtatggcaggccgacctcaactttgagcttgaaaagttgagaacagaactcagacatgtcaaaggaatgtatgcaatggctcaaagtgagacaaatgctgcttctcgaaaggcaagtactactgttaacatctttctttcggttttagctgactagatttgatgaacaaatagccaaaaccaaatctttgtcaaatgtattttggtcattgaatacttatttattcttgttctaaactcattcaatgtcatttctgcttaggattcccttatccttttcaaacttgcattcatttttctttttcaagttcttacagcattctcccaaacttttgaatacaatggttgacatctttataggaatgtcatctgatcctcctatattacaccataggcacatgttgctaacatagtgattatttttgttcagctgaaagatctaaacaaaaacctgttggataattccaaaaggcttgaagaaattatcgcggaggaggacaaaacaaaagcactagcaaaagaagagaaagagaagcatgaggctgccaaaagaaaagctatgtatgtgaggcaatgtgttgaaagagaagcctctctgaagaaggatgctgagatgaaagctatgcatgatgctaaagagattgagaagcttgagattgctctcacgggtaatttacaacaataccagcaatttacatgggaagaaattcagtcagccacttgtaatttttctgaggttcttaagattggttttggagggtatggaactgtctacaagtgcaaatttcatcaaacaactgctgcagtgaaagttcttagctctaatgagagctgcaaagataagcagttcctgcgcgaggtatgaatcctttttttaagaaaaataactagtagtgtactcgtagattttgtgagttaaaaattgtgagcttgtgtatctgttttgaatagctaacaaggatcttgaacatactgaaagctggtttacttttcctgttggcctgcagcttgacatcttgagcaaaattcatcatccccatttgcttatcctcattggggcgtgtttagatcgcggttgccttgtttacgagtacatggagaatggtagcctggaggacaggttgatgcagagacaaggaactcctcccatcccttggtttgacaggtacagaattgcttgggaagtagcctctgcacttgccttcctccacaagtcaaagcccaaaccaatcatccaccgtgatcttaaaccagctaacatcttgcttgatcaaaatcttgtgagcaagattggggatgttggccttgctgcattgtttcagtcagaccaatctcattcatcaaccatgtttatggagacaggaccagttggaaccctctgctacatggatcccgagtaccaaaggactggtctaatctctccaaaatcagatgtttatggtttcgggatggtgattttacaactactgactgcaaaaccagcattggcactagcccatgtggtggaaactgctgttaaggacggtcgtctagaggacattttggattcaaaagcaggtaattggccgagcgaagaaacaaaagaattggttgaattgggactcagctgtgtggagcttttccgtaaagatagacctgatttgcaagctcaaatacttcccatactacagagattgaaaattacagccgataaagcccgagattcggcttctagagtgcacttttcacctcctcctaatcatttcatctgtccaattcttaaggtatggctttttttgttaacataatcttttaatgtcagtcatatatagtcattatcttaaaaagcaatggctttggctacaggatgtgatgaatgatccttgtgctgcggcggatggctacacttacgatcgtaaagccatagagatgtggcttcaatccagtgacatttcaccaatgaccaatttgccattgtcaaccaagaatctagtaccaaattacactcttctttctgccattatggattggaagtccaaataaaatcaaataactttttcttttcttatttagggacacattgattgtatagagtggtggagttgcttaatctaaaaggttcaaagggttttagtttagtttagcttagcttagactctagatgtaatctgttcatattttggaacgttgagtttcataaatgttgaacttagtttcttgttt

SEQ ID NO: 15995 - DNA, 5246 bp, Cannabis sativa
ccatcatctcaattaaagaatccagtgacatttgaatctgttttcaaaatttcaagaaagacattcaactatatctgctcacttgtaaaggaagatatgatggctaaggcatcaaacttcagtgatttgaatggtaagcatctgtctttaaatgatcaagtagctgttgctcttagaaggctgagctctggtgaatcgttatctagtgtcggcgagtcatttggaatgaatcagtctacggttgctcagttgacttggcgatttgtggaagcaatggaagaaagagggcttcaccatctttgttggccctcaagtgaacaagagatggaaaagataaaggccaactttgaaaaaatacgcggtcttccaaattgttgtggtgcaattgacaccacacacatcatgatgactctgcctactactgatccacataatgatgtgtggcttgattgtgagaaaaactgcagcatgatcttgcaggcaattgttgaccctgaaatgagattccgtgacataattgccggatggcctggaagttttagtgatgctgttgtgcttgaaagctcagggtttttcaaaatgtctgaagagcagacaagattgaatggcaagaagctaacccttcaagatggaaccgagataagagaatatttagtaggagatacagcattccctcttttgccatggctgcttactccattccgtagacgaggcccaccagattttcagtccgagtttaacaaacggctctccgcgacacgaatggtggcacagagggcattagcaaggttgaaggagacttggaagataattcatggagttatgtggaagcctgataagcatagattgccgagaatcattcttgtttgctgcatactccacaacattgttatagatatggaagatgatttgcaagatgatgtgccattgtctcatcatcatgattcaggctaccgacaattaacatgcgaatccgctgacaagtctgccttgattcttagagagaagctttcactacaattggcaggaaaattacatctcgagaaaaaactttcggtcgttgggaatggttatctttaatctatatagttcatttgtgaagtgttgactttgtgttgtttaggtgaataggaacttttatagttattcgtttacagatatagctttatctcgaacaggaatctgcttagaaaagaagatagttttgacatttaacttctgtctcatagtgactttttatagtaattcgttgaatcgttgtcttgcacaccagtcattttccagcttcattttattatggtcatgctagaagttgagttcaatcatctaactgttaatttaactagagaaactgtagcaaaacccatcaacaagacgtatgatttaccttattttatattgcttttatcattggtagctttaaaccggtacacgcacataaaaaacaggggtcacatgcgttcttcacgatggaatgattaaagaaacatggggcaaatccattgttctctttcggccaccgttagcaaaacaaccttttttttgttttttgaagaaataaacattttagctattataaaattgacaattacttccaattattgtttgacatattttgtgcctaataatatacaagcgttgttaatgcgtacgtggggtaagcagacaagattaacaaatgactaaaaaaaggacaataacgtcaaacggttaagtacttcagttaagaaatctggtctttgtagcttcctaaataccctactttcatcatataacataccttggggtaggaaattagaagcatagaataataagacaagttttataggactacaaaactagaattcatagattttgttcaagcaatgaggtgttccaatcaatttccacgcaaaaccaaaaatgaaataaatttctgctgaggcaggaaagttaaatttcaacctctttcttacaggtagcaaactacagcaaaagctaccgtataatatgcaaactggttcccaataagccaccacatgatattagtttgtatatcaaacccaaatgaggcacgaacaaatccacattacaaatcacgtcataaacccaatattaatagtaaaacacaaattcatgtctcatacgctatagacatttcacattgaaacaagaagaagaaaaaaaaaaggaaaccagatagtaaggaggattctccaattgcatagttttcaattttcaggcttttccagagcggcttttaataacatcgatatccatctcagatgggtcagttgcttgcaactcaatctgaattccatccaactctctcttgaacctgtccttggagctagcataaatcatcttgcttctcacctttgctgtgtcaggggaccttaatcacagacaataaagacaaaccttagaagggtttcaagaacataaacagcatactgacaaatcaaatcagaaatgagtaattgaaatcgccaaaggtttgattttactaccatgcaatgaaaaaaatcctgctttttggtacgttctcctcagtgagaaaatcaaagtcataaacagcgtatcggcattcatcggccggaaggagagcagaaaactcctcatagctctgagctggttcaccgagcttttccaccataacttgcttttgcttttcctcaatcttatagacaatgaaacgataacttctttttgtcttaagctctagaaacttgagcttgcagtcatcatcgacagccattcctgatgcagcgtttgcctagacaataaataaaacccagcaatcagtgattaaattttgaatcttcagtgaaaacccacttcaaaacaagactttcggacaaacgaaaacctcataataacgaaaacttgatgagcaatctaggtaagtgagatccaatctttttttaaccctttttatccatgatcgcggaatatgattcaaaaacaaaatcatctcataatatgtatataatataccgaaaatcacatctgagtctaccccatttgggtcaaagctcttgaaaaatcaaaacgtgataggtagtaaatttatataatcatcaatttcatcttaaaaatatcataaaattgcggatccatagacacgtactcaaatgagcatgcaaatacatctgataaaaatatataaatcactttgtgaccaatcaatcggattaagtagcaccgatcggagaatcagacgctttttctgaaaaaaaaaatccacaccgatcaacaatatcaagacgaaggacttttcaatcgttacataagaaccccaatttcatccaaatcgagcgatgactttcatagatcgaacactagaacgagataaaatgaaataaaaaaaaatgggcatgaaagttaaacagtagagaaatacagaagaaaattagcaaaaagtactcaccattttggacgagagaatatcgggaagagaaaatctagggcttcaggacagggagggagagagagagagagaaagaaaggggacgataaagatggataaatgagtgtgtgtgtgtgtagagaagagagaaaaagaagggctgtgacttgaaaatgtggactgtggagttctcctttgctttttagctaatccaacggtgatcgatcgctcggatttagagctgatctggtcacgttgcgccacctgtcctcttgagggagaaatgatgccaccgcacatgaagttgtcatgcgcttcacgcaaaaggcgctttacccgatttgctgtacgatgctatttgggctgggtcataacatgggctcggcccaatctcgaaatctaattccgcttttcaaccacaggatatttgagaataagaataacttttatgacaatgaaataatgtgatattactttttcttttctttctttcttttcattttaaatggttcccttctcactatgaaataaagtataattaagaataatgttgtcctttcaaaaaaaaaaaaaaaaacgaataatgttgcattgttttactcaaaatttaattttttttccggctatcattttccatttgctttgaaaatgcttaatttaaaaaaatattggaaggaaagaaaaaaaaaaatatcacagatggcgtcaactctctcaataaagttgtggtgttagaccaatttggcaaacagcagtgtacgaacttaattttttattttttgttaaatgatagtgtttgaatagagcatagctattaagtgttggaattaagcacaattgccttttagcatttttcgttagaatttgtgaagatgaatttttatatcaatagttacattatattatacaaggttttggtaggtgcatgaatatattttctttcatcatgtacaccaaacgtacgtgtgagcatttctccagttgaagctatgcacgtttaactcaaaagtcaaagtttgacacaagagtatatataccataactaataatgtaattttggactctaatcatgatcatcataataataatctgactaagcaaaagagagattcactcaaacttcctctttgaataatacatatttaagaaaagtactatgtatatatataacatgtaaaaatatgttctctagcttaaaaaaatggagaaaatagtataataaatatataatgtaaattggcaataataattggatatatgtgtgtgcctatgaatgggttattttcttcttttaaatatctaataattaagaactaatgtttgtaggttgaacatttatcaattggatcgtccaacgccactgccttggtaaatgagaccggaaccaagcaaagctctctacttcgcaaatctggccatcttttcccatttccctcttgataattctattgtcaaaaaaaaaaggcgagcataataaacatataaaataaaaatatataaataatatttacatattataaagctagtcaatttatatatatgaataaatatgtatatagtaaaacgtgtttggcccaatgtctatacctgtgattgagagactcttatactgtcgcatgggctactcatcatcctataaaggttctgcatgaagaaaaaacaaggcatatataaataatgaattaacatatacactagaacctctattcaagaatacaattgggaccaaataaattatattataattgggtagttataactaaatagagttacactaggaaaaaaaattaaaaaactaaaaaatatcaatgtaacaataataacaataaataaacattaatactatatcataatagaa

SEQ ID NO: 15996 - DNA, 8812 bp, Cannabis sativa
  modified_base (1280)..(1285): a, c, t, g, unknown or other
aatatttaaaaattttattatcaacatatttatgatacaaattattaatattcataatttactttcaagtaactttttgattatatttttaaataattatatgatgtttatatatttttttaaataatttatctttataataataacatataattttttttttttacatacaatcttcctctatatatttcaaaaactagttatattaaaaaataatgaaaatactttcaattttttatttttttaaatacttatggtgtaatttccagtaaaaaaggaaaaaagaaaaagaaattatactggaaatgcctaagcttagccactcctctcaccattttcatttatttcattcatctttgtgtagcagcaagtagtttaactacttccatttcatggcatatgcccaagctctttctgcctcaatctcctacgcctcggcttctttcaacaaagtttacctccctcacttctctaactttgtttgctttcccacaaaatataataaacaaaaataatattttcaattcaattcatttgactttttccttctgatagaaattatatatatttaagtttgttttgttgaattttgcttgtgtagtacctgagaaaaatgtgagaatgaatatgaggaagaaatctagttgaaaattttcttggcctacttatttatttatttttttgacacatttcaggttttgcctcaaggattcccacaatccaaagggttaagctattttgtgatgaattcaagagccaaccaggctaagcaggcccacatttgtgcggagatacagagagaaagggacccaatggcaaaggatcatgctgggataaaggttcctcatgtgttgactgtggccggctctgactcaggggccggtgccggaatccaagctgatcttaaggcttgtgctgcacgtggtgtttattgctctacggttataacatcagtcactgctcaaaacactgttggtgttcaggttgttgttctgttctttaaatgacttactctttgtttggcatctgagaaaatgaacgagaaaaaaagttctgttggtattctaatttctgaagtttgttttgattgccagggtgttaacattgtgcctgaggaatttgttgcaaaacagctgaagtctgtgctatctgatatgcaagttgatgtggtaagttgattttgatgattggcgtgaatgttagtttaatctctttttctttcttgtctacatcatgtgatatcttggttatgagcttgtttttattattattattattannnnnnttattattattattattaacttctttctcttcaagggcttagtaaaggtgttaatcaaactagtctataattaaatcatggtactgcaatatgatttattttgacttacctattgtcttgatgtgctctgttattgtacttacaagaagccttgataactagtttgaggtcagagttgtaattatcatcctgttcatagggtattatgaattgtacagaaacttcaattctcacaaatgttaattgataattacatccatcttgctttgttgttaaggatgtctagtctatagggttgatagctcacaaatccttgggatttgtcaagcattatttatgtgttatgcaatgttacaagcacttagaagagatgattattgttttgataaaaggattagtgtttcatccagaaaaggatatctatccattttgtctcgagataatttataatacagtgtaattgttcttcaaatacatgtttatgccttggatcaaattgatatttctttcatttttttttttgaaaaagagcaaggaaccccctgtcttagacagatccctgcccgttatacattgaaagtcctgtggtaagcatatttcaaaatgtttacagagtacttgtatacaaaattgcaaatgcattctttcaaaaaaaaaaaaaaaaaaaaatcaaaaacattgaaatttttaattcaacctttagttttcaaagaagactaaactattccattgaattagcaaattaatacaaattcagtcattcttctttttattcaaaagtatataaattttttaatgaccaagatatccttaccaaattgtttaacaaaaaagaattaaacaataaatttggcttctctccaaaatcttcttattagttttgccccacctattaccatatttttttgttacaagtatgtatctttggtagcgctatcattttgtatgccaattctgactagagtagatcagaaaagaaatttgtattgatttgctaatctaaggggttttttttcctaaaaaaattagtatatattgagcttttcaccttaacccaaaatatgtttatgaattgtccttttttatggaattcactatttgaaacaatgtttctttgtcaaaagatagtattggcagtaaaaattgataccaaacaaactgtgatttatgattaggtgaaaacaggtatgctaccttctagtggtatagtgaaggttcttcatcagagtctcaaggattttccagttcgaggtatgtttttgtgctcacataaattgttttttttgggcttcttattgtaattctaagagcatttgagttcacttggtaaaattaccaaaggcaggtttagtggttgaccctgtaatggtgtctacaagcggagatgttttagctgctccttctgttcttgcagtgtttaggtatgaggaagaattgcaaattggttcaattgtttagcttatgatgtttttgtccatgcattgtgtgcttcacatgcttgagaagcaaggagaaaaccgaaaaaagtgttgatttaggagtttcatttttcttcttccccttctttttactaatgttgttgttataattactccttacagagagcagcttcttcctatggctgacattgtaaccccaaatttgaaagaggcatcagctttacttgggagtccgaaacttgaaacagtcggtgatatgcatgctgctgcaaaagcattacatgatatgggtccacggttagctaatactatagagcttagttctcgagcaataattatatcatttaatttcttgtgtactacctactttctagatctttagatagaattacttatctctagtgatatttttcaatgaccagagtgaaatattgatttaccatggtttttccttgcttcctttatcttgctttctgattcggtaacacatgtgtatttattttatctgattttagaagaatgtttttgtttgaaccttgaatacatttttctgatactacagaataatttcatattatctgtaagtcttggatggtatggcagaaagttttcagagactattggaaatatttgtagctctacattatttggattagttgacatgttaagattttaagaaaagaaaagagttaaacgtctttttttcccactggagataacatagaaaggaagcagtgagtgtggggtcacaaattagagagaaccttcaagtatttttgtagcaactattgtcaaggattgaggaagttgtagaaatggacagtaatttactggtctttgaaacaagaagactttgttggatgtagcttcccttgctattctttggggtgtataattggaaagatacaatagaatactcaattacgtagaaaaaaaaagttggaaaatagtggagaaaagatataggaaaaattttcctaaatttttatatcagttgaatagaagttttggttttgcttcaaaaagaagggaggaaaaaatgaatatgtttaataaagtttccaaacttatacaattatatgaaatttctaagaagagattctatcctctttatatatatatatatattttaatccaaacaaaagaaaataaattctatagaatggcaatttctattcttactgaaaacattcaagttccatacaatgggatagtgaatggaactttttgcagttacatgtgataatcttgttttttgtgttagactgtattgatctactagtgtttttttggttgtaaatagaatggtattcgaccttctcttattagtacaatgtgtgttttgatagacatccacaatatggtggattagaaaattgtttgagtatgtattgctggggcacattggtatgtgtaaggagattagtagttgagcaatcatggttgttattttacttgggtgtgttatcttttaggaagggaagtaagaattttatgtaggattttggagagtaatagctctagctgggagagatccacaccaaaagtttaaaactttatttataatttcagaatttatatcatcattgatagagaagaaattcctaccgtgtttcttatatgaacaacaaaataaaatatatactgaacggtaaaagaaaaaaaaaatgtatagtagcgtgagaactaattgtttgtcttttcagaaatgtcctcgtcaaaggtggtgaccttcctgattcattggatgctattgatattttctatgatggtatgtatattttaaattacaattcagtaatgatgttttctttatattatggaaaatatcttctcataaaaatatgcttattataggtaaaaacatctttgaactgcgctcctcgcgcataaagactcgtaatactcatggcaccgggtgcagtttggcttcatgcatagcagctgagctggcaaaaggttcttcaatgcttcaagcggttaaggtgaaatatgcatgcaatgatgttgttttaaagcaattcacactggttcacttttggttggaggatccctttaacatattcttttgaacttaaaataaaatttgcatacatgactttctatggtgactggctctctcttgaaaaactaaaaaagaaattagcatgatgattttgacaggcagctaaacactatattgaagcttccttggattatagcagggaccttgtcattggaaatggccgccaaggcccctttgatcactttctcaggcttaagagaaacatgcacagcacttacagggaaaatgcatttgacccaagtgacttgttcttgtatgctgttaccgattcaagaatgaataaaaaatggggtcattctatttcagatgctgttaaagctgccgtagaaggaggtgctaccattgttcaactaaggtttgcagctgttttttttgcttaagtctaatgtcttaattattacacgaactgatgtttacttctgtgttgagcttgtcataatattaatcactttcgtttccctattatgtattacgtcaagcaaataatttaagatatgtgttttagtttattccagaggctcatttattctggactttcaatgggagctttttggcacctatattactgtttcttgttcttcttgcgtagttaaccgttaatttttcatgatgccaaactttcaacatatcaaaatttaaaaggtcatctgttaacctttttagtatgcctgcttttctccaataacttttaatttctataggaagtagtctgctcacaatagttgcttttaaacaatatttttgtctattgactatgttcttaaattgtgtttgcaagggagaaagacattgaaacacgtgattttgtagaagcagccaaatcatgtctcgaaatatgtcgctctcatggggtgccttttctaataaatgatcgtgttgatgttgctcttgcttgcgatgctgatggggtgcatgttggacaatctgacatgcctgttcgtgttgctcgcgatctactaggccctgaaaaaatcatcggtgtgtcgtgcaagaccccagtgcatgctgagcaagcatgggttgatggtgctgattatataggatgcggtggtgtatttccaaccaatacaaaggaaaacaatattactgttgggttggatgggttgaaaactgtttgtatggcttctaagctacctgttgttgccattggaggtatcgggattttgaatgcacgttcggtgatggaaattaatgagtcgcagttgaagggcgttgctgttgtttcagctttgttcgacagagaatgtgttttgacagagactaagaagctgcattcagtgctaatggaggtaacatatatgaagtgataataatttttttttgctattgtaaaagcaatgccaatgaaaatttcattgattgtattgtattttgttgtcgattcttggaggcaattgttttacttaatttttttgttaaattgttttcatttttattttccttgaacaattaaattgtgttcattgaattaagggaaaaattatcactaccaaatcatgcttttcgaatttttttactgttaaaaattttcccaaaactattcacaatgctgaaatataaaacttttgttaagttttacctgttgacaaaatattgatgtggttgatgtgtcattgtcatattagcaccacttgtacaatttaaattttttattttcttattgattatcaataaataaaaataaattaattttaaattttctcattaattattgataagaaaatagatttttaaattttaaattaatttttttatttaaattatacatgtcgtgtcgcgtttatgttgatctttgattttagtagtttcttcaatttctttcttgtagttttggtgaatattttttcttattattgattgaatagccaaatggcttttataacttacaactgtaacaactcagaataaaaatatctaaaaaataggaaactaactaacaacttatccctagatataatataacaaactaagactaagttaagtgtatttttacacgttattttacactccccctcaagttggcgtatagatatcaatcatacccaacttgtgtacaagacactcaaatactggtttaaataaacctttagtcaaaatatctacagtttgatcctcagatttcacaaaagggatacaaatgactcccagttccaagttttcttttatgaagtgtcgatcaacctctatatgcttggttctatcgtgttgcaccgggttatgtgcaatacttatagtagccttgttatcacaaaacaacttcataggataattaactttcagcttcagctcatgtagaactcgtcttatccacaagatctcacacaccccattggccatagccctatactcagcttcagcactactccttgcaactacattttgttttttgcttctccaagtcaccaaatttccccatacataagtacaatacccagaggtagattttctatcagtgatcgagcctgcccaatctgcatcagtaaatgcttcaacacttctgttgtctccctttttgaaaagaagacctttacctggactactctttagatacctcagaattcgataattagcttcaagatgttctttataaggacgatgcataaattggctcaccatacttaccgcaaacgcaatatcaggacgagtgtgagacaaatagataagtctcccaactaatcgttggtattgttgcacatccactagtgttccttgttgaatgtcactaagtttcttgttcggatcaataggagtatccataggacaacactcactcattcctgtatccttcagaagatcaagaatgtattttctttgggaaatgaaaatccctttttttgaccgcgcaacctccatagctaagaaatacttcatctcacctagatctttgatttcaaattccttagaaatcttatttttcattgcctctaattcttctagatcatcttctgtaagaagtatatcatcaacataaacaattaaagttgcaatctttccattagttgaatgtcgggtgaataaggtatggtcagcttgtgcttgtatatagccttgtttcttcaccacttgagtgaacctttcaaaccaagctcgcggtgactgtttcaagccataaagagccttttccaacctgcacactttgttttcaaacttatgttcaaagccaggtggtgggagcatgtacacttcttcctccaatcttccatttaagaaagcattcttcacatcaaactgtctcaaaggccaatctaaattagctgcaatagacaacaagatttgaacaatattaagtttggctactggagcaaaggtctcagtgtaatcaataccataggtttgtgtaaaccctttggcaaccaaccgagctttgtacctctctagagtgccatctccattgaatttgggcgtaaaaacccacttacagccaactattggagcacctttgggtagatcttcaactctccatgtctgatttttctccaaagcactcatttcctcaagaacagccttcttctactctggaacatttagggcttcctgtatattatttggaatctgaacatttgacacattggtggtgaaagtgataaaagaagatgaaagttttgagttagagacaacaagagacatgggatatttgacacatgatcgttttcctttcctaatagctatgagaagatcagattcaggactacgattagaagaaatagaagaattacctgattcattttctgatcttggttcagattcttggcatggctgtagaggtctgtgaaccagaagcggcagcagcatttctttggacagggactgatgtggagttgtcagccatttagaagaagaagaagacgaaatagaagaaaaaaaaaaagagcgttcagggtcagggtattaccagctctgataccatgtagttttggtgaatattttttcttattattgattgaataaatatctggaaactaactaacaacttaactctagatataatataacaaacttagactaagttaaatatatttttac

SEQ ID NO: 15997 - DNA, 6279 bp, Cannabis sativa
gctcttccgatcttaataaacatacttgtgagtagatataagatcctggtaaaataatttccaacactcgattcgattgaataatcacaacttcttgctgtcaaaacaacagatcttgggtgaaatcaaaggaaatcgattaatgaaatacatcagagaactagctccagatgagttcttgaacgaaggagatgttgcaaccaacaagatcaatcctgcttatcctgaataggaagtgcaagatcaactcgtggtttcgtggttgttgtcatccatgacagaaagcttactggcgagaatggttggctgtaatacatcgcactagatctagaacaccttaaaaaaacacttcaccttgaaggtttcatcaaaaattcttgaatttcacaccaagctgcaaaacttaaagaaggctcattgagcttgaatgattacttgatgaaagttaaacaaacagtcgatctcatagcctcggttggagaagtgttaagagatcgtgataatgtagctgcgatctttaaaggattgcctaatgagtacgacacatttgtcatctcctcaaacactaggatcgagaactacactgttaggaaatagaagctctgctctgggcctctgaatcaaggatcaagaatcaaacaaagaagtagatctcagtgccaattttacaacttctagtcttgatccagctgctgaagctaatctagccttcagaagattcaggcagcaacaatatgcaacaagaggaaatatgcaattctctaatactggacaaggttagttcaacaacagaaactatatgcgtgcaaatgactcagctttgaacactaaccaaaaattttggatgtagaggtaattttaatatgaacagaggtggtagatctggtatgaatcccaataacatgcctcaatgtcaactttgtttacgatttggacatattgttcaagattgtttttatcattttgacaaagctttctcaagaccctctctaggctcaaccagctgcagtactcaaccatttactcaacctcagacacaagctaatcttgcaacatcaaacaacattggtgatgccagctggtacccagattctggagccacaaatcattgtactccacagactcagaatctggcaaactattatgactatgatggccaagattagatgtatgttggtgatggctcttagtatctcaaaatttgctcatgacaataatgtattctttgaattccatgatgacatgtgctttctcaaggacaaattgactcattctatcttgctgatgaggaggcacaagaatggcctttattcttttgagccatctcaattcagcattggctcctcaaaatctcagcaacctgtgtcacactagcaacccaacctagtagtagctgcaatcctacatcaaaaagcacctttgttattactctcagtaactctagagccactgtttctagctatatcaagtgtaattctgatgttaaaaatgatttcactttatgacacaataggttaggacatccatttgagaaaattgtacaaagagtcttgcaatcttgtatcattcatttaagcaataaaatttctcaattttcaatatattctgcctgttgccttgagaaaattcacaagtttcccttcccaaaggcttccaataatgttattttagaaccgttgcagctagtggtttcagatttatggggaccatgtcacacaacctcctttaatggctataaatattacatccattttgttgatgttttctctaggtttacatggttgtatctgctgaaaaacaagtcagatgcattcaaagtttttctaaactttaaatctgaagtagaactcaaaagttgtaagcctctcaaagccttgcaaactgactgagggtgaatttagatcattttctaactatcttactaaaaatggaatacatcacaaacatccttgccccaccacacgccaacaaaatggtctagctgagtgcaaacatagacacattgttgagaatgatcttgctttgttagctcaagcttctctatcccttaagttttgggatgaagctttcagaactgttgtgtacattcacaacaggttgcctacacctgtgttaggcaacaaatctccccttgaaaccctgttcaacattcaaccagattacacatcctttaaaacatttggttgtaaatgttttcctaatataaggccatacaatatacacaaactttagtttagatttgctccatgcacatttctaggctatagcttgaatcattaagactataaatgccttgacaaaaatggaagactttatatctcaagagatgttgtctttgaagagttctcttttccttatgaggagtctggtgctcaatccattcctaattcctctcagcaagcaaagaactcctttgtgtctggcattatccctatttgtcctcactttaaatcaccttacaccatgatagatttgttaacttataatttgtagattgaccaccatgttgtacctgaaaatactgaaccatttgtgcaaccaaccaacaaatacatttgatgttatgactaacagttggcatcaaagtcaaccacaacatgttgatatacatcatgagcaacctgtgcatgacattcaacatctatagagtgagcaatagcctgtgcataatattcaacctgtgtaagaggagcaacaaagtatttcacatgatctctcaccagatttacctcacataccccaaactacctctctgccaactgaccctgcaagaaaccttatctctccctcagtctcacttgaaactaatcatccagtgccaacatctttacctgacattattgcagggtgtcaaaatgcttctgaacaacaaaataaacacaacatgaagattaggtctaagttatcgattcacaagccaaaaacctatttagtatccaaagttcccacaacacttcaagaagcattgcaacaaattcaatggaacaatgcaatggttgatgaagtcttagcactcacaagaaacaaaacatatactttggtcaaacttccaccaggaagaaaggcaattggatgcaagtgggtctacagaattaaagaaaatattgatggcactgtcaacaaacacaaggcaagactggttgccaagggctttcatcagcagcctgggttcgattacactaaaacatttagttttgtggtgaaaccagtcacaattacagtggtcttaacacttgctttatccaagggatggacaataagacaactagatgtcaataatgcttttctcaatggagaattgcaggaagaagtgtacatggtgttgccacctgggtttaaaattcctagaaaaattgatctattttgcaagcttcacaaagccctttatggcctcaaacaagctcctagagcatggtttaacaagctacaaaataatcttttatctctttgttttgtttcatccatttcagatcactctctgtttatacttcatactgatgaagttgtcactttggtacttatgtatgtggagaatattatcatcacaggaagtgaccataatgttgttgctgagctcatctcaactctcaatactctatttgctctcaaagatctgggtcctctacactatatctttggtattgaagtacatcacactaaataagggtcttcatctctatcaagcaaaatatgctcgagacctacttgtaaaggctcaaatggctgatgcaaaaccttctcctcaaccaatgatcagtgcctttcatttgtcagctcaccaaggggaaccactggcagattttgtacattatcgttctgtagtaggagcataacaatatcttataatcacaaggcctaaactttcattcagtgtgaacaaagtttgtcaattcatgtaaaagcctttaaccaaacattgtctgctatcaaatgaattcttaggtacatcagtggcaccatcaactttggtcttcatctaaaaagacctaactcttatgattttatggccatttgtgatgctgattgggcatcagatccagatgacaggtgttccactactggttttgctatttgctttggctccaagttgataacctggaatagtaagaagcagccaacaatatcttgttcaagtagtaaagcaaagtacagaagtgtggctaatagcagtactgagttatcatggttgcattatttgttctctaaacttagaattcagctaccttagccacccacaatttggtgcgacaacttaagcactgtcttgttaactcaaaatccaattctacatgctagaacaaagcatattgaacttgatttgtactttgttcgagagaaggtgttgaacaagatggtccaaatcagacatgttcccgcctatgatcagttggttgatggtctaaccaaagaaatctcgagctaaaggttctctttgttcaggaacaaatcaacattgaaaatgcttcaattgtgagtttgaggggaggtgttataactgattagttgattagttagttagagctagttacctaactcatcctagtcagcatttgttagtttgtggagctgctaccacttgatgttgttagttgttttctgtttcaatgtacttgtatatatactctcccctgcttcattgaataacaagattttctttcacaatcttcaacctttccttttctttcttcttcttcttcttttctttctattcattactttaagttcaacaatggccaagatttaacattcggaagaaaaaacaaagaatgaaaagcttgatatatgtcttaaaacattaaatgtccaacttatatctcatttgctaagaggtattaaaacaagttaagtggctgtaaaaaataaaaacaaataatcttaatgagtataaatctgacctaataagatttagctcttcattaactggaaacaaatacagccttaatatttaactactttttatcacactaaaagcttgaaaaatttgaatacttaccaaatatgacgacttattcctttcactaaaacctttaatacatcaagtccaagcaaaaaaatcaaaaatgaaagaaaaggaaacacaagcagaatgtgtgctacttgggttcaatctttgttgagagtacgtatccaccaccaccactataatcaaagtggtcactaccactaatatcctttttaagcaaagcaacattactataaggatgtctaagagggcctttggcatttccaacaaaatcagtggcggaagaggatgctgatgttgagttggtattaataccatcattctgtaaaatggtttcaatagccttaacaacttcactcattgacggacgataaacagctgtctcttcaacgcattgcatggccaactccaagaatttgccaaagccaataagaattggagtatttctaatggatggatcaatcatctccttcatgccgtaactctccacatcgtttctattcaatgacattcgtacttcgcgaacaatatactttcccttctcgattggttgcttcgaagttataagctcaagcataacaacaccaaaactatacacatcactcttctctgttaattggttagtcatgtagtactccggatcaagataaccctgcaaattgaccaaaaaaaaattagcataatactcactatttggtgttgatcatgccattggattagttctttagaaagaaaaaacctaaattttgaattaattatagagaaaaatataataatgatagttccaaggaaaaaagacttggatcacgcccttttacttgaaaatggagttgaaaagacagttagccactctacaaagcattgctcctctgttcagaagcacaataattttcattttcttctttgtttttatcataatataattaatattaatttcgctcatatttgcctaatgatgcgcagacaacaagttcctcgaccacttaaagagtacagctgatgttctcagcagtgttctagctcattaaaaagtatcataatgaaactttacatttactaaaaaaatgtatcttaatactcaccagagtgcctttgacttgagttgaaacatgtccttttccgctgtctgagaccagcttagacaagccaaaatctgcaacctttgctcctaaagtttcatctagtagaatattggttgttttgacatccctgtgaattattggaggatttgctagctcatgtaggtaagcaagtcctcttgctgagccaagagctatgcgaagtctcctcttccaatcgagatgaataccagattt

SEQ ID NO: 15998 - DNA, 3588 bp, Cannabis sativa
aaatgtcctcgaataataaagtagttttgaaaaatgccataaaagagtcttattccacaacaagcccaatccataggcctggcccagctgcttttggtcaagagccaagccttgagtagcttacaaccacctggcccagctcaagtgttaacttttttaggaaattacatttatacctactttactttacttgttttaattttacctctatttttcatatttttttagatatacccacttttatggatgatgtttccattagaccccttaggttatgcaaattatatgctagacgtaagtaaatagtgaaagtatattaggaaatctactcaaaaaattggatatattttaataaaaaaacaatatgagagtatttttgattaatggataaaaaaaaaaaagtatttttcaatttatccctaactttttttaaatatgttgagaaatatttattttatctattaattaaaaatatttttattatattccattagaaagtagtaggtcatccaatatgctcttaccatatacttaaatctagaatataatttatattaacctagaaatgtatatttagctttagtcaactaataataacatcactcaataatacaaattgaccctcaattttgtgtgtatgtgttttataaaatgagagaaaaagaaagagagcaagtattcattgatggaatctatactatatgagcctagagtacattgtcaactttttttttctgcagtattataagaagaaatttacaaattttggagacttgaatgaaaacatgatcaagacaccaaattgaactaggagaatgttgttgaagaggaggaagggccaatgagtactgctttggtataagccaaaggtaaagatagaagtttctttgcttttcctacataagcacgtttagtaaagttatcataatcattggcttcaattgcatccaatatctgtcgatatagcaacaatgatgcccacacaggccatctactagctgagcttagctcacaaacacccttctcagcctcatcgaagaacattcttgctctctttatttgccctttcatgaaattcctccatttatcggttactttaccccgaaaaatgtcttcatctgataaccctgctcgcgctaattcgtcttgtgggagatacactcttcctcttctagcactgcaataacaaatcatcatcataatcatcagtataagatcaatttttaagtcaagtagttaaaagagaagaagtagaaaagaagttgagatcttactcttctccaacatctctaagtatgttagtgagttgattagctatgccaagagccaatgcagcattgtaaacactctcagttgaagcctttgattctggtgctattcccataactggaacactcataagcccaacagttccagcaacatagtaacaataaaggtatagttcatcaaagttgttgtatcttgattttctcaagtctaatctcattccttctatcatgtccttaaagggctgtccacattaacaacagcaaagcttttaataaaattatgtattctctgccatggctactaaattgagcaataagataactatacctgaatatcaacagggtattttgagactgtatgagacagagcagcatcatacatatcaaaaggccgaccttcaaagagatcacttagtctattttcccatctgtcaagagcctttggtgtgatgtgtgaagcgttaggcccatccacaagctcatcagtccttctacaccacactgtgtcaaaacaaaaaaagaaaaacattctttaataaacaaaccaccaaaccaacctatatagctagctagctacttgcttattttgctcacttactaattaaggaaacaaacaaatgaagaacaagagatgaaatcaattaaggggtcatccaaaatgaccttcatgcatcataagcttagtggtaataatcatacgaaccataaatggcccaaatagcttttcttctttctggtgtcataagcattgtgcctgagaatcaaacaaagaaactgatcaatttagattggtttcccaaatggtttacatcaattgaatcaaaatcatacaaaaacatgatattctttgtttttgattaagaaccagaaagctttaaataaccaaaaaaaaaaaaaatacccagataaaaagtcttggcatattcagcacaaacttcaccacaacgatcataagcttcattcaagagaccccaattggtggttccatcagtttgaatggtgggtggattcaagttcaaatttttctctttgggtttcctctgttctcgaaccagagcagcttgtttaagcacaacttcatacaccttctcttctgaagaccttgctggattcgcaactgtgcccgagtaagcccaaaccccacttggcaaactcaacttattattattattattacaccacatttttgacctctttgttccaccatttttgctcccaacaaagctcaacacagagcttatactctctttaggactaacatgtacccaaagaacaacactagacatttcaaaacaaaacagactcttttactgactttctttcttctttctctctcttttgtttttggggtgcctcaaattttgtactacaatagctttggcttgtttctgcttcttcttcttcttgagttggcaaatgactcaaccaataatattatttgtataatgaaaagtgtcttttttttttcttcttcttctgtctacttcttttttcttcttaattttatttatttgttaggtaaaagaattattttatatataatagattcatttaatcttgtttattttttgtattattatagcatttattataaagtaaaaaagggattttccaaagattacggatatacttatcacaacaatatctctctatattgtgaaagatagaaagataggtctatggaaatatagtccacttctctaaagatgacacttggaaagatatggatatgcctttctaaaagaaaaatagaaatttgtatggctcaactttacttcggtaaagttatttttataaataaaaataaaattaatgaaaaacatgtgaaattattgatcaaaattcaaaagtatttaagttaatctcaagtcttctctcatttaattaatatggaccgtgttacatccatattgtatttaataattgtattttaatcgaaaagatcaagcataatataagtcaatgcttcaaagcctaactttaaaatcataacaagaaaatatagatgatttctagaaaattaggtttagtagatatcaatagagttggatattatcattggactatgttttcaatccgttgttaaaaatagtttgatagaaagaatggaatataaacttcttttgtattttataaaaaccaagttagtaaaaaccaattttgttttattattaatatatatatatatatttttttttgatattttgtgttttataatgatacttatttgaaatcatgaacttattaagcttgattgatttgatcaaatgttatcatttataagtaggggtgttcacaaagtatccgatccaatccaatc

SEQ ID NO: 15999 - DNA, 3068 bp, Cannabis sativa
tggtgtgtttagacccaatgtccttcaccaagaagtagagagttctggagtcaccctcttttgacaccctgtctacgccatgaaggaatttaacattcattttcccatgctaaaacccaaaatagcccgatcactgcttggtgttgttcggtctcaaatcaaagagataatgtatagcatggcctgttggccaattccatatcatcaccttgtatataacgaagatggggataagaatttgtatggccatgggggagaactgccccagactaatgccaaaataatcggccacatctttgaaaaaattatggagggggagttccccccataagtgatatggtgatgggaccatgtgcacagtccctttccaagatcatgtgctagctggtcgggggaggggagtatcatttggcagactttgccgttcacggtcagttcgtctacattccagaattgagcctcactaagactactaggaggggccacaaaaggagtctgggtagttttgcaacggctagtacggacctccttaatcactctcagggcaaattccttaacttttagggtgacttgcttggaaccctcgattgtttccttctcaatggtggctttgtggaaagtattctcagcttcattttcggcccactccttaaatgctttcactatttcttccatagcttcattgttagatccagtctcgagatcatctaataccctcctcttggtaatgacctccgccgcatgaggactactggaagaacatgcgcaatttttctttttagtgtgcgccatggcgagtaacatgacaggcagctgtgcagtggttataacagtcttggttaggggaagctccctgggtggttcaataggcacccctattggaatgttaatctcatcgaaaggaagtgtgtacatccactcttaggccaagtaagatcgtattccctttccaagctcccagatatgcctattgtacgcttcaccacctatagtctctcgataaaggtgattgggcatttttgacccactactagatccctcatccctggacgagttgtggcgaggtgacgatgtacaatatttgaacaaatgttgaagaagatgctcgtctactcggtgctcacctccccaataatcgctataacgcatctgcaaaaaggaaaaagtagggagatgagtacaccgagtaatgctagtaggctatttatgatggactcacctactagaacaaaagtaaaaggagaagggaaacatgtataacaaaaatttacaacgagggaataaccattcatgtagctaaatggaggaaccaacaatgacaattacacacttaaaaatttttactaagtgcaagaagcaaaaataacacatgagagcatatataagagaccccaaaagggatgcaagaaatagtcatctctaacctgtgaagcagcgctacagttgtggcaaaacatcacacaccgaccccctatggagtagtctcagagtgatacaccccgatccctgcatggcagtaatggggtggtctaatccataatctcaacccaacctcaatcgtaaaaaaaaaagtgtggggatcttactcagggtgtaccctgacctatcaatattggggtgacaccccaatctcggggtatggaggcaatatgggaagagttgtctcggggtgtgtgtgtaatctataacacacacatgtatctaatgaatatatatgtggtcaagtggaggcattgtggaatgagtttcttggggtgtgtgtgctctttaaaaacatgataaaatatatatatgtaatgaacatatatatatggtcacttggaggttgtatgggacacattgagtctcgggttgtgtaatgaatatatatatctacaacaagaagtttcaggccacgcatgcatgactattgactatatacaaacttagacttttcatagaacatatatatgtggtctcggggtgtgttgtctatatatatagaatgaaaaatatataatgtatatatatatatgtggtcaagtagaggcattatggggggagccttggtgtatgttctccttcaaaataaaaattaaaataagacatctatatatgcaatgagtatatatatatgggagtttgcttggggtcacacggtgtgtgtagctcggggtatagatgcaacatggggtacataccccgaccccaaaggggggtgtttcagggtacacaccctgatttcaaaagggggtgtcctggggtaacaataatccaaactcagggcatagaggcaataacggggtacacaccctgacccccaaagggggtgtctcgaggtacatatcctgacccccaaaggggatgtctcagggtacatacccgacccccaagggtggtgcaactcggggtgtctccagtattatggccacgaaggtaaaccccgacccccaatggaatgcaactcggggtgtgggtgcacctcagggtaccaccccgacccccaatggaaggcaactcggggtataccaccccgacccccaaagagataccttggggtgtggctagaaaagtgacctgagatcaacacttgacacccacacaaagcatgatcatcccacaaattttctaagtgtatgacatcccaacaaacacatttttacccattttttgagaatgaaaattggaaaaatggagggaaaattaaattttttcatgttcatggtgttcttcaatatacaagaacacaaccaactaaaagtttcaaatttcttcattttccaccaaattacacaaaatcaaagccaaaaacacattacccaccatctatacaacaaaacccaagcatcaaacactcacattacataaaaaaaatacaagaatcccaatcaaccatatcaaattcggccattgcaagaaaagccaagaaaaagtttaaaaaataccaccaaaacatgatttattttccaagcatactacaaaacccaagcatcaaacactcacattacacataatcacatatcttataaaaatactaaatctaacatagtttattttctaaggtgtccaatgaactgatacagtgtccc

SEQ ID NO: 16000 - DNA, 6126 bp, Cannabis sativa
  modified_base (6084)..(6100): a, c, t, g, unknown or other
ccaaaccccaaccccagtccccgacactcaaaaaaacaaaaatagttacaatatgcatttttacttttcaaaaacaaaattataaaaaaaaaattctactttcatttttgtgattaaaaaattaaaaaacaaaagtattaccaaaagccacatatattaacaggaatcttacaataatttacactatcaaaatcagtcaataatatgaaagcaaacaggtgaaaacctaggaatcgtacaattaaacattaaagaacaaaagaaattgatgttagctcatcaactaaaaattaagtttctctttgcataatttcataaatctacctataattcataccatgggagaattttcagctaactcatcaactaaaatttgaaatattcagtttatatcatataataaataattagactgctgattctccaagtagatactatggagtagacatatgaaagctagataaaagtagaattctaacaaaagatattagaaaaaaaaccagctaaattttactataatgcggaaaaatagtgaaacatctgggggtatatcatcaccaattagtaagataagtaactaaagcatgataaagaattccacaaagattgagcgagaataatacaaaaccaaataccttggagtacagctgcgtccaagatgtagttgacaaacgcttcatggaaccaacctttgacactggaacttttccatgtaaacattggatagaagtgttatcaagaggactgcacaggtcattaaaatttaagtcactgaaaaatgttcacaaatacacaaagataatgtcatttccaaagaaaagctatacagaaatgcgtagacctgaaacatattagacacaaattgagaaaagctatacagaaatgcgtagacactgaaacatataaaacacaaatagagatgcaggatgcttatgttgggaaacttagcatatcatgaaaacaagcaagagttttctgagacacctaaaactttaagggcagacttgaaaactattaagattcaccaagagacatacagcaaatttgcattcaagaaagaaagaaataaaaatttgaagaatgaatgcaaccatctctaatttacatttaacaaaaatagatcttacggggcagtaatgttgtcagcccattgacgaagccaatctgcagaaatccagcaaaatggttcttcgagtgatttaacaggggcctcagacaaaatagatcgaacttcctgctttctttctgaaatacagttcagctccatttccttctttgatgtgtattgtacacaagcatcagcacatgatgcattcaacttttctacctcttcagaaagatgggaaggcagagaaacaccatgatgcaaggaagtcacatttccatctatttccatatcattagcaccacaaactgcaggacatttaccattctcctttctaccacacctgagattatacatcaacatatatgcatcacttgaagaaaatgtccctacatgaccaccactactagaactaggatcataagattcttgctgaactacatccttatgattgccattggcaacatcactcattagttctgtactggtgggattcacgaaaggctcagttttagcaggcctgtgactatttgaagaaccttctccaaatggatgatgacctaagtttgagacatgctcatcgtcaaactcccaccattgccctgtattttcatccttaatatgagctatataatggccactgttaactgcagtacccttgtgaatcagcacagccgagagatcatagattgattcagtctgagtaggctcagataccctatgatgcatgtctaattctccagggaaactaaatacagaagtgattttcttcttcatagtggtctactgacacaaatcaacaacagcagaaaataccacaaaaacattatgccaaaatacttgtaatgatacatacaataagtaaaattattctaataataacctcaactccattaaaaagggaagacatacaaaactaatagaaaaattagttgtgtcaattttagctttgacatgtagcaaattacactagcaattatcaaacacagactacagcatatattgactaacatatgattccaaaagaagtgatagtaccttcggaacaaacacacatcgcttgagctgaaaatttagtacaggtggcaatgtccgcagcttgatgctacgagtagcattaactcttgttttacaagactcgcagtaatattgattatctccatgtagctcttctacactaagataatcatccaagctattatctaaacttttcaaacccttcacattcagctctagctcataaaagtcttgcatatttgaagatgcttcagaatcctgtccacattgagagcacctacaaaagaaaataaacaatagagtaaaatgcataacctttacccgcagaatatacaacttaattttttttagaataaagtagctatgcatgataaggtgaaggtatatttagaacgagaaaacagatgtaaattatcctgttagaatccaagaatataacaagaaaattcaaattcaatgaagagcaagccatcaacagaatgccatagtaaccatacatagaaaattaaaaccagatcctatcttacgttgtcacatgagacacagttccacgaaaaagatcttggacaacagttcttgccttggaaaccttagaatggttaagacaacgctcaagcaacgaaagaagcaatgtcaaaaactcatggctatcttgttgaactccattatccaactcaagtgttttaacaaatggagaagagtcgataaaagccattttactggcatgtaactgagcgaaaagtcgtgctagctgctctaacactggctgttttttcaaaagatctggttcagctgaaaatatgcctccacggaaagatttattcatatacaaacactggagtatgctgttggcatagcatgttgcgccgagatttgtaagtcctgagggagaatcagcagaagcacgaagatcagtggatgggtctggaccaagagcctgaatgatgtctgatgtcttctgccacaaccccacttttcggcttccatttagagggggaattagcccacaaaagcagttaggattatcttttgtattcacacggcatccttgacaaactggtttccaaattttataaagcttggtgacatcctcatcagtaatttcaccggtcatgtggatcttcctacagaacaacccaacaaaggatcaattaatacatatgtccgccaacaaatataatcaaaatcacacagcgccaagttctggctgcaacctcaataattctgaagagatgtcaacatcatccccttgcttgtgtcttttatttttactccgcgttgttggtctgctcatcttaacaaccagatgaccctgcagtgtccatgaacatcaaaagtttaagagagtcaagttagaaccaaaaataaatacatatacaaaataatcaataacaatatacacttcaagccaaaagaaaaaaatatataaaaaacagagccacttacctaaaaatctcttctttttacttatcagacgaaaaaaaaaaatcattgctttttaatatgaagtcaagtttgtcttctttattttctttccctcaatgtaacaatacagaatctaaaaagttatggaggctttcacattcaacacaaagctctgaatgtaagactttcaaatttacagaaatttcaagttcatagactttaactaacacacagaacaaaacaaataactcaatactcataatagtattcaataatactcatgaagaagacccaaattcaactgaaacctgtcgaatattaatccatactttcattgctcatctcaatagaaaaagaaaaagaagaaagaaagaaaaaatgcgaaaaaaaggcacatattttccactcatcattccccaaacaaatatgttacgggaaaacacacaatgggagctactgctatatcccactgcgataatagacatacataatatacatatatacataaaatagaaatatatatatttgttgaattcctttatttagtttcggcaaatcaaaacaacgtaaaaaaaataacactaaaaatttagaagaaaaaaaaaccctaaaaattaaaccaagtatagcaacaaaaaataaaacaaacaaaaaaaaccctaataataaaaataaataatcaaaacaactaaatattcgtgcatagttatttaaaaaaacaaaaacatcatagagtcacttctctaatatttgcaaaagatatatatattgaaaaaaaaaaacgaagaaaaaaaaaaacaatagagttacctctgcaacgaggaaaggaagctgagtttgaactgaaacgagatgaagatcagaagcagagaaagcagagaaaaaattaaatatattaatattatttcttcacttttatttattaatactgaaaaaacctttcggaatttgtgaaatggttttttcgacaatttttgttaacattttattttattttattttagtcgtttaacttgctatttttaacttgcctcaacccaaaatcaaaacatataatatacaatattaattaattaattaaagttacattacatgtacaaatattcacccaataatatcacatttatttcatgtaatatagtcattcaaattatattgtgaattttcatacgtatcaagccagtcaggtaaattatgcttggtaattttgtaattaaaagaggtatcataatattaaatactttcattatgtaagtattaaattttaaattaaataataggtaatataaagagaagagggccagccatgcctaaatgggttagtctccggagattctgacagtacttctattttgcagggcaccattatatcaggacactgccaaaagttttattattattactgaaaaggaattattttaatatttcatttgtattttaaaaaaacagtattggcttaaaataacaagttttggacatatcaaactgaagagtcaagtcattccattcaaattcaatcacaaagaaaaaagaaactgaagagacattatttggatttcaaaaaaaaaaagagacattatatatgtaattttaaaatgtcagacacctatatttaataaaaaatctaagtctaataagaaaaattagctggcgaaattttattttattttctttttttgatagaaactggcgaaaattaataagcttttttttttttttggcttttttttttttttttaaccaaaaaaaaataataatattacaaaaatacttttaaaaatacataaatataccgttgaaattaaaaaaaaaatatacaaatacttcttacatatactttcaacccaagatccatgcttcctagacaatcatcggtcaaccacgcagcaacccaacgcaactgaaacgaaaatccaacaagagaagacgactagaatcaataaaaatagggattgtttcgaattcatgaaaaaaaatacaaaaaaaaactattacgaaactaaaattcaactagaattccagtttaattcacataaaacgaatgtcccgactccaatttttatatccatgaaatgtagatctcaaaaagttaaactggagttcccaaacaattcaacttaagtatatataatccaaaaaaaaaaaattacaacaatacaatagtaaaatgtttatcctggtgtatattcatctaaatctctaatggtgaatttgttcatattaaatcacgaagagacatgtaaataaagttacgcatgtggaaatattgttctgatttttaatgtttcataacagttgcataaatattttactacgagtaccagttatttctccacatattactattaaggtataagtaattatcgatcagtgacaaaaatactgataaataatttcttacatatatacattcacattttttaatttcaattaagtacgttagttggctcgcaacagatataactgttgcattacagtttcaacagctacccacaatccatgcttcctgggattgaaactgtgacagtcagtagtcnnnnnnnnnnnnnnnnnaaataccgggtaagctgtgcaatccc

SEQ ID NO: 16001 - DNA, 7057 bp, Cannabis sativa
  modified_base (5619)..(5627): a, c, t, g, unknown or other
atatcttaataatgtccaatattattgttgctgtgtttaacaattttctttttaattaattcacttgcggagaggataggctttgtaaaatgaactttgatgtggtctaccacttaccactgcgaagtggttcgtttgtcacatcattgtctccattatcttcaaattcaagttcaacttccataaataattatatggatttattgatctcaacacaaaacacatatatatggaaataacataatatcacttttttttttggtaatgttttttcttctttttcttctttgtagtagatgatcatatatagcgattggttaaggctacaaattttcctgaggtggtgggggtaaattataataattatatgaataatggtttgacaatttgtatttcctttaagaaatattgttattatatactatacattaatttatgtaactttgtatttcaattaatagagctgcattaacataaagatcggatggtaaagtagtttttggaagataatactgtcgattatatatatgtgtgtgtgacgtgagatataacctttaacttaaaacactaaaaactgttgaaagtttgactaatttaatatgatgtttctcaaattttggcatagtaattaatagtacaaaacaatgtttgtctattttgttgcatgttcgaagcaacagtatttagatgaaaaatgttatatttcttttttgacccccaaaaaagaaaagagagcccaatatatttgatcatgcatgctcaactgtgacttttggagctttccgtagaaaaatatgttgaccaattaatcgatctttaatactaattgaccaataagtttgagagtaatatttagaaattttgttttatttttttttttcaatttttgttttcttttatacaaatcaaaattaaaataaaacagaaaatttctaattaactagctctagctagcattaataatctaaaactggccccatgtgaaactcgaaatatacctttgaaaaatattctaactagtattatacgaaatcaacaaagaaatacgaaatgatcaacaaaggaatataaagagcaatcgggttttattattatttattggatatatatatatatatatatatatatagaagatgcttttgaaagaaattaaactattttttttttttcagggagccactgtaccctagctataatatgagtaattagctcctagtttatagaaaataatagttttttttttgtttgaataaatataaaatatataactgttttttctcagcatgaattattaaattacaaaattattttaaaaaatatacataatgaatgtgaaaaactatattaattatgtgaagacatgatattttaggttgtatatgtataataataacactatatctgccctcaattatggggtgctataagaaagctgaaaaaagagagattcatatgatggccgcgtgccctctctctctctctctctatatatatatatatagatatatctatatactatataaataatcaagtaatatataacatatatatagacaaaaacaaaggttctaatacctgccaagtgcccttctattttcctttcaacatttgtttttttaaaacaaaaaaataggttccaaagttgtgcttgtgtaatgtgccttcactttcattggaacacctttgctctagatctcctatatcttaccaattgtgacttcatccaataataaattgctgtctttatctctttaaccaacactcctaattctccaactataaaaataaattatttttctttttcttttgaatgattaaatttaaattagtttagactatacagaatctaactaagttcaataattatttattcataatcatgaatagtgttttttgcttaattagactatacacacatttaattttaatgagaaattaaggaactctaccctcatgacaattgcaagcatttttatttttatttagttagcttagaaatgaaaaatttttttaaaaaaaataaatcctatataaattattaattatgggcagaaccatgtgcacccccatggccccctaaaaaagaaatataaaaagaaattatataattctttgtaaatttgttgttaagcccctcctttttagatttattcataatggcccttcctactttgatactgccacagggtactgtttttatatgatacatcctagtattgatgcacatctttactgtttttgtcttctaaaagtcaattcaaattttttataagacagtctacatttatatattaatcatatctttcaaaaaagtaagacaagatataaaatacaattcatacactccatgtaagtaaaataaaattaataagaaaaaatataacatattatttaagcttttattttcgatatgacattattgggagaatatcatgaagacctataatgtaaactgttataaaagaaaaagaaaatagaattttatatttaaaaaaaaaataaaacaatacatggagacacctatttctaaagagtgttttctaaaattatatttgtcagtggccttatgatttcatcatttgatttttatatagtccagatccattttaccctttctttaaaaagattgaaaagtatttaccttcatatccaaaaaggaaaaaaaaatatttaccttgacaaatgacataacatacttcctagctagtgtaaaagtaaatttatgtctgccatgcaaacaaaattttggagtcattgtacaatttgtcatgcttcattcatgatcatgatcattgggttttactagatccatagaggtcatctaggaaataaagatttatattaaaagatgtacttatgatgatgatcagaattagacagtttttatcactcgattttaacttatagaagttataaatttttcacatttttcacttgtatttcattaaagaaaaaaaaaaaaaaaactatacatccattaattgacaatagtatgtattgacatgactaataatgtttgcactaatctggtttttcagtggtgaactgaaacacatatgccaatataagaacatcaatctattagtgggaatttgaagttaaaccaataaaccaattcccacgtatcaacacatctgggactgagattattttgggccattaaaatgaaggtgattgatttttaataaagtgatgcctgataattaatgtaattagttaactaatatgttgttagttagtttattaattaattattagttttcttctaagttttgtttactcttttttgtatttttgtaacagaattcagttgaattgaattttagctccattataatctttggcctataaataaagctctaaacctcttaatcaatgctaagatttctagcattgttatgaggcttcctttcattttttttcttgctgttattctttcatggtatccgagctcctttaactcacgttcatgatgtcctctgacgacgactcgtctcctgttggtatcactaatcctcaccctcaagctccacctcttatgcaacagtagaatcctttctcccattctctcacctcttctcttaccatcaagcttgattgagctaattttctttcctcgaaattgcaaattgtgcctactattattgcccacgattttgacaaaatcctcttctccgatgttactcttcctgataaactgatcaatggcaaaagtaaccctgtctttctttaatggcaacacaaagagtagcttccgttatcctagttgcactcctctatgtctgagagtgttcttggtactgtctttacttacaatacctcacatactctatggaaggcccttgaacaaagattctccactgaatccaaagaaaaactttttcaactcaaaggtcagctcaccaatcttcataaatgttccttgagtatctctgattacattgacaagattaagtcaatctacgattccttggccattgctgctacataacatcacagatcttgatatgatccttcatcttctcaatggccttggccttgaatttgatcgagtagtttttagtatcatgtctcgcagtgatgtcttgtctcttaaagatgttcaagccttgcttttggctcatgaaacaagactcgaaaggcaccattctatgcttgatctctccaccaaaatgtcagccaaattttacctttggctcttgtaatggcccttatcgtccacctccatacaatgccaaaaatacaaatcctaaccaacaaactctaaatccatcttgtaacccttcttgacctccgaacaataatcgtcccctgtgttaagtttgcttaaaatctggagacacagctcctgtttgtcattatcgctttgacaaaaactgggtgaccccaaagccaaattcctctcagcctcaggcatatcttactgaacaaaaatttgattatgatcctaggttcatgtctcccaatctctccctgattttggggatgatgtaggctggttcgtggacacaagagctacaaatcatgtcacctgcaacatgggcagtcttaactcaacaaccacttgctttggccaggaaactgttaggatatttttagcctattttttatgtcatttttagagttaattttcttcttcattgtcactttttggaatagaattatgattgttttcttagatttcaagttccgacacttggaatgtataaattggtcaaatttcagaaaaagatgatctaaaaaatagagaaaattgttcaaaaaaataaagctaaaacttaaagtctaaatttgactatgatctgatcatattttgaaaaaagtgaaaatataaaagttctagatttatctttcagctttccagaacatcttgaatcgtccaattccaagtaatatcgagagagttatggccgaaatactattagtcattgcaataggaaatttttgaaaaaaataaaaataaaaagatagctttttaagtagagttgcgatttttttttttttaagtttaaattttaaatctttttagtatttttgaggtaactcaattagcctatataaacacattattattagtattttgaggacgttttgagagctaaaaaaaacttagaaactcttaattagcaagcaatcaaggagtacgaattttggagagaaaaatcaatattgaaggttttctcaacagggttttcaacattcttttcttctctattttcttcttctattctaaattaatatgtgtgaaattgctaagatgaacatgagtagctaaacatgtgattagggtttagatggatattgtttgacattaattttttggttttaatatgatttaatttctcctcaatttctatgtattctatttcactcatacttaatttctttattaattgcctggccatcaattaattatttatgattttaatgcaaaatctgagaagtgagtgtcaattgtgctatagtaaaatataactaaattttgatataggacgagagtatctatatggtttggatagcttatagagtttctgtgtttaatgcctctcaaatgtttaatttatcatgagagtaaaaaatttgcatgtaattatggtttatatatctgagaagactatnnnnnnnnntagtaaacctgctattgcatataatttggtaataggaatagaatcatattaaaccataatcagtagatgcaattgaaatcgaagaccctaacttttaatcatcgttaatttacatattaattacttgcttcctgatttttatagtttttattgttttctagtttaatttttctcttcaatttgatatagccaaatagaagtaaagaattaattttaaagtactcaagtataatccttgtgggattaacttcactctgtctattacttgttaacgatacgtatacttgcgtgttgaaaatactaccaacagaaactttggctgttggagatggtaagagacttctgatctctcccattggtaaaactactctttccccaaattatttttctcctttacacttgaattctatcttacaagtccttgccatgaaaaaaaaaccttgtttatgtctccaaattaactcacgataaccatgttttcttagaattttgacaggccttgttgttttgttaaggacaaacaaacggtgactgttttgctcaaagggaagcttaaagatggtctttgtcttctaggagatgatgaatccaatttgtctcatcatagcttggaatgtcagcttgctacctcaaaattttcaaattgtaatgattgccttacatggttcaattgtaatgctgctaatgcagcccattaatgtaacaatttgtcaatgaatcaaaatcttgtttctaattacacaaattcttattctccatctgcctactctatttcattacagtctgacataaatgtatggcattccaagcttggacatcctgctcctaccaccttaaaggcaatactaattgcaatcaatattcctcactcacttaaaaatgttaagttttgtactgcctgtcagttaggtaagagtcataggcttccctttcccttgtcaaataatagagcctctcaacccttagaactaatacatactgatatttggggtccctcacatgctgtgtccatagaaaagttcaagtactacattatattcattgatgactatagcaaattctcatggatatttcctatgacacttagatctcaagcatttgacatttttattcaatttaaaagtcttgtggaaaaataattcagcttaccaataaaaaatgtacaaggtgatggaagaggtgtgtacaggccttttgagagattcttaagagaccaaggaatcaaatttcaatttccttgtccatacacacatgagaaaaatggaagagttgagagaaaacacattcatgttactaagattggtttgacacttcttgcacaatctggattagatatgccttattggtggcattgttgggaatattttactaggaactagatttactaacaagtatgttgattaacattctaaatatgaatatctctaaaa

SEQ ID NO: 16002 - DNA, 5351 bp, Cannabis sativa
  modified_base (3784)..(3792): a, c, t, g, unknown or other
ggaaaattaattttaactaatgtaaaagtctactttaatttgttacatctctttaaaataatttttttttaaaaaaatgacaaggcatctttataaaaggctattcctctctctctctcttgaaactgctatttttttctcatttaaattattaatgtgtttaaagtagtttttagtaagtatcatcaagattttaaaagcatatatatgtatatatatttttttaaaagtaaataggaattaatatttattaaaaacaggtaaaatttattacatgatgatgatcatatgatgaagatatgactcaaagaatataatcaataatattaatagcttagcaaaatcatttacaataattaggaagagaaccttaacaaaatcttcaattgaaatactgaatcaagaacaaccattttataccttgtttgacaaaacatcataccatagaaaatacttcaagaacatctgcaaaatgaataaaactatattgaacaaaatatcgatggaaatatattaagatagataaaaataaattcccctttaaaaaaaaaagacaaaaataaattcaataaataatacatacagatacaattacgaacaaataccaatatataattcacaaatatatacgaatataaatacttttgtgagtaatgagtacttacgatgaataaataatcaatataaattaaaatactataattattttaaataaacttcccacacttttatttagagcatacaaaaaagatagctttttagtgataataacataaattttttgtgactaagtgtaatttttaattacaacaaaaaattaattatttgttactaaaacatattatttagatattagttgttaccaatttagttttagtcaacaagtattgtaactaaacatatttagtcacaacaaattatattttttgtgactaatactttaagcaaagagccttttaatcacattataagtcacaatttttttatttttaatgaggggtagatagaatagatctctatatcatcaaaaagtttcacgatgagtgggacattccaaccacttaaggtaagtttaagatcacaaactcgttcaacaacaatattttctcgaaaagagtaggaccgacccacatcgatcatctttcgaaatccaagaatcatcacgaactcgtattcatatatatatatataagtgtacatggaatttcattacaaaattatcatatgatgattaatattgttttgtttgtgaaatttttgccaaagagaggaggagatgcgcggtagtacctgtgattctccgagtgtagtgaaacctaaatttattatatagaattagggttttagtggatttttttcttttctttggctcatttgtttcggtttgaaactgacacataatacggtcgattacaaataaaagcaaaaacccaatcaataatatttgtgtcagttttaaatattaacagacgtacgtgttgactaacgtaaaaatacaatattagatagtatagtaaaagtgtcatattttgatatgagttaaattaattattatatgtttttttttttttttgggtaaaaactgagttacgaaaatgtcatgtcaaaacagttaatatatgtaaattattttattgtttggactgaaaaagaagaagtagggaatagggttgaagtgacctatgattgagtagtagtagaatatataacgtattgggattggatatctatatataaagagtagagataaaaacagcaaatttaatctttgaccacgatttgacctatcactctctctgaaaattagagttttcaatttcaacagaacctaccctaaaccctatatgtatttgtatagctacaattcatgaaaattactgtatgagttgattttggcgtgaatctcctatcatatatgttgttgagaataataattatgatggctattcaaacacaacttccaatgtcacaaaatcatcaaccaatccattggacaatcaaatacactatttccattctcttacttaattacattatttttgactattttaattactaaatatttttttctttttggaaaaaatagaagtgtttgggtcaaaattaaccatgcagtattttacaaacgtatataggaaaaaaaaagttaattatatttataatttatgatgccctaataataatttgttccaacaagtcacgtaagataaagcactatagtctatagtacttaacttgaaagaatcaaatacttgtgtttttattattatgtttatagagatcataattaataaataattagaaaggagagagaaagaagaaagtggattctattcatgatgaatattatcaattatatacaacattatctagggtttgatctttggatgtgaaaaaaagctatatgggaatattaataatattaatatatgtttgtacaaataattatatttttatatcttcattaaattggtatattatcacttatcagttaaataagaatatgtgagtttattatattgttatagttagagatcggaaggttaaatgttgttgtcgtttttcacttgttttattattctaaataaattattttttttttaaaaaaaataaaatatattatattggttgttcgtattgttttttactgtattattccttatcatcatcattattattttaaaatttccttttgatatgtttatttgtcttattccaaattattttgccattctgtatataaatataatctctggttgtcctataataagttgtaatttttagacttttctgtgtttagtcggtctattaattaattaaattataggatatatgaaataatttatatttgtttgcatcatcctttcaataatcataatttggatttcatttttcgacaaaagactatatatattatatgattttgtatttccttaacttcttgcatttacttaattatttgtcttcgttcaaaactctatgtcgttttcttgttttcttgtcgtttagagattagacattttcgtacgtgtggtgtgttccttatttcgcatgacaataatgtaagatttatctatatattggaaaaaatttaagtaggggtattaacgtttagaatcaaattttgttttcggtatgtatatatagtaaaagtcataacctatttatagatatgatattgtaccatcatatacattttaattacaggagaattaattatttaatatactattttttttattatttttttttaaatttacggtttgggtttctaaagtgattgcagcgctagttgcaataggggtttctatacaattttttgttacaatttaggttgcagggctagttgcaatagaagtttcaatgtagaattctgtaaaaatacaaaaaaaaaactattttggagtgtaaaaatgaaaaagtcatcacttaattattttaatcacattttattttttaaaaaaaaaattctaaataatttataataaaaataggattcaaacaattagttacatgcatatacttatgcaagagattattttcgacattctaaattattcaaaaaactttaaaacatgaaagatatttatcaccaactacatataacgccatataaaaaataatagaataaagcttcttaaagtacgagaaataggaaatgtccgcgtaaagtagaagtaaagtgatatctccacttatccatttaaatatatatatggaacacttcttaatgagtattacctattgatggttactaaacaatttaactataaatattaatttnnnnnnnnntaaactattagattttgatccaacgacaaataataaaaagagaaatttgaatttctatgcttgatttaactacttaattaaaaaaaaataaaaaaatattactttttacactatatcaaaaatatttttataaacaaaatacttaagtcaaatttaactttttttttgccgaaaaacttttttcttattttttttttcaactgatggaacaatctcaactcatctaatgtaaaaatgatagatttttttaattagatagaaaaattaaacataaaaactcaaattttcataatactacccattaaaatttggatccctataaaaaaaatataatttataaataatatttttaaatattatcattcagttatatattttacaaaatactaaaaaaactctaactatttataaaaattattattgattccaatagaacaaaaaaaaatgataagaaaaaaataatataaaaggtttgaaaaaaataataaatagcagtaatagatttttatttttttgcttaaaagtattaatagaattgaaaatgagttttgagaattaggatggaagtgactaatgacaaattgttagccccttcaaaagttatgttcattaaaaaaaaaattattgggtattaaaaaaaaatattaggccctttattttattttttttgggccctgtgcagtagcccaccttgcacaccattatggccgaccatgatgagggtaaagtagataattacgtttatttaaaaataatctaagagtgtgtttgggattaacttagtaattattaggtagtaattacacattattttataataaaaggtgtgtttgggatatgaggtgagaattaccatgaattcttaatgtcttatttggaaaaatagttcatgattacacacaggccggccgtgaaatttagtgggccatagaaaaaaaaaattattttgggctcttatttaaaaaaatgtgatatttttcaaaattagtaaaaaataattgtataattttaaaagagaaatatttttttttgggccccttggctaggtgggccgtaggcacaggcctagcccgcctatgcccaaagtcgggcctgattacacagaaaaataatactttttagttcttaatatttatttttgtcaaaaacacaatattatattagaattgcataggaatagagttacatgtgggaggaggagcttctttcaagaaagctcattgtcatgataagctaaatcatgagccgcaacattaaaattacaactaacatgagaaaaagatgctttcaagtttagacaataaaactttaatgtaaaaaaaaaaaaaaaaaatttaaaatggaaagtttttattaattacatcgagtacatccaatatttatgtgttatgcgaattggaaagtgtaaaattaagacctcccaattaccttaattacacagttacggtttaattgcatggtcaagcaaatacgtaaattgtataataccttcagttacacctaattctaattctctctcgacttttccaaatgcacccaaaatgaattttataaaagag

SEQ ID NO: 16003 - DNA, 5925 bp, Cannabis sativa
gagctagaaactagaaactccgttcagttgccatcatattgtccaatgcaggtatgtattctccatcacgagctcaaccagttaattttgcaatgatgtgtgttatactcaacttaataaatgataaattagaaacaattgactgcaatattcaatgtaaccgtaacaatacttctgattagaaattgcagtaggctgtatcatatattaaagcatcagtacaagctttccaagttgtttgagagaacttggagacttctccctttgagttgaagctcattcaaaatcactggtactaattgcctacctcattaaagagcgaatatacattaccattgaacaaatgcaaaactaccactacaccctggcaaaccaaaatgactacctcatgccaaacacataaccaaccaaggacaaaggactcgaaacaaaataccttagcgcccatttctaattcttctgtcgctaactattatgtgaagcgtattggaggcctatcattgtgattgtcacttataagatctttccaagcaaaagataaaagtatcctaatatttagagtgaaacttcaatttcaaagagcactcacttcagaatttacatactgcatcataatattctttgcttatgtgctgcatctcttttagtagtaacttatttgagtctaattatagttctggtatttttgaacaacagagatcgaaattctgtggtggcacaaatttcaaatatttagaaggttccataacatgccacgattatcaggaaatcaaaatccaagaaagtacacatgtattaggggtgggggctattcctcgttcaatccttgtcattctaaaagatgatcttgttgatattgttaaagcaggaggtaccaaattcttgggatttcagattttcggtttcttgaatttgcttcctatcatcactgatttctcatgtctttgcagagaaacttcatattagattacttctgttttcattgttagaaacatatctatgaattatttggacacattctcttgctttgtagttatttattcatacaaattaaagtataatctatattcagcagacattgtagaacctccttagctctcttaatttctccctgaacttcaattcgtttcataaatgatctttaaactttctcttactgtgcttggtccacatgtttgaatacgacgataatgtgaatattcgaactgctagattagacctagaacagtattatagttatttaataattttagggacatgtgatagtacaattttaacttcattcacaaaagcaaggaaatataattttagaagtaacaatgaaaatttgtgcctaccagtttgatttataagattatgaaattcagccttttcaaatctaagctataacttttcatcggctggacaaagtgcagcccaaatttacggtagcagtgtatacaataaatcaataaaattttattagtgtgaaatttgatgttttaaaaaactgtttgacattgtaagcctttctttgcactgaatctatctatctattaattatatttatattgtaggtgaagtttcttgaatatgcttggtagttttccatttaattcccagatcagatttttcgctttactgtattcttttttattctagtatgttcatagtggtggtaataatatgctgctttacagatgacattatagtcactggcgtcttaactgcaaggtggtcacctgacttaaaagatgttcgctgtgaccttgatcctgtgctgattgctaatcatgtgaggtaaatgtaacagctttgtttaaaggaacaaatatttttcattgttgagagagatggctattgttccattggagtcatatgtggtaaagggagctaattagtttagctcattacctcgccttggtcttggggaaccataatcccatctttcatatgatacaagggatatcattagtgcagtcagttgatgttttaaataaaaagggatagaaaaggatttggtggtaactcttttaagggatgctaaagtaatatcagatagattgaaatagctacagatactgaaaagagactcaaaacttgttacatatgtatttctatattaaaaataatacaaatgagtttttggcgaaatcaataaagtagaaagtagtttttatatgtcaacttatctgagtatcaaaacttggttagaaaaatagaattagaattcagaatttttctttaagtagattacttagcccattcataaccaaaaaaaaaaaaatcttggaaccagtattacatgaatgttaacatactaccatagatttactgctgtggatatttcaaaaaacctgttcaaatataaatatatttgctgccagtgaggaccttaattttatgccttagagtgaaaagcatcttcatcatgacctatcctaagcagatgtcatccatttgaagctgctctaaataagtgagatgttcccaataaggcaaatgaaagaaataaaacaaatggctgtgatgaaaaaaaaaggagactgtcttgtttttttttttctttttttcattctggtgaggctatatgctgctcacgtactttgtatacacatttttaggagaacaaatgagctgaaatcagatattactattcctcatgatgtcattatgaagttcgatcaattttggtccgagtttaaggatacccctttgaaaggtaaggctcgttcatatatatgtatatttcaaaaatgagtgttctattatgaaattcaattgatttggtctgagtttcaggatacccctttgaaggataaggcccattgattaagatacacacacacacacatcattttataaatgagtgttcttttatgtttcttttattaatcagattcaatccttcagcagtaatctgtaattacttcatttttttataatgacaatgtcttgttgaattttttttcagggagaaatgcaatattacgaggtgtttgcccacaaatatttggactcttcactgtaaagcttgcaggtacatagatttctcacataaattcatagattttgaatgggctgaccttttaataattcactacattcactttgcattttttcaacttagttgcattaacacttattggaggtgtgcaacatgttgatgcttctggaaccaaggtacggggagagtctcatttacttttggttggtgacccaggtacctttttaatacctacttataggcttcattacttgaataaaattcttacgatttgggactactgcattcatgttatgcttcagttgaagtagttttctttccttcaaaattctgaaagaaaattagcaatcacttaaatctagaataataagaacacttgtcttcaagctgaaccatacgatatgttatgagagactattttaatgtcaccaggtctaaagatattggtaacagaggagctctattgattcatgatatttgaatgtactcaaaagcctgtcgtctatatgaatttttttgtaaaataaattgggctagtacaaacaaattatcttcagtaataagtgtcttttaatgcaaataataggcggggtaagttttgtaattagtctaagggtggaaaaatatagattataaattatagagagattgaaagcaacaaattacataagaaagctccaggactggactttatagttcaaaactttagggtttattttctcaatagaaggcgtttctttactggttggactcatggatgaatgcaatattggcgaaaccatgtaaaatatcggtatttgtgtttttggtatgttaatgtgttctttttgtgtttgttgggttctaattttattctagagattagaatagtggatagttctaggtttcaacacttgagacatatggtcatacatagtataggaggtgttcttccttatattaaagtatgggaggttagaatagtggatagttcttaggtgtaacacatgcattatctacatttattgtaactacagtaaattagaaattactgaagtcttccttgaaaatagaactcatcaatcataattaatttttccaatataaaactagattctttgtcaaaattcttctctagtcattgttaatttatcctcactaacatcatcatttatcttggttgagtaatgtaactcagtttaattgtttgttgatttccctttcccttggggtttctggcccttgttttattttgctcactatatcagtgagagttatcttttcaatataggcatgtatatttatatgtattaccaatcattgatcaaggagttatcattagttctgatatcaaatctatatgtaatcaatgcattattgtgtgaaaaatgtaatgtatatgctgtaagatttctcaaggcttttctcaggtactgggaaatctcaattcttgaaatttgctgcaaagttaagcaacagatctgttatcactactggcttagggagcagcagtgctggactaactgtcactgcagtcaaggatgcaggtatgtttctcatttctccatcctaaacttgtacctatggagttaggaactgagagaagttgtgactgtcaatttggattgactaatccggtatattttccatgtctatattctgctttgcaaatatgatattttctgggcatttttgataaatatcaagtgttatcctattctgacatttctaatttccggagtgttaggcccaattagaaaaggaccagaaaaacattccagttaagaatcaggaataaccttgcacaccctagtgctgtcccctacctcattgtctctgttctgactttcctctctctatatatctccctttttgttcaaatttcaagtcagcaactctctcaatgactgagaacatctttgttatgattaccaaatatttcatcataaaactccaattttttttaccaatgggtgtgaatattctgatcagatggttgtgaagtagtaattttctggtgttcatcttttgctaaatttgggttcttgtaagttgtaccctttcacatttagtattttaaaaagcatgttaaaatagaagtggttttatttatctactttcatattttctcttggtgaaaaattgttttagttccttgtctgcattgtacctgtactacatctttgttctttatatgtttctgcaaagcttcttgtaacaatcgactattatgtcatatgtaaaatataaatattcttttgtaatatttctgtaactagctttactatatttggggaatatgcaggagaatggatgttggaagctggggccctagttttagcagatggaggactttgctgcatagatgaatttgataggtatttgttatgcttatcgggttttgatgaaactactttgtctagctttcaattatctgaacctaacatacattatgtgcgtcatgatattttcctacctgtatttactagatttattctctctatctcttcatcttttttcttgttatatttgttagtattatcattgatatgatactatttcttatcaaaaagagaaaagcattgaggaaagattgaagaggaatggacatacaacacaaaaagtgtaattgacattctctagaaatcattccaatataatatgcacatgttttctaaagcttatacattaagaaagcctaacgttttttttttaatcttttcatgcgttcttacaattttctgctcgttaatcaaatattgtatgaattaaaataatacttatatcatcattcaaaattttcaattatgattgctcgaggttattttatttttctgtttctttctttttgtaataaaactgtaggaaatcaagctagcaattagttgtaaatttacatttaatgtattttccatttactctagtattactaggtgttcacattgtattatatataccct

SEQ ID NO: 16004 - DNA, 3054 bp, Cannabis sativa
gtatgcatcacattcagaaatataagtcaagcaccacaagaaataacataatgttattatgtcccacgcaatttaatttaacaaataatatgaacaactgctaatcagtcataaggtactaccaagttcggtcctgaacataaacggagtaagcttgtgcctagagttcaactaacttagggcccaaaaaaaattttcttttaaaattacatatattttgaaaaaaaaaataccattttttttttctttctatctaaataaataagaactcaaacaaaaatattttttcccgataacccattatattttagaaccggccctaaatactagtatggtgttggccaccttaaatgccaaatagcaatgctcgtatcacatttcatgtaccaagtaatattattatgtgtttacctgaacaatggctactctgagttgagtatgccttaatccaatggcaagagaagcagcagccattaagaaaggtcctccaatgaatttaaatcccattgatataatagccattctggtcccacatgctattatgctaggtcttgaagccatgaatagacctataaaaatcacatataagtatcaaataataaagttgttatttggtctttcaaattctaagacatcttaagctacatacctaagctgaacattgccataccaagtcctccatcagccaatattttaattgattgcccagctatttctggcaagtcaactttccatctacaacaaatttaaacttattattttctcaactaaattaactgtaactgcttaaaacaagaatatatgttagaataacaacaagctttgaagctatcatacttgtatttaatacatgcccaaacaagaccaatagcagtagcatgagtgttaggattttccatgagtttctttccaacagttaagagaataactccggttttgattttcaatggcacagtacttgttctgcttattccatcctcaacttcttccttcggttgttgtaactcttgcgggttttctaactcttcttcttacagcaccaaaaaaaaaaaacaacaacaaccttgattggcattaaaaaaaaatatgaaccaaacccgaaaaaacaaaacaaaacaaatcaaacccgaaaaatctgttgattacctgtggcttctaatgatggggagacagacgcagctgacttagcagcattgaactcatacataaacagtaacaaattgtaccaaatcaagctttgtaaggcgactatttgagcaagcatcttagcagcctcatcaccatacatggctttcaacagaggaattccaaggatcaatgtattaggaagaatggatacagagagacctgtaataataaaattcaacccacctttggacctaactctagtcacaactgttaatactagaaaagcaagtagtttttgaacaaagtctgagagaataagctttaggttcatcttgtaaggattattctcagataaaatttgaaaagataataaagggatagagaattttgccacaaacttgttaatcccagaacattgttctggtgtaaaaagcttccaccatctaacagatacataagctaaaatcatagcaacatataaaggtacagttgctgtaacaacatgataaacatcaactaaagaaatcatggtcttctttgaaacttcagaagaagaagaagaagaaagaaagaagaaaagtgttaagtgggaaaatggggtggggtttttattagaagattcttcaaaaaatgaacataataataagttgtgattgtttgtgtgagggtacaatttgtaactatgttaaaatattctgatttccatccatgttgcctacttggtatggtaatgtaataataatatttagtttgcttttttgtttgtgtattttggctctctgttgttgtaatggttaggtatctatgaatgggagatatatagtcagattacaactagaacaaaatttgagatattaatcagaaaaaagtcagggtataattgtcatcataagtcttaaagttagattctgagttttcttgtggctatgttctttagagaaaggaaggctatgtaggctgatatggtaagtctaaaaccttttctaggctcttttcttttgaataattattattaagttaattgacggtaaaactttcttatatttaatttttatacacttaatttttttattttttatacacgcgatactaaaatttcgaagttaataaaattatgtcacatatacttaaggtgtacacagtaacaatctaattgatatttaagtgacgcttgaaatttacaaataaaaataaaattaagggatattacaaaaaaaaaaaaaattaggattaaatatataaaatcaaaacataatagaattttgtcgctaattatctttgttattattactattaagaactattttcctttttctgtaagtagaagctgttttatatttctccaaaaatttcacatttaattttgctattacatgtttaataataataataataataacagataaaccagaaactaaagtaattttcaaagtcagtaaatctaataaaatttttatttttaaaaaaataataattttatatatgtggtttccaatagtgggaaggaagaataaagaagaaaattggaaaggaagtaagtgatttgatgagtttgtattttgtaacagtgttgttaagggaagaattttttgccaattaaggtcaaaagtgtcagaataagtgttatagggaatttgctttttagactgtgaaatttggaaacctaaacatgtctctttcttcttcaacaaaataaagagattaagtaaaaaaaaaaaaaatcaaagcataaaagagtttcaccataaataactaactcaaaagtatctagttgcaactccttaaaatttaggtggaaaattcaatgaacacatgtaatgaaaaaaggttcaaacccttttccaagttttacaagtgttgatttttgccatgttttggttcttggtagtccttattatgcaatattcaaagcttcacatgttcaca

SEQ ID NO: 16005 - DNA, 5797 bp, Cannabis sativa
tatatatatatatacagtatttacaaattcaaaatggatacaaagagatatctcattaaactgaaacactcagttgggaagacaaagtcaattatacccctaactggtcatccataattaaattgaataaaaattttaaggaagttacctgaccggctggtacataaggatccccagttatttttaaagcttctacgtattcatagaactcaagatttgaaggctctgatttcccactatcatctttccattgaccaaattttcgttgcaggtgaataacttcagaggtgtatagcccatgcgcaccaatgtagagtcctgataaacaatatatcaagttaaagggtctgagaaacaatatatggaatatggttagaaagttatcacagaatgataccatttagaggatctgaagaatttggtaacttaatgcggttgaaagttgttgattccgacagtggttgacggttttgagcttgagtcagagtaagacttatcagctcaccaacatctttgagcacctgattaatatatatttttttccaggaaaataaaaaatacacataagaaatttttatgaattttacttagtaaatagatgctaattccctaatgaaaaatagaaactcactctacgaaaagcattcaaagcatgactagatacttaacgtaccttcagtggtattttctctttaccaataaacttagttagatcaaacataacattatcaatgttaagtcgacctttaagtttagattttttctgcaacagagcctgttccttgtcataagaatcctgattggtgtctttctctatagagaaagaaaatgatgaccttccatttttctctagcttagcaggaacccgtagcatttctctagtagacatgccacttgacattttttgcataagaccaccaacgacaaccttaaatgcaatttcactccgctcttcactttcagtaattccaggacttgcctccaattcaatcacatctttctcttcatcactctcactctgaaagtcatcctctgcttctaaactttccatatcatcatccttctcttcatcatcttcttctattatctgttcgataactttagagataagatccttatcaaccttcccaggtgctgtgactttcaaaaccttcaccttgacaccaggaatcatatctttcaaaatatcctgaaaaccagaaaatccctgggctgaatcagaaagatcatccctatcattgtcatcttcatcttcaacatcttcattaacagaaacaagcagatcacttttgccatcagctgaatctaatggatccatgttactgatagaatctgatactttcgaagaaagtgaaatatctttataagaaccacctcgctttagatacacagcctgaaaatcatgacattgccctaagatgatttaaaccatactgtcatgaaaaataaattctgaaatacatagatatgggggaaaaacatacatacaaatcaaacataaagaaagatgccaatgagcaaacatagaccaatttcttaatgaattcaaatatgctgtcaagtaattgacttaattagtgtatgaatggtcataattagtgtcataaccaattacaatcagacatctcattaacaaatttattttaatcctatttccacacaaagctaacaccatctccaatgaaagtaccaaatttgaacaaaaagtgactaaatgttatatttggcacaaaatttagtattatgttgcacaaatactaaatggaattttacttagaagtataagttaaaagtcactaatttaataaatgcacaataaattttattttaactaaatattaaaaactaaatatgtgaagtatattagaactaataaagtgccaaaaaagtgatgcattgctatattttaacacattttaaaagatataccactccagtgagcaaaattaggcaacataaatttcaaagtaaataaaaaggtacaatttaatggtgtgccaagtacggacatattatattttgtgtcaaatttggcatgtgtcagatttgcacactttacaataccattggagttatcgaattaatttgaaaggctcccctccaccacaacaatgcctccaacctctctcccaattttcctttcctactccttttaaaaacacttttaatttcagctcataacattcttaggaccagtccattcatttggcaatatatagatattttcaacaatttctttgtggaatataatagcataatattatcaactacaagttacattcacacattgaaggaaacattgactaagctaccaaaagatacctgctgtctgtattcgcccctcctattcactgttaaaaaaatttcgaacaggggattaccagctgcagcggtagcaagttgcctgcaaaagaaaaggaagagcaatgaaaggttaaaaacaaactgatctgcagcacgcagaaggccaagatgctaagatccactaaaaagtaattactaattagtatgtaaaagaataacttaaaaggacaataaagcattgcagcatacactttttcatatttcctcatggatgcctaggaagagttccaaaatataaaaagccagagacttggatccaacaagctccagtaactaatagtagtagtatccgtatttttctgatatccctaaatatctaactaatgtgaatttcccatataaaattgtagtgagattgtcattcacttcaatacagcagctgtttctttatctcacacataattcacgatataaatcatatagacacttagaaaatgatcctaatggctacgtagcagcaattcacaacaactaagaataaataatgaccttaatgatatctactcacatagatcacaattcatagggcatatttgcccaggatatgtgggcttgctaggtaattcatacttaaatagaagacgattaaggataatgtaaaagatactccatacactatcttaaataggatattaaggataatgaattgggcaaataatcccgattgatacggcataattgcccaggttatgtgggtttgctaagtaattcatacctaaatagaagaagattaaaggataacataaaagatactccttacagcgtataattcttacagcaacatttgttttttcagcttaccataagcatgtttgttcaaattcacataaactcacttgactctaatggaaaataatgatttggaaaaacgggaggaaaacataggctaaaagtcgatggttctcacaaagctaaacagcaaataccactatatttaaatagatagtgccaacctgaagtccttaattatcaagcaaaagaacgtaccgaggactataacttcttgccacatatctcccatgctctgcagttattcgaatgattagaccatgaggatcattggtgtctttcgacatgccagcccaccatccaacctgaaagccacaagccagtatcataaaacagagcaaatcaaaaatgataaaaggacatattatatcacaaaccagatatttagacatatcagacagattcagggacagacattacattaaaagtactagtaccaattaaatgactattagaataatttttcagcataaaaattcaactgacatccataaaaagtgggatagctgtctgaagatttttttttttttttcaaaataaaatatctgtgacaagaactaagctccaccaactaagaaataatcaaatagcataaaaaaatattggcttaaaatgatgtttttcatctaagaaaaccatattaataataaatcagtgtacccataatgaaaacacagcatgaattttagagggcagtgatacattaaaaataaaaacgaacacaagaacattcccataaaattatacaaatgataagctttttacttcaagatgataataatttctcttctaataaactattttgaacgactcaccaatccggcaccagcattatctcttacaaaggccgcatccccatactgttcttcctctatagctctctgagatagccatggttgtaattattagccaaaattaatatatccttaacagaaacaacaaactgaaaatgaaagtgaaaactcctacattcagcttatacatcactctgccaacaacgtcgtttgttgctgctgctgcaattgccaccttgagcctcgcagcaccttcaaaatcctccatatgtattgcttgacccaattgagactgttgaaacagatacataaaaatcatcatttccatatactcataaatttatatatatatatatatgaacgagctaatgacaaagggtaaggataaattatcgcgcatgcataaatgacctacaaagaatcgtacaacacccaaattcatgtttagttactttatgtttcgatcaagttacgtaattgtatatttactaatttcgatgaatattcatatgtacgaataagagaaaaaaagcaaaaaccttcaagacggagaccaatcgttcttgctcgtcgacctcaccaaaatgctgacgccaccgatcccaatcccactccggtacttgagattgattccgtgaaccatcagagtcaaaaacaccggaagaaccatcatcagctgaattcgaattaaaataggaatcaaatcgcttaagtgcggttctgatcacatcagcgagagccgaatcccatctccactgcgagtcagaagaagaagaagacgaagatgacgatgaggaggagctgttacatcggcagaaggcggaatcaggaaccctagagagagaatgggaatgagaatgagaggaaaatggagaagagtagtagaaggaggaggaggaggaggaggaaggttttctgagaggagatgagaaaatggggttagggaaggtgaggttatgatgagtgggagcagccatggaagccatggattgtgatttcagagctctctctcgagagagagagagagagagagagagagagtggatttgaggtgttggagttgtgtggtgtgatgatgatgagtcaggtaagagagagaaaaagagaaagagagagagataaggattatgttatacaatgcacacacacactcaagctcatcaatgaaaccaaaactctgcgttttgattcaaacaatttttgtgtctaatttcctcatatcgattactacaattttttttttaaataaagtgtttataaaatagaaaaagttagacctcccagctattacaaaaaataaaattaagtatagaggagagctctaccatactcgaaatattctgagttaaaactcacttaatcacattatggactgtaaaattataatatctgaaaataaatgagaaattacaacataaaaagtgtttagagagttgattacaaatattaatttaattatcaatgctccaactggaataggttcttttcagcgctttgataaccttttctgaatcactctcaatcaagacaaaacggtgcttcatcgaaacagtcgaatccaatgctaaacgacacgtcgtagcttcgccgatcagtggatacgagaagatgagcatgttagctggtacccacaaaactgtccccacgtgatccctagccaaagccgccacgcacatggactcgctacaaacattaacatcacagttgattttgatataatattttggaggaggggaccaagcgggagacaccacagccaatgccgacgcaaaaaagcaggatgcataatcttaacataaagagatagaattaataccaagtttaatgttactcggggatgagttgtgaac

SEQ ID NO: 16006 - DNA, 7382 bp, Cannabis sativa
aaaaaaatggagcaatgcacatgcagatgcagcaattgttattacttcaaattgctcaaataatattaaataatgtcttatattgttcttttacggatgggatggggaccagagcaagactagactacgatccatccatatatatatatatattgagaaaataataatggtaagaaatatattaattttagttaggggtggcaattcgtgttcgcggtcgtgtgtcgagattcatgtataacaagtataacgagttgacacgatacggccccactacaacatttaagagcattaggggcgacttttgtcgcccctaaaaccatataaaatcgcccctaattgcccctaaaaagtcgcccctaaaacttcgcgcctaaaaatagtattaggggcacgatactgtcgcccctcattagggcgactttgtcgcctctaataccctagaacgaatttttgcgtagacttttaggggcaaaattgtcacccctaatatccctaaaaaggcgtgtcaaacatttattgttgacttttaatggtcgcccctaaagatttttaaattaaaaaaaaaaaaattgataattttaaaaaaattggtatttaatttataaaatataaatataataataattataacttaaatatgaaataaaacttgtccatgttaacaaattagcagaaaaaaaatagattaaaaaactgacatataagtatattttgtttaaacgtgtcaatcaataacacgtttataacgtacttatgacacgttaaagtactaaaataactttaaataggtcactaacgggtcaatatcgtgttagccgtgtcaatccgaacacgacccaaacccatttaaagcaaatccaaactcactaactctgttgcaggttttaagtcgtgtcgtgtctgatccgttttgcaggcagctcatacgaagaaggctctcccagttccacgaaggatctgcccttggaatattcaagatttacatcaacaacgtatcgaatgacgtaacgttgctcttgatttacctttggatcagggtaggaaggatcattaattatatatatatcaataataaatgtacggaattgaatatgtggtactggtggttctcatttctcagacgtacatacatccaccgagaagatgctgtaacttttgtttggatttacattatttgtctttttttcattctttttagaaaatactacatcactagcatttatacacatagcttcttttcccatctatatatactctcacagacagtcattcgttttataaattgtaataaaaagaaaagtaagagaacagttaagcagagagctgaaaatgaagaaaggagaactagttttcgttccttttccgggtgtgggccacatcgtgtcatcgttggagatggcaaagcatctcgttgatcaagatcatcgtctttccatctcaatcctcatcataaaaatgtccggctttgattcccccaacaaatcctacatgcaatctcttggctccatctccgaacgcatcacgtttatcgaactcccggaagatcacaaagaagcccaaagttttagaaattcaaatcctattcagttcatcaattcgttcttcgaaaatctcaaaccttacgttcgaaacgctgtgaagaacctcatcgactccttttcgactcgacccgactcgcctacgctggctggtttggtcatcgacatgttctgcactgccatgattgacgttgccgacgagtttggggtcccatcctatgtctttttcacgtctggagccggctttctacgcctcgtaactcatctcgaatcccaaagtaccctccaaaacaaagacattaccgaatataaagatcaaccggatgcagagcttatcattccgggtttctttaacccggttcctttgaaggttttacccgatgtgctactggacaaggaagctcgccccttggttttcggtcagtacaaagatatgaaaagaaccaaaggatttttggtaaatacgtttatggagttagagtctaacatgattgaatctttaattgaagataagttaatcccaccaatttaccctgtgggacccattataaatcttaacccttctcaaggcgacaaacaacttggtgggaccgaccacaaggaagctaacatcgtgacgtggctagatagccagcctatatcgtcagtagtgttcttgtgctttgggagcatgggaagctttgatgaggatcaagtcaaagaaatagccaagggattagagatgagcggggttcggtttctgtggtctttaagaaaaccgccgcaaaaaggtgagtctatcgtaccaaaagagttcgtggatttaaacgaagttcttccagaaggatttcttgatcgaacggctgaggtcggaaaggtcatagggtgggctccacaggtgactatcctggctcacccttcagttggaggattcgtgtctcattgtggatggaattctaccctagagagcttgtggtttggggtgccaatagccacttggccgttgtatgcagaacaacaaatcaacgctttcaagctagtgaaagagttcagattagcggtggagattagactggattacaagaagagtaattataataggtctgatcatgttgagaatcaagctgagatattgattgtgaaagccgaagaaatagagcttgggattcgaagggtaatggaggctgataatgatattaggaagagagtgaaggaaataagtgaaaagggcaagaaagccttgttggagggtggatcttcatacacttcgttgtgtcgttttataacagatgtgacagataatatgccttaaaaatatcatatgaagtatgataacatgaaaattgttaagcaccactcatgtttttaattagcatttctttttctgtaataggtatgttttataaagtacttattggtagaccgagacttctttcatggttgtattcaatacggacaaatattagaggaattttttttttttttatatatattttgtatatatttatttgaattgttcacaaattaaatgcactaaaagtaaattactatagagaagttttatcgtgttgacatggttgtttttgtaaagtctctatgagttttttgtgtttgttgttttagtctctttttggcttttctagtataggttacaggcagtatcagactgcatctatggaaaggcaggtcactgcatttgctatagatgatgatgaggaaggattgttgtttgaaaaagcagacgatggtttatcggagatcgatgaagacagatggctattggttggtcgtttcttgactaatcgattcattgattttcaagctatgcaaaataaaatggccctcttttggcagccaggttgggatctttatgttaaggagttggattcgaatctattttattctaattctatcatgaggtggatattgaaagggttatcgagggcagtccatgaacatttgatagaactccgctgatttttgaacgtgtgaaaacatggaagaatctgcagcttgtgccattaacgggattggaattatgggttaagttgcataatatgacaactaactttatgtctgaaagaatcatataaggcattgggaattatatgggcacgtttgtcaaatttgatcctaataatttttcgggtgtttggcgggtctacctagagattcgtgttaagcttcgagtagatacaccattaaaaagaagaagaagttagagatacaaggggtccggtctgtcatgtgttattcaagtatgaggattagccaacattttgtttcattttgtagaattcttggatattccgagagattctgcaaaaggttatttgacacacccaaagaccaaattatcaagaactatgatttggagttaaaagcagcgccacaatgacgtcgatatgcagatggatccaaatagctgaatttgggttcggctacaaaaaccggtgttgttctggttaaaggctctaccagcaataatggtgtgcaaggtgtactgtcggtgacagttggatatgaggatcaacaatctttcagtccaacaaatcaagaatttaaattattaccaaataatcaagatatatcaatactgataaggatagggagagaatggatatatgtaagaaagtggtggattataaagggaaatccaatgattcaagagagttaaatgtgaatgttaatttggccgcgcctactaacagaattttaaatgatggacttatattcttgtataataaaagaaaaagaatgggtcaggagaaggatagtgggcctatgaatgaggaagaggtggaagtggagtttagagtccatgataatttaatttataaatagtttaggatggtgggaaagatttgaggggccaattagatagtccaaaaaactcaagtgggacgggtcttggattctaagcccgtcaagaattatgaatattttaagtcggaattgtcgggggcttgggaatcaacgaaatgttcaattgcaacaataaattatttctcaaaagagacccaattttatatttttatgtgaaataaaatgtcaaaagtcaaaagttgatgggctggccagattatgggctttgatgcctttactgttgatgcggttggtttggctggtgggctagctctcttatggaaaaacaaagatgaaggtaaattgcttggattctctactcatcatattgatattgttatcaattcttctctgtttggaaattggagacttacaggacaggaaacttagaatttattgtgtactctttcgggtcaatcggagcttccgtggcgtgtaattggcgatatcaacaatatcattaggcaggaggataagcgtttgtcgtcgaccatatcctcaaaggcttctcacaggtttcaatggggttttacagcaatgtggtttgtctgatttagaactgcaaggacatccattcacatgggaaaaaggaagaggcgcaaatcatcgggtagaggtccgcctagatagagccttggttacttcagcttggcaccaggttttttcatctgctacgctcttgaatttaaaattttcccctaatttgttgtttttgttttgaaaacacttggttgaaagaaccgttacgcttcgaatttaagtgtcctgatttatcttaatgaaggtctaaattgaccaattcatatttttgcattccaagtgagttagtactaattctaaatagcactcaatcgcattggaaccctcaacaaagactttaaaaaactttcaagtaacatgtgaacttttttgtggtggaacagagaggattcagctcgcttgtaagtagtaactcattgatggtataagttcaatgtttcaaatacagaattgttatgtaagatcttgtgcatgagcactactttgccctcaaagacacctcataactaataactatatatgtaaacaccttcactaaaaaatgtgtattgaattttattattcaaaaaataactgctactcatactttgatttctaagcaattatgtagagccaacaatatcatagattcgtttaaatcaagttgagggttgataaaatacataagagatcttcatttccactgcgacaaatgagtctttgacaaatgggaattccattacaatctcatgttcctaatactactagttttaaaatgaattcatcattcctgtgttcagtttcagttaacccgaattcattatatttatagcaacttcacttgaaggaacttgggttggtagtgcagttgatcagaaagacaatcttttgtaaaaatagcttaatgaaattttttatcatccaaaaagagaaccaaaataggacaaggctctatatcattcaaagaagagagaccataatttggactgtgcgctttgattcaacatgtgctgcaatttatttttttcccaatgtaataaataaataaatatgtactgtatggaaacttatataccatttcattaaaaattaattttgtaacataaagtagacaaggtaatttcctatgtaatacttttacgaacaaaactaagctagcaaattaaattaagcccatttagccaaaacagacatacaaccagccccaagaagcagggataaattggccccaatttgaagcctagtattgttttgcaatttagggctcataaaatcagcagccaaaagatcaacaagagacatgtagattagaatcccagcagatgcagcattgaaaatgccttccacaataagagcagtgttgctgttctcatcatatacatttgatattcctatcccaattgcaattccaactggcgttgtgaacgaaaagaaaagcgccattattgcaacagctctagctttgaactttgcctacaaaacaaaacaaattcacttcccatcacatttttgtgttctttgtttgattcaaacaaatgacaagttttcaccgggacccattctattgcaatggagtattgactatagtgatgtgatagacctgattgtctcctaactcagatggtcctactagaaggattattataataatgtctttacagtaataataataatattcagttcatcgaagacttcatatccacacacgtagatacttttgacttttaaaatcttttttttcacaggattaggaaatctgaaggaactataatatttaataattagctcatcacagatttatataataaccagcaatttaatttttttgaacaagtataatataaaattaatgatactaaaaagaaaccattttttcaagatacagtccttttttaagatacagccgtattcttagaagaactacagatataatttttgaccaaaccaatagaaaatggccctaattgaaattagttgaataaaaaaatgatatagtccaggttttgttatcgacagtagtacactacctacaataattgttacataagtagggtcaaagtaaacggctgggccatcaattggaagatggggaacaacatgactaattatttgtgtatattgacaaaataaaaaatatattttttaaacgaaaaaagaatatgattaaataacttaaaaacaaaaatcaattcggacgcaataatgttgaatcaaaaaaaaaaaaaaaaaaagaaaaacttactttaatcccataatacagtttcaatagttgggtaaattttgtatatggtgtcattaattttatttatttatttatttattgaaaaaaagatagatatgtctgtatgttttgtcctatgttaaagtgatggtgatcgatgaaagttgttttgggtctgattaaataattattacacctcaagcaaagtattgcaattggcacatgttcaacttaatatcaccatacaactttataat

SEQ ID NO: 16007 - DNA, 10409 bp, Cannabis sativa
  modified_base (9259)..(9263): a, c, t, g, unknown or other
  modified_base (9289)..(9296): a, c, t, g, unknown or other
ggtaaaataatttccaacacgcaatacatcaggaagtgttttcggctcttcttttatgtatggcagagtgtgcttagcaagaaaggaggggtgtttctggcggccgaatgatgtgaggaaaaggaccttgacatttttatgggtcctgggagcaacgtatgggaccccttgtttccttagccattagattcactgtaacctcttttggtcgttgatctggtggagccctttgtccttttttgaaataaaaaccgtttgtggcagtattactatttttaattcttttcactgaaaacttcattttttctctgccactcccttttttccatttcttgcatcttttgcatgaaaaaggaattggaggatctaatctagtgactactcgttatacgctgggcgctatttccaggtgccgctcccttttaattgaaccaagaaagttcttcactagaacatttgattttcaggcagaatgcgactgcttcatttactggctcttgagtcttcgagcaaactttccgaaggcactgactatcccctctgcatcaagtaagtgcataaaccccttatcttagtttcttgacattgtaaatttatgacaagaatggttcttgcataggtcagggctaggaccattctcaggccgtacaataaaaatagtgtatgcaaagatctcgccttctcgtttgttcgttggtccaagaaatttatttttctttcatggatttaaacgaagtccccccaccagcataaccatgtctattgagggagaacttgttcaggtaggtgaaaggccttttgtgggacaagactaggccagagcttttctggcgacaccacagttggcggaggctttagaaactattaccaaaggtgaacttttcgttgaatgagaccatcctgtggataacaagagtagtaaaaggagggaaattcctttgtcaacgtaggtccaccccgaatccatatgggagatggaccaaaaagccaactgctttcaatcttacgggatgttgcaagcgtactccgaagttgctggtctttgcaatgttcctggtctaatgtggcataggctttctgtccatggggaatctgcatctgtcagtgttgatggatttagtgcatggagtgggtcccatatttctagtggcgctcacccccctttgagaacctacttcgcgaatctgattacgaggattgggattgtgcccttccagttaatcccttcatcgtacagactcttagctaggtgatatgtgttttgcaaaattaataggctggaggttccctctccagaggaaatcctttatttctactatgtcaaagccaatccaatgaggactaataggtcaaagctagggttcttccatcaaggtaggcacctagactcctactgtccaacctctgccagacggattgcacccacgatatttgggagtataggttttttcctttgggattcctaccagcagggtgccatcccttcagttgagcttccaactcctaggtattttaatagttcatcccaagctttgtttgtttccaaatcgcaccatttcttgtgtatgaattaacgtctcttaatttgtagatgagcttcccctctggagtgttagaacagaggaaatacccaggaaggagggccaatatagggccttctctgaagaacaacttaaggttaaaggcttggtgacaactaagcttctttgtagatcgagcctaatcaccaagttttagagcattgacattgtcagtctctggggatagcatcaacccctcaaggaggtaaaggaagtaatggccaccagtctggctactataatcaccaatgcggccaaaaatgactgcaccctcactctgatgggtgttgcgttgtcttgatcctccgtctgaggaagaagaaatctcagaaagatttgctgcctatatcccgacatgggtgtaggtgccagtacatcaggaagaggtaatggaaccttccgcatcttccgtaccccaagtctcagttgcatgtcccggaggaattaggggagatttgacaagtattttctaggcataaactgtcttgaattccctatgaaggattatatagataaagtagacctaataggtaggagccctagtaacccagggaatccttcaaacatcgtcaaagttgaccctttgatggttatgtcctcgcctgaatttgaggaatatggcagctctatgagtcataggaacattttagcatttgcccaggggcaaccttatagctcttaactgaacggtacacacacgcacaagtttcctcactagattttcctttttgctgttgttattgcttatgatgatcatatgacttgttatggcttttgtcctttactgaaaacgttgtcttattttgcagggggctctgatgacagttgggatggacccatctttctctcgatgggggcttcatcccaatcaacgcgtaagggatcagaatcttcttctgaccctattgcaaagaaggccaaatctttggtaccagagcttggggtgactggagtaccgtcaaccgatccatcattgccacaaccaccacaactgcaccagctgccacaacaacaacaacaacaacaacaacaacaccaacaacaacaacaataaccacaacaacaacatcaacctcaacaatagcaacaaccaccataacaacaacaacaacatttgccacacccgacacctgggtaatcgtccctgccacgccaacagtagaagtctctatctcctccccagttgcagatagtggcttctcaatatactccacctcaacccatctcgagaggtattgggctccttcatttggattctctttccctatgatgccacccgttggccaagagtacctgacgaaggctgccattttgaggaagagccataagcgagaataggttaccctctagaagagggccacttgactttcttccattaagacgactgagattgtagaagggactcgtcggcctttaccttaggccctgtgttagattttcctatggtgagtcaatatctggaacctatattgggtgagagatcgccccttatgcagctgaaatgataaacaacataggtcgcagtgtgagcaagctaacttcagagaaatgggctgtaagtaacagtgttgatctgtttactctgtcagtagctaccaaacaacaagctacaagggtaagctctaacttcttgatttttcctttacttgcgatatgatctttgtgtccgggatgactttggtaactcattcttatctttgtttctttagctggcattattcacagagagggccgctaaagaagcggggaatgtaaccatgtagctaggccaactccgcaccaatgtccaggacttgactactgagaacaaggctttacgtaccagagctgagtaggctaaaacccaggtagcctctggcacccacatgtctcgtgaagagtggaaagccaagttgattaccgaggaagagaaatggtatgccaagtacctgaaaaagtattcggattataaggcccaaattgagcaggaggctgtaaggtcggtagaaaaggttgagaagaaggtacactccctctgggaggaattaaccaaacacataaaggagaaggatatcgctgaggcccgcgtggtggacaagtccaagagaattaatgctcaaatttgacagattaatagcctccaggaagacatgcgcaagaaggactctcgcatcaaggacctcaaagacgaagtgaaggaggggaagaagcaagtagctgtctgggaagtcaagtgcgacaactagctttactaaggagcccgtaacactagtaaccgtcatcaagagaccaacaacaggctgtagaaggaagttaatcgaagccccttaaacaatgtaaaggcatacattactttagtttccatgcataagatgagggagactaatccaaaactagttcttgatgcggctaaggcagatgctagggtagagagcttggagatgccttatgtaatagtccttcacagattgtggtcagaggatccttccatactctaacatattgataagactgagatggaggaggttaccaggaaagtactttccatgagtcgtggcaaatacctcgaggagttcccacttatggtcgacatcgacaatgacaagggaattagtgttgtggccttgagctctcaagaatatgtagaaactgaggtatcttttgcccaggccgacgagggacctactcaagatgctgctgaggctgacctagagccagaggagcaatttgatgttccagccccaactgtgttagaagcgcctttaccctcccccagactattgaggaccttttttttatttttttttatctttttcatctctctctttttttttcacagaattgtattttcctctgcctattccgcagggctattcgtgaagcttatctttagtgatatcttttgttttcttttttgacagagcactgtattaggctttgacatttttaaagtgtagttgttttttaagggctgtcttcttagaccgttctgaagtgtatgcctccaacgagcatcactcaaattgattgaaattctatccctatgctagcttatgggaactttaagaagtatctgcttcctctcgccaggagggatggtctcaaccctttgaaaatttcttgagccaattgatgctgaaaacatgggtggttttccaggttgttcccagggaaccttatgatcacaagactttgagatttttttgggcgcttaggcctctttatcttagaaggccgatttcacaaactatagacttcagatcgtatttttctgactaggataacaccgaaatctatgggagttcaagcaaagccttaatagttttaatctttttataagattccttctttgaaagtttttgagaaggaatttaggtgagtatctcacatttcatggagttttgggtgcaaacgcttctcctttcatatttagtgtatttattgagctttaagaaggaattaaagcagtcattccttttctaaggaatttggttgaaattgcatcttactttacgtaaagattcataaaaaacaaagcaaacaaaatgcgacacacaatacgttatttgggggctcaatcagctaggcatggtacccaaagtgagctgagtagtgtggacctctccaccttcctagtcacttgtttaaaacatagcttgtggcctaacaaacataaagtgtaaaatgtaaacataaaaaacattttttctcattatatgatgcccgaaggccatttgtccaaaacttaattacatagattgtttaacaaaaacacttcaaattgtgtcactgcctggtgtccactacctattggtaatatcggcatagatgatccacattctaggcattggggacccttgataaatccatccgtttcaacaaaaacgtaccctatcccaccttctcgagtatctcgtaggggccttcctgattttggccaagaaccctcactctgggttcttgggaagttgggaagattcttcacaggacaagatcaccaatatcccagagttcttctactaagtctagtgactcctagagcagagagtggttacaggtagggtcgtaagtgtctcgataataggatgggatcgcagtctctactgggatcactacttcgcatccgtaggccattgcataaaatgtatgccccgttgaagctctttctatcatcttgtaggcccagagacctcaagggagttcctctggctagttggctttgcaggcttgcaacttcttcttcagcatggtcctaaggattttgttgacggcttccacctatccattagcttgtggccaggctacaacagagaagcttttcacgattctgtattgggcacagaaattggtgaaatgttcactgtcaacacaatcttataggggagtttgtatcggcatgcaatgtttctaatagcaaaatctagtgccttcttagaggtaattgtgttcataggttcagcctcaacccatttggtgaagtagtcgacgacaacaatggcatacttgactccacctttacatgtggggagggatcctactaaatcaattccccaaactgcaaaaggccaaggactgctcattattgtgattatagtgggtggcgcacgtgggctagaaatacccttgtccaaggattttcttggaaaggatgggtccggaagtgtgatctccaaaaaagccttcatggacctcatggatcactgcgctaatctccatccatgcgatgcacctcaaatatggcatagacaaccccttgtgatatagcttctcattcataataacataccacggagcttggtatttgaactttttggagacagctcgatgtacggggagttccccatgatcaagaactgataaataggtgccatccaggagtgtgaattatccaccacaacattcaccccttggacgttgatgttggatttttgcaagtgaccaacagggacaataccatgttctacgatttctagatctgtggccaactttgccaacatgttgatgaataaattttgttgcgacattaggacattggtacccatatgctcgtcttttgtctgatactcgccagagatctgattcaacaccagttgagaatcactgtaaatattcacctattgggcctcgaactgtagggtgcttaagagctattgtccctatggggaggtgaaaattactccagctctggcccccttctccttagatgcaccgtcaacatagaccttccaagtgggtaggtggggaactagtcttcttggagaaaatcgaagcctgtgcactccgctacaaagtcagcgagggcctgcccttttattgacactagtggctagtaatgaatgtcaaactggctaagttccatatcccacttcagtaacctaccagacgattttggcttctgcagtacctgtcgcaagggatgattcataagtactctaatggcgtgagcctggaagtatggtctcagcttgtgcgaaactattagtcagtaaaaggttagctttcgatcacagggtatgtcgactgtgtgcccaacaatcttttgctaacgtaatatactaaatattggacttgtcttcctctcgcatgagtgcgacgctaacagtttaatctgacactgacaagtacagaaagaaatcttctctttctacaggttttgataagataggagccttggtgagatgctcctttaacttttgaaaagtgtcctcacactctttagtccacacgaactttttgttgcctcgtaacacattaaagaatgagatacatttatcgctagatttcatgatgaagcaactaagggcagcaacacgcctcataacactgtggacatccttatgcttcttgggagagggcatgtcgaggaaggccttgattttctctggattggcttttatccctcgggcactgacgatgtaccctaagaactccccgaaggtgcactttttgggattaaacttcatcccatactttcttatgaccgaaaaaggcctctttcaaatcttggccatgctcctcagaagttttggatttcaccagcttgttgtccacatataattccttattttggcctaactagtctttgaacatccaattcaccattctttggcatgttgctcctgcttttttcagtctgaaaggcatcaccttgtagtaatagatgctttatcagtttggaaatcgatgtgtcttttgtcagcaatatgcattttgatctggttatatctagagtaagcatccaggaagttgagcaacttgaatcctgacgtggcatccactatttgatcaatccacggtagcgagaaacaatcttttggatcggccatatttaggtctgtgaagtctatacatattctccacgtgccattgggctttgggaccaagatagggtttgcaagctagatgagatataatgactcccagaggaagtcattggcagttagcttgtcaacctccatttttactgcctcagacctgaaaggatctagaggttttcttttgtgacagactagagttgcatcttcatggatgttcaaggcatggcaaatagtattccgatcaattctagtcatgtcagaatgactgcgggcttgtatgtcttggttttccttaactgtgttgattacgtcttcttttatggtcggggggaggtgctttcctagcctgattgttttcgtaggttcttctttgaagatgctcacttcctcaatttcttccgcagttctaaattccactaaaatctaactcttggatcttaatcgtccttgtatccctctggtacagtttctgtgtccattgggttctctaacctaagtgcttcaggcgcttccccaaccttgtacacgactcgagttgatacattataacagtttctctcacttcactggtttcccttaatggtgcctatgcacccactatcacatgggaacttcaaacatatgtgtcggatggaggttacagcaccaaagtccactagtgtaggctggtccaatgtggcattgtaggctatgggacattcaattatcatgaagcttgagtgtttaaatgcactagccttgttgtctcctttgagggtgattggtagttggatttttcccatgggcattaaggcatcaccattaaagccttgtaacaggactcggcatggagttcgatctgcttcagtgaattcaatcacttggaatgcaaacttgaacaaaacattaacggagcttccattgtcagctagaatcttggagactctctttttggtaatctgtgcatcgattaccaaggggtcgttggtggggaagcgtacatttttatcgtcatcttctgtgaaggtgattgggagattcattttcctcagacactgcaggggagactataacagtgcacacattttcccttcttccacttccttgaagtaactcttctatgtgtttctggtacttccagttagatggggtccacccaattgttgcaacatgtttgtccacaggtggcggagccattctaggaggatatggggttcctagttctgaagccaacaaggccacaccagctgtagctggcagagcaggaagagcacgtaaagatgttccaggagcttgagggtgtgcaaccccctatgggggattcacagcaccctactatctgggaagcatcatgtgtgtcatatcccagaaatcaatacagtatttaattagacatattttatnnnnnatgtaattattttggtaatgaagtannnnnnnnatcttacttagggtaattagtgagaatctattaaatgattatattaagcgtaatttattaattatggagattatattgcgatatgtgggtatcgaggataccatttttgaaataaaaatattttttcaggcccagcgactgtggaaatttgacgatgtggtcagaatgtcacgacattaatgaatggattattttgaggatattccggactcgtttaggattttagaatgtcggttttgtggattagtaaaaataccataatgccctaggttattttaaagttttaattttatatgaggggtagattagtcattttattatataggtattttgacttttagtcttgtgggtgaccattatattaaaaagaaaaaaaaaagaaaaaccttatatatttttgagttaacttagaagctaaggcaccaagcttcttcttctcttcttccccttcgtgcaagccaaaccagccagccttgaggattttcttcagccttttcctttcatttcaaagctgattcttgcccaagttaacctagaagagctttgaggtaagttcttaacctttctggattgaaaacttaaggttttgaggtagggttttgtaattctgtggctgtatgaattaaactaagattggggtatatttagggtagctttttgagtatgttggagatggttttaagtggtttctatgactgtttagttttatttgtgctacttgaagctaaacgctgagtttcattcacttgaaaatatgattttgattcaatgatttaattgttgtgttttgaagctttggatatgctgtattatggttattatactgttctgtgaagtttggaaccaattggttaggtttggagcaagttttgggacatagaagatctgaaattttcgagtttctactgtagtgaaccaaaattctggatggtacagggctgcaccaactggaattctggatggtcaatttttcaggaattgcctattttcgtattttagccataacgtttcactcgggtgtctgttttcgacattctatataccgtttcgaagcttatgaagagctctaaattatgagacatatattagagccaaaatatgtattttaattta

SEQ ID NO: 16008 - DNA, 5312 bp, Cannabis sativa
aatttaattgaattagtacattaaacaaaaaaataattagaaatatttaaaaaaaattacaaagaccgcgcgaagcgcggcttaattctctagtttatctaataaaataaattgaagacactgtgtctattatgtgtaacatatttaaagccacctaattacaaatgaggtaattactacatatgtatttaacatatattgaaaccagaaaacatgtagcagtggttgaaacttgaaagtagctaaaggacgttcatacgagttgtaatggaaataatcgtaagctaacaattttagttgcttcttattggtagagtcagttctggcaagtatgatgatatagcttcacatgattttgggttttattctaaatattatttttgtggtgctgttctctctataattaaaattaagattcatgcactgcatagaattttttcaattagattgattacaacaaaataagtgttagtatgtctagaaaagtaaatatttatcactgaaataagatttcacttgaaacaatttcagttttaaaatataaataaacatgtgggatcgtgtgccttgagatgtcctgactccataagatgtcctgtcaatattttagaccactttctcaatctacacacatcaaaataacattatataaatacatttatatacataaatagatagatggataaaatattaattgaaattaactttcaccattttgatccattctaacatcgacaaagaccttatttgggacaataagctgcccgagcgataaatcagcaaaaggcttggctaataatcctttgcgagcaagaaattgctgagacacatgcttcattgttggtcgacactgtggtttgacatgtagacatgcaaatgcaattgcggcaacaagaacaacatctcgtcctacaaccccacttgttggtctaggcaagcgtttgtctaatatatctattagcaacatcttttgagtacttgatgatgaagataatgacaatgataacagttcttgaggatttctacccattaaagtttcaagtaccacaactccaaagctataaacgtcacatttttcagttatagccgtagtgtaagcaagttctgcaatgacaacaaatggaaaatatacttaataaacaattaaaatttatacaataggatattgaacaagcaacaactatacatataacttaccaggagcaatatatccataagtaccagcaatcatggtccgattggaagaatcaggatctagtagcttagctgtaccgaaatcggagagaaaagcctctagttgtgagtttaacaagatgttggtggtagttacatcacgatgaacaattgaaggaatgcaatcatgatgcatgtaagataatgcataagatatgcctttgatgacatcaatccttttgctccaactcaaatccacagcctctgtatcattgctcaacacacagaacaagctccctctttccatgtactcataaatcaaaaacatgcttctcctatgcaaacaaaatccatggagtcgaataatatttttatgacgtatttctgtcaacgtttgtacctcattggtaaagctctggcttagagttgacttttcagactcgaaactgtgaagctttttcaaggcaattactttgccattaggtagttgtgctttgtaaacactaccgtatccaccagttccgatacaatatttaatgtcaaaatcttcagttgcttttatgatatcttcaaatgcaatctttccatcgtaattccatattgaaaatatgtctccgttcttcattactgtttgatcactgggaggctggacttttcttctccttacccaaactttatagattacacaaatcccaaaaatggcaaaaaaaactgaaatgggaagaataatcttaattgtggtgatgaagctcttactccggctagagttagagcaagaagggaagaaaatgtagctatctccattcttctttgttcgaacactacataattccctatttccaataaatgatttggctgagaatctatcaagaagcacactacttatttgaccttgtaaataattgtgtgaaacattgaaattggttatattattcatatagtcaagttgagaaggtatgattcccgatatattgttatttgataggtccagataattcaatcctcggagattgataatatctgcatctatggaaccattaattcgatttgaacttaagtcaagacgagaaatgcttgctaaaccactcaaagatgggaaaattggaccagtgagctgattaaaacttagatccaattctttcaaatgcttcaaagatttgaaatgtaaagggatgtaaccagttaattggttttgccgtacgtccaaatccgttagatttctcaaatttcctattgctgaaggaatagaaccaacaaattggtttgaggaaagagatagaaatgtcaaagaggttaaattacccacaaaattaggaatagaacctttgagtttgttatgtgaaatgtccagactatataaacttaatcgaaatagagtggtagggagtgacccactgagattgttagaggaaagattaagatagtataaattatccaactttcctatacttgtaggaatagagccaatgatttgatttccccccaaatctaaataattcaggctgttcaaatgaccaatggaccaaggaattctaccatttaaattgtttgaggaaagatctaggatgtacaagttggttaaattacctaaggcagtagggatatcaccactgagtttgttgtcaaaaagatatagtgtttgtaattgctctaaatttcctattgacagaggaattacaccatttaaattgtttgaggaaagatctaggtagcttgaattggttaaatttcccaaggtaatagggatattaccactgagtttgttgtcaaaaagatttagtgtttgtaatttctccaaatttcctattgacagaggaattacaccatttaaattgtttgaggaaagatctaggtagcttaaattggttgaattacccaaggtaattgggatattaccactgagttggttcaatgaaatatcaagaatgtttaacttggttaatctaaatacagaggaagggagtgacccgctaaggttgttagaggaaagataaagatgaactaagttgtctaactttcctgtgctgataggaatggagccgttgagatgatttccccacaatattaacatagtaaggttgatcaaacgaccaatggatgagggaattgcacctgttaagatgttgttgcccaaatttaattcaaccaaactcttcaagttgccaagttgttgaggaatggaaccgttgagttgattattgctaagatcaagtttctccaaatgggaaaggttggttagtgaaagtggtaactgacctgtaagagcattgttggagaggtcaaggtaggtgagctttgtaagagcacctatttcaggtgggataaccccctcgagtcctgaccatgaaagatccagatgaactaaatgttgaaagcaagacgcactaaagctttggagtattcttcttctagcagaatacatgccatctttaaacaaagattgacgaattttagtaatgtgaccagtttggtcacaagtgatacctgactggtggcaataataatgcttgcttctgttgaagagatgcttgtccttacaccaatcggtttgaaacagagaactcaattgtggttcttctgttgagtcatattgagaagcctttacaaataagaaaattttgggtggaatgatgaagaagaagaaagtgattgcccatagtagtggtagggaattggaaaagtagagtgtcatgttgctaagatttgttatggcattctggcttttggccactaatttaaggattgtgagaaacatataatattatgcaaattctgcgttgacgaatgatgactttgatctaatgatatgacttggttttttccacattgatccctaccagtaccactacctgttttccattgaatccaactacgtgattcatgtttttccattttttgctttttgagagtaacgtgatttcaacatagactgcttaattatcaatattttacataaagatacatttaatgatttgaccaattctttggagttgactgactattaaaatcagcatggaattttgctatttgattaatagaataaaaataccatcattcacgagcttatttttattaaacttaaaaaattattattttttttaattattttattataaaaacacataaaatttatttgttcattcaactatttttaatctttgtcataaaattaccattcttttacatattttataaataataaattatttatatttctaacttcaaaattgctaatttgtttataatacacacttctaaatattttatatccaattatatcacttaatcagcataaaaaaaaatcaaaatgtaaaaaattataaaaattgagcaacactgcgtgaagcgcgagttagttccctagtatatctaataaaataagttgaagacactgtgtatgtgtaacatatttaaagccacttatttacaaatgaggtaattactacattgatgtatttaacatttattcaaaccagaaaacatgttatattgaaaccagaaaacatgtagcagtggttgaaacttgaaactagctaatggacgttcatacgaattgtaatggaaataatcgtaagcaaacaattttagttgcttcttattggtagagtcagttctggcaagtatgatgatatagcagactgcttcacaagattactagtttttcttttctgccttaattttgggttttattctaaatgttgatttgtggtgctgttctctctataattaaattaaggttcatgcattgcatagaattttttcaattagattgattacaacaaaataagagttagtatgtctagaaaagtaaatatttatcacggaaataagatttcacttgaaacaatttcagttttaaaatataaataaacatgtgggatcgtttgccttaaaactatgtgtgtcatgaattctgactccataagatgtcctgtcaatattttagaccactttatataaatacatttatatataaataacatcaaaataacattatataaatacatttatatataaatagatagatagatacttatagatgataaaatattaattgaaattaactttcaccattttgatcgattccaacatcgacaaagattttatttgggataataagctgcccgaacgaaaaatca

SEQ ID NO: 16009 - DNA, 3468 bp, Cannabis sativa
cgagcttttgtcaggacttactgtcttcaaggttgttaaaacctctgctgcagtaaaaggttgagtaagtgtgtcattaatttctgcatttattgttgttggaatggttgccgtaacaagatctaaggcttgaaggtcaattgtcgaagccgaaaagaaatcattgaaataatcttatacaattgtggtcatttcaacttttgatgttattttgttttgattgcaatccataatatttagtatgaattattgaagttgttatactaaaaataatatttcttacaccaaatcagtgtgatcattggtgtggtctaacgcaccattgcttaaactttggttaacaaaagaaaaaacttggttaagaaggaatttcaaaaatacctacaaaaaccgttaaaataaggtcgtcatccctatttacccagcaaaaaaaaaaaaaagtcgccatccctaataatgcctaactcatctaaaactcaatctgcaccgtcggtttagctcttagtccccattcccaatttcacaccatcagattttcttttgtctttctcgatcgacattcttatcctttttttttttctttggtgaaccaaatctttatgttccctaataattaacttataaagtccgcgggaacccgaagtttcaagacgaccatcattatcccattaatggattcacctcacttcaattctcattcttcaattttttcctaaccaattattgcattgaattgttattatttgatctgtgttttgaaggaattggagttaaatagatgagtttcctttgaatcgtaatgatccatattgtataattctgaaaattagagttttgggtctgaggagaaaaagttctcttgtttctgggttgtttgattcgatctatcggggaaaaaaagaaacaaaaagatgggattttcaattttccccatcatctgcatccttcattcgttgatttcattaaccaccggatcactgataatgttttaccttaacgagttctcagtgtttggccatggcgccgaaacggctcggaagctttcgggttcaacgccacatgaccaattgttgattcaaacctccaattcttttgcagggctgcttctttttgttattgggtttttgttgttcatggtggcttttgtcaaagacagggaatttcagagcttctttgctaaagggtgtatgcttcttcatgtttcaatggcattttggagggtttattttgagaggaggctcgaggtgttggcttgggactggcctaagcaagtcattggggatttcgctcttgctctttcatgggttttctttctggtttattcttggagggagaagtatgactaaactgaacgtaaattgagtgttttgaattgaagaagttgggaattcaaggccatagaatgtagttagttactctgctgaattccccataaattgtatccaaaattgtgagcttttctggttgcaaattcaggctctcctactgttagaatatgaatttatgagaattgggagggaccaaacagttcaactcaaactcatacaaatatatatgaactttaaattgttttaataaatatcataatccttattcttctggggtttttgcatattctcatgaaatatttgctgtctagtaataaatgatgttttgtttgaacattgtctctaatcacgaacttacattgcttaaaatttctcatatccaaattgtgttggaaggaaggctgtgttacaatttcatttcagaggtaaagtgttgtagtgaaagactgaaagtaccttataatgtgctacaaagatgtgcaatcttaaatgatactcagttgcagatcactttgtatacggattgtactaaaataatgaccctgtttagttgttgtggatggtgatctttgatcagattgtttagtgctggcatatgctgcctggtaagctgatatttattagtctctcattagctctgtctggattttttttttcaactgcaatacacttttgtggtcttttttgtttggttcagcaggtccgttttcatgtctctagtcaaaatgctccaaatggtagagttttgtagtttaggtatcttattagagaaacatgataactttgacatgttccagtagcaaaatttgaatgtcttggagggagaagaagctattgaatttgttgggccacataagatgttttaattatgggcaatgggcacacagaccaagggattatataggttttcaaacaatggggaatggggcgtgactacgggctagtcacatatggggggaagttcaccgagtacaatcaggtccacaaggaccaccaacaccaaccgctattaacacctcatctttgatattactccaatttaccaaataagtccttatactacaattcagatgggcttgtgtgagtacatactattggcattgttatactaattctgaaaacaaataaataatgtcagggtaaagttcagatgttcagttttccaaatcttatgttaattttgttatacttgtgctcgagttttcttttcgtccaaaaaaaaaattgtatatttgcatctcttttatttatactgattctaattagagattttttcgttattttttgagttgtgattgcatttgtcactatataaagttttcattgtttcattatgtgaacaagcttaacttattacatctcttgtctctcttttgtttccttttttttgttacttttgtgaggttcatatatatctcttcttctcacttttcttttttcggtttctttcttttactatagtatatagcacaaaaagagaactaaagacatgtcattggagagaaagaaagaaagaaaggaaggaatataatgcattacgaaacaaagagaagagaatctactagttgtaaagtcctgtagcctgaagcataaaccactggaatcaccaatagtggtaagtaaaggcttaacaaaaaaaaaaaactcctgagaagttgcctaaacgttacctttgggttttcctatattaaaagcccaaaaagcaaagaaataaagctgaagctgaaagaggaacttgactgtcattctcgtcgagtctcataaataagtgcaatgtattgtatggaaggaccctctcgccacactcgtgatgtagcgtgacttacacgctccatcatttttaccaaagaataagtgtcacgctctacaactgcgcgtggtagtctcattgagcacctaatctttgtaacatctactttttctcgtcatctggtttgagggacatgggatacatagacagaagtatcagaataggaaagtcaccaaaaccaaccaaaaacccagagaaaaggaaaggaaagcaaagtcaatattgcaaagaaaaaccttaggaaggggtttggatttcttgatttctttctttctttctttctttttagtcaaaaaaaaaaaaaaaaaatcaatctttactagcagaggg

SEQ ID NO: 16010 - DNA, 8664 bp, Cannabis sativa
  modified_base (1973)..(1976): a, c, t, g, unknown or other
  modified_base (7159)..(7163): a, c, t, g, unknown or other
  modified_base (7406)..(7408): a, c, t, g, unknown or other
  modified_base (8486)..(8487): a, c, t, g, unknown or other
atttgtaagtttttttaaaaaatgtcatatttagtgtaattaagtttttatgccatatatatcaaaacttatctttatttttccatatttttgtaaataactctcttcttttttcaaaaaatactatttttttttttcaaaaatactatatattttttatactatgtattgtgttaagttttcactgttgttcaacggttattttttaattgctccgctgttgtttttttttttttatcaagaagaatgagcttcattaatcaccaacaaatacaagaccaacaaacaagagccaccgcgaaagcccctaattacaatataatctcatcaaataattttgctcatggctactcaaacatctatttttcactatttgtaccttgtaaaaaataattatttttacatcatttacaatggagttgacaaattgagaatattgaaaaataaaattgtttctattagtccaaatataataaacagttgctctgcaaacactactatgtgaactctcttgcaccatgttggagaccttcaaagtcagccaactcttccagccactaccatcaagaggccaagcctttgatcccagctaagaaaatagcttttctacaactctacaagaaaaagagaacaataaaaaaaaaaaaaagatgttcatgagtctgagttgccatttcacaaactggacagtccaaagagtctaacacaatgtgaaattgcattattttaatctcaagttagaagatgagagttaactacttgccacaggatgaaccggtatttaggcaagtttagagagctccaaatagctttgctgtagttgaactggtgttgaggaagtgagctattatacaaccagttcgttttgaatctaccaccagcatcagccttcataatctcattgctcgaaaatttatccatcagagctcaaatcttgtttgagttcataggaccaaaatgtactatttttcaagtaaacattattgatcaatttcacccaaagcaaatctcttttataagagattgcccaaatgtaattggttaggatagcttgattctatttgactccatctttaaacccaagaccaccaagcttttgggagacaaattttctctcaagaagccacatgaatcttacttctattgtcattccaaccctaaagaaaacctctataaattttttcaacttccttggtaacactatgaggaagtatgaatatgatcatccaataatttcaaaagccaagaagagccaaatgaatcaactagactctccctacatagggtaggtgcctgctagcccaagcatgaagcctttgtctcattttcttaatgattataccacagtcttccactctccatttagttggtcttagaggaactcatttcactgttgttttaatggttctgttttattattttacagttgttttataaaagatagtatttttgtaaaaaaattcgtgtgacaataaaattataaatttttatctaaaatttagtatttttgcaaaagtcataagttaattttctttgtattttttgggctcaatttgcattcttacgaaatagtagcctttgtcgtatgtttttaatgttgggcccaatgatataagatctgtcctggtctaaattgacgttttttgctgatgaatttcgcacgtgcgtgaaaaccaataatgttacaataacaaatcctaacaatcacacgatatacagaatatgcctttttccattacaatattataatgagttacatagatgtgttaaacaaaatatcataattttacatgtatttcttttttccaaaatatcattatagaatattagtttagggaccctattaataattttattgcaaagaaaaggatgatcactcattcttatttgtttaagttaataaattatcataattatcattttttacgcaaaaatcatagttttaatcttgatttttattattattattattnnnnttattattattattattttcaataaaatttgctaatattatttaagggaattacccttatattgtttttttaattttttttgtttttcaaatttacggtttgagttttttaagtagttgcattgcaataaggatttctatatgattttttgttttaaagtataaaaataaaaaagtttctattatttattctttttaaaatataattttaaacaatcaaatacctaatttgaatttaaattcgttatctttttattaacttgaattgatattcttgaataatattatttggtattagtatgcctaaacctgataggatttatttatatttgtgtgatttattaaaaaataaattaattttatcctttttattatattcattacgagccattcaacataaaatatataaaaaataaattacatatatatataaatacataagcttttggtacacatataatatataatcaattaataagaaatagaatattcggaaggtttcaagttagaccacaagagtagagtaatactaattacaagttcttctttttcttagggttttctcagcttcagtttttcatttttcctggtcttttcttttacccatttcgacattttcaaaccccttttagatttttaattataaaaggggggatttttgcttcttgggatccatgcgagaacaagctcaagcttggtgacttgaattcttttaatttaaaatttttctcatagtggtttggaaactatggaggctcgagctgggattgtcgttgaaggagggcaaagagctttgaatacagctcacggaagcgtcgttgatggtggcgccaggaaattgttgcagccgcagcctcagcctcaacctgttaaacagtctttgaatcaacaaccgcatatgggttcggtgcattttctcgccggaggtattgctggtgcttttagcaagacctgtacggcgcccctcgctcgtctcaccattctttttcaggtttcaattttccctttaattgttattattgttgataattccacttattgaattttggtatttctttctttctttctttcattttattttcttttgggggggaatgatatgggtttttattatgttggtttctttgggaatcggaaaaatattaattttggggaggtgggtattttgggtatggtttacatgtgttctgagatattattaggaattgcaatcgtttatggtagttaattctaaaaatttgtttacttgatcaacatatgtatagaaaagaccctgctttttgagggcttttttttctgagatgttgtaaatatagttttagtgtgaaaacttaaacaaaaatgtaccattgatcgtatctagggcattgaaacctgacgtgagtccccttggttgttttgctttgtagggatatctttctaaattacccatttagtgttttaattttttaaacattgtgcttgcttttaattgatgattgtgttgtaatgcgttgcaaacggatcattctaagtgcaagatctctagtaataagaactataattttgttttgtctttcttcctcaaaaatacttatgaactggggaggcgtcaaattgtatattcaaaggggtttatcttttctatgatattataattctcttacagatgcctgctttaaaataagttattaaaaagtactgaacctaagtttttttttaccatgttttctgttatagccttgatgatgtttcgtgtcttaatatcttactaatgaggcatcataagtaatatcatttggttttgttttgtaaaatgtttcttaatatggtgtttgaaagctctgtttttgatttgttttttttttttccatatgttctaggtgcaaggaatgcactctaatgttgcaacaatgagtaagccatgcatatggcatgaggcttctcgtattgtcaaagaagaagggtatagagcactttggaaaggcaatatggttacgattgctcatcgtcttccttattcttctgtcaatttttatgcttatgaacgctacaagaatgtaagaggatatatatttcagtaatcaatacaactatgaaatgcaattattgtaaattaatattttaaacttttagctatttcaatcatcattttctttattgttgcagtttttgaaatcggttattggggaaaattataagggtaatgtgaatacagaacctttagtgcactttgttgctggtggaatggctgggatgacagctgcctcagtaacatatccattagatcttgtgaggacacggcttgcagcacaggtaatttggggaaaacagttacgtccttctttgaattttgtttaatttattacatttcagtgtgatgattagtagcactttgttggtgtggtctgtgactcagtaactgcccattccttgtgaattttcattatggttcatcggtgtttcaattttgcagagaaatgtaatatattataaaggcatgtggcatgcatttcacactatttgcagagatgaaggtttttggggcttatacaaaggacttggaccaaccctgctggtaaatttatgttagtctttgtttcatttattgttggtaaattttaactatgtctatttgcactgatttttttttttcttgtttcagggtgtaggaccaagtttggcaataagcttttctgtttatgaggcactgaggaagcattggaactctcataggtgagggacacatttatagtaaattgcaatttttattgaaaagaaaaaaaaatgaaaaatgaaagcactttacaagacatactttgtactatgtgaatgtgacctctgtgtgcatttgatttaatatcattttattttttactcaggccgaacgattccactgccgtggtcagtttaacttgtggaggtctctctggcattgcatcatcaacaggtaagttatacacttaaatgttaagttacttgcacaataagttagccgctgttcagttctagaaaaacatgtgtcatctgcatttgcttggtatggcttaaaaaacattgtttcaaattattttactacatcaagtagttgagtccaagatgatgataataagctttggtggctgaatactaaggaagtattcctcaccttcacttagatttatctctggcatttattagagcacgattcactaaaaaaaagttaggacttacagaaaattggtaattgtttacgactatttatggggatactgtttaatggaggaaaagaaaataaaattgtgaattcgtttttttatagttgtcataaaaattttataattggaaaagtagaagaagcatactaaagagttaacgaaaagacatagttgtgtagaatgtaaacagcatagctaagtattaagttgatcagaaaaatgtttccattattgcatattaagttgatcttttggtggagtatatattacattacagaatggtttccaatgcatgaagagtctcattagcctttatgattcatgtaagtttataaacattatctgccagtagcttatggcgactcgttaacatgttttataaaaggatccaaatgtagttaaccagtgtcatcaaataataattggattgctcttgttcttatggaatatatctatgatcgtttgtttcttgtcgctgctatctttcagcaactttccctctggatttagtaaggcgaaggatgcagctggagggagctggcggtcgagcacgagtctacaacactgccttatttggcacatttaagcatatattcaagaacgaaggcctgcgaggcttatatagaggcattctgccagaatactacaaggtcgtcccgggtgtagctattgtgttcatgacctatgaaacactacagatgtgttggtcaagaatccaaacaagttattagtattgatttcccatattattagttgtgtttgtcaaactgattacccatgtttgaaaacaagaaaaagaatgtattagtcaaaaatcaggagaggtagataggagaaatatttctatggtagtaaattttgcagttgctgccaggattccataatttttttcccccatgtataggtatttagctttcttgcaccaattctctatacaatttaggtcttagtcttaaaacatttgttggtgatgattatgggcatatatcagttttgttgtgacactttattagtactcggtgttcctttttgttttttgttttttttttttaatttttaagaaaatgttacctggtgcttggggagttacccttttcttattaattattatattatatttcttcacgattgttaaatgtctgacactaattttatgaaattagcaagtttaagtgttacttgattatatatctttattttaataatgaatagtattagattaacttcttattaattgtaaattatgtcaaggaacttcctttaattccggctttcttaattggtgtgtaatctgattttaacctcctttaattggtgtgtaatctgattgtaagacttgcttagttatttcaaaatcacatgttgaaacaaaaagtaaaaatacttgtaatcactctcatataggagataatgcggactgtctgcataaattgattcaatttaatgataaccaattgattcaatcgtaattaatcgttaaacattagatatctaattatgattagattggattaaatgttattttggaatatccaattagatcggattggatgttggatgtggtgtttaaaaatttaatacatttaacatctaatcgaattaattagtattttcatttaatttggatgagtaattaaattttatattgttagtaaattatacatgtaaatataaaaaataaacattaaaattttactctttttttcttaaattagatggattcattttcaatccaatccaatacatatctggacctaaaatattggatggatccgattcgatatatgggaaatttacaaaaatactggaatttgggttaaacttttacaaaaatactgtcacacagaaaagttttcaaaaatactgtgtttttataaaacaccagtaacagtagaacaactaaaaaacaaaacacccgtagaacaccagtgaaaacttaacacaatatactgtagtatgaaagttataaaaaaacgggttaatagcgacataagtacccaaagttttnnnnntgtaagtggcataatcccaatgtttatttttagcggcataggtactcaaatgtttgtaaaactgtaatttttctctaatttcgtcagtacaaactctgttattttcttaaataggccacatataaggtcgagattctagatcattaggtctagataaaaatatatagtatcatttacttccaaatgctcatttaataaatttaaaacaaagtctgtagtgacaaaactggaagaaaattacannnttacaaacattgggtacttatgtcactaaaaataaacattgggtttatgctgcttacaaacttaaaactttgggtagttatgctactatttaccctaaaaaaatacaataaaagtaaaaaaataccgcttgacagtacttttgtaaaaaaatagcaaaagttagtataccatgtaaatttccgaaatatactacgtctaaaatattggataaatctaaattaaaccaatatatatatatatgaaatacatctaatggatagaacttatttaatctaacatccaatagatgttggatgaaatgtatgactgaaattaattggatcaaatcgaatggtaaaatttaacatttaatatataattagatcgcatgtgaataaacctaaaaatattaacgtggtccaataaatacccctaattttattatcttcattccttgttgtgactcattgatttggataggtgactattttaatatgtaaatatattttttttattttttattttttgaaaaagatatatttccttaaattgttgcttttcacaaattggttttgggattttgtggttggacccatgaaaacgaagagggatttttatggcaaccctaaggaaagtaactagttactcttttgtttagaagaattttttttatttatttttcataaaaatgtacttataagtaataactgaaataaattcattatgcttacaatgctagttcagtttatataaacatcatcataaacttgaagtacggtcagtttatagacatcataatgcattacatcattttgattaggcacagcatttttaacaacgaaagtggcttttatgtttaaaaaagattatcaaaacgacaagagaaaaagtagtcagtttttcaacactaaattatatttcctcttttgtttttcaaaaaaaaaatatatatatttttcctttattcaaaatccatgcaaagttggcacatattatacgtggaccatatatttgatcggaatttaagtaacataatggagcgtccccactttaagttgaatattctatccaacttaacaattattattattattattnntattattattattattttgaatgaaaataatctttattagacagaaacatcggctaatacaaaggcctgaaaagcaatgggagcatcgctctcagtaaaacgacgacctgaccaataacaagcaccacgtaccatacagtgcgcggctttattagcagaccgtttaacatgaccaat

SEQ ID NO: 16011 - DNA, 4918 bp, Cannabis sativa
tgttgggccggcccaagtcacaagcccattacaattgaaggttgataaggtgcaagctcaattacaagatcagttagaggaagaactctcagctgagatatccccaggattggagccaaaccaggacatggcgcgaagggactcggaagagggaagtgcgagagcgcgtggaacccgagtgcgcgtgaggccaaaatggttgcaagagtttgttaagcttgagactcgttgagggaaggctgagggaaattgttgcattgcttttctttcaattctgttttgcttctttgaaatgtaagctgggtataaaacccattttttctgtatgactgatatcgattttatgaattgaaaactgcaattattttgcattttgggagattagtcttgtctcgaagaagaccctatctaacactggtgctttcatttctttttcagcatgaagaatgaagaattggcaacaatgattcaagccttggaggccaatttccagaagcattccgagcaacaattttccaagttcaccgcgaaactggaggagcaggttactcgactggatatgcgtgtggaccaacttcagtcagcatcgtctaaatcttcaggggaaacgggtaacacaagtcagtcagcggattcgattcccttacctcgtgcatcttcgcaatcggagtctcgggaggtcaatgcgatactgaaaataatgagagtaaaggtggctcgatttgatggagtaggagtggaggattggatatataagataaacaagttttttgatcttcactgtgtttctcaggcaacgcgtttggcaatggttgcttttcatctcgagggggcaccatcgacatggtatcagtggatggaaaaaggaggaggattgggcgattgggaatcctttttacgggctttaaggcttcgatttgggtcttccatctatgatgatccgctgggcaaaatcgccaaactggtacaaacaggtagagtctctgcatttcgtgaagaattcgagcaacttatgacaaggacttcgggagtgccggatcaatatttcttgaattactttgtatggggtttgaaaacggaaatacgaagagaattgctattatccaaaccgttagaccttgccgatgcaatggccaaagctcaattgtatgaagatcgaaatgacgacatggtagcgcgggcgcgaggggatggatacagagcgagttggcctccccgaatctcccaaccatactcagcagtgaccacttccccaacaacacctacaagtccattatccaaggcgacaactccttctacgtcacccaagctacataacccaaatctgccagttaaacacctttcacctgctgaattgaaggacaaaagggaaaagggattgtgttttacatgtgatgagaaattcagcgcgggtcataagtgcaaaaaccgtgtgttaattctttgtgctcaggaagaagaggagatagatactgctgtccatacagagacaaattccgagatactagaaaccataacagaggaggttagcttgaatgccttgtcaaatactagcaaccctcgtatttttcggattattgcacaacacaactcagaatctctggaagtactcattgatacagggagtaataacaacttcatacaggaaaatttagctcatcgtttgggtctgcctacggctgacactaagaagtttaaggtctatatgggaatgggaattcattatggtgctcacaagtatgttcgggggtggaattgagtttacagggacataagtttgtggtagatctctttgttttaccaatatggggattggatgttgtacttgctatgcagtggctgcaaacattgggtccttgtcttcatgaccataaggcccttactatggaatttgaatggaacggcaagatggtgaagttggcagggtcgtctaccccagcaacgcaacaactctctttgtcgaaactacacactttattgcgtgacggagaggttcgcgacgtttgtattattgcggcaatatcatctgaagactgtaaaacagatgaggctctcaaaaaaatggagctaacacttcctgtggctgagcaagggttattaacggagttcagagatatttttgaagaaccaaaaaatttaccaccgtttcgtagttcggaccatcggatcttccttcaaccacaatcacaaccagtaaatgttcggccataccgttacccacattttcagaaagacattattgaaaaactggtgcgtgaaatggaggagtgcagatttattagaccaagtaccagtccttattcatcgcccgttttgttagtaaaaaagaaagacgggtcgtggcgtttttgtgttgactaccgtgcactcaacaacatcacagtaaaagatcgctttccaatacccacaatcaatgagttactagacgaattggggggagctaccatcttttcgaagttggacttaagagcgggttatcatcaaattcgaatggatcccaaagatgttcacaagacggcattccggactcacgaaggacattacgaattccttggttatgccctttggccctcactaacgcaccatccacatttcaagccaccatgaatcgggtatttcaacctttgcaacgtcattgtgttatagttttttttgacgatattttggtgtatagtaaattaagggaagaacacattacacacttgcaactggtttttcaattgttgagaactcgcagctttttcgccaaggctactaaatgcacattcttccagccgactatcgaatacttgggccatttggtttctgctgccggggtaaaagcggatccgtcgaagattgaagccatgattgactggccacagccgcgaacaatcaaacaactcaggggatttctgggattgacggggtactatcgcagatttgttgctcattatgcttctattgccggccctttaacagagatattgaagaaagacaacttccattggacttcggaagcttgcgaggcatttcagaaattaaaggcagcaatgaccaacacaccagttttgtccttgccagatttttctcaactgtttatcatcgaaacagatgcctctaatatcggagtcggtgcagttttaatgcaagatggacatcctattgcattttttagcaagaaactggggccaaaattcaggggtacttctgcttatctgcgtgagctcagagcagtcattgaggcagtaacaaaatggagacaatacctactaggccaacagttcattatacgaatggaccataaaagtctgaaagagttgcttacacaagtcattcaaacgccggaacaacaacattttcttcgaaaattactgggataccattttacaatcgaatacaagacaggaaagtctaactcagctgctgatgctttgtcacgcaaggaggaagaagtttgtctagttctggcagcgtctcagtcagccgttacattcgattttttggaagaattacgccaagaaaacatctcttgccccgaactcagaaaattacatgagcagtggaacaacagcgaattaatagacactccttactcagttcgggatggtttattatactacaaacagcgcctaagagtgagttccaattcccatttaaagcagcaactcatccaggaatttcatgacacaccaatcgggggcacgcgggtccagagcgaacatttcttcgcttaagcgcgagttttttctggcctggcatgaaaacagaggtacaaaaatttgttcaacaatgtgtgacttgccaaactgttaaatattcacctactgtcccatacggcttactgcaaccattggaattgccagaacgaatttgggaggatttatcaatggacttcattgttgggttaccaaagtcagcaggggtctcaaatattttggtcgtggtggatcgtttctccaaatacgctcacttcggagcattgccaaaccagtatacagcaacaaaagtggcagatttatttgctaatatggttattaagttacatggaatgcctcgatcaattgtgtctgaccgtgatccaatttttacaagttcattttggaagaaactctttgaattgatgggaaccaagctaaagatgagcacctcttatcacccacaaacggatggacaaactgaagtgacgaaccgctatttagagcaatacttgagggcatttacagcggacaatccgaaacaatggagcaaatttcttccatgggcagaataccattacaacactagtgaacattcagccattcgtatgacaccgtttgaagcagtctatgggcgaccccccccaacgatacaaacttatatacgcggcacaacaaagattcaggcgctagaagaagaattactcacaagggatgacatccttcggcaactcagggacaatctcactcaagctcggaatagaatgacacagcaagccaataaaaggcgccgggatattcagtttaaaatcgatgatttagtgttggtcaagctccagccttatcgataggctactgttgcgaatcgcttgaatcctaagctgtccaagcgttatttcggaccatttgctatcactgcccaagttggaccagtggcatacactcttgcattacccgaaggaagcagaatccacccggcctttcacgtgtcagttttgaagcccttctatggccctaaaccaccggtgtgttactcgctgcccgaaatgagtattaacaacaaaccactgatgttaccccaggccatactgtcttctcgcatacattcaggacaacaacaggtgttggtgcaatggtccttaagcgcattagaggatgccacctgggagaatttggctgagtttgagcaggtgtatggaagtgtcaaccttaagcgcattaggggcatatttgttaattat

SEQ ID NO: 16012 - DNA, 4737 bp, Cannabis sativa
catgacttaatttttagctaattcataactagctgtaaattaattaattacttgatttacgtaccctgtccaacattttcaatccaataatgtgtatgtgtactatatatacattgtcttaagtaaaaaaagtgtactaaaagacactgcacgtattaaaacacactcataaattattaaccctggcccttttgactgaaataaagagagatctaagttctagttgcacatgtaatgtgtgtgagagttgaattattaagaagtatatatataatatcatattgtatagatacaaattataattgatgtaccggcacgatcaagtataagctagcttttgttaattcatcataaattaaacccattaattaagaaaacactaaatattttctgatctgaattttatacaattgtaatagacaagggtatattagctagagtgtttacatatacataatatagtctctaaaatatctatacaacttctgtgaaggaaacagagagttcaaaacatatgttttctatatatacttgaattctatcactactaacaatttacacaaatatatattacaaatcatacatatgaattatatgtctttctctagatgatctatgtctctcttttatacttagtatggcataataaggttactattatttttaaaatttgcttttgtagcagggctatgtaacaatcacatattcccacgcaattagcaagaaaatggtttgtttttatataaatatagtcgcaggaatagctaataaagctgtttacttataactgtggggtctgcaaaaacgcagctatatagtagtgcagggacaatgaccagtatagtaagccctatatttttctttttgactccattcttatatatatctcaattaatatgtatatatatatatattaatttaactcatattcgatcagcctcagcctcgtccactcttatcatcacatgaaaccctaattaattaattaaaaagcagcttctctgatcgatctctatgatcaccttggattgctaccattatttatttgggcaaactcagtagcacctttctcactctcaccatctcatcaatattccttcataatatactttgaatagtctcatttgttttgtgatcatcatgatgaaccaggcgcacgaggagaaagtgaacaacatggagttcactccaccgtccgatcatctctgctacgtccgatgcaacttctgtaccaccgttcttgcggtaaacatatataatcaatcctacaacacagatcaattatgtatatatatatatcaattattgttatatattaagtatatatatctaattagcgcctttggacctcaatgcatgtatatatcgtagtatagtaattgatataaatcaagatatatcagttaaacattaaggtattggtaaatattgcaattattattggtgaggaatattacaagttacttagattgtcagagaaatatcccaacttgtttttgtttatttattattgttaattgttagttagtgaattaataaggataagccaagaaaagaactcatgtgatttttgtgtgtggataatctccaaaacgtgtgtatgttttgttttttcttattttagttgtagtgataagagagagatagagaagggttttattagatatgattttggtacatgatgagtttattttataaatttatattaacacagtaacatattattttattctatggggtgtacatgctaggttgctcttccatacaagcgtttcctggacacagtgacagtgaaatgtggtcactgcagtaacctttcctttcttagcaccagaccaactccactccaacctcatcaatttctcgatcaatatcccttgatgactcatcttccggttattactattcttaagcttctacttcttcatcaccattacacacacatttatactgatctatatatatatatatagaatgtatatcattgtttgtatacatccacttattttgttagatatatataaataaaataaaaattaaaggagtgaaatgcatgatatgaaggggttttgcaataatgatcatttgaggaagggttcatcatcaggatccagcccatccagtaccacgtctggcgatccaatgtcctcaacaggagctccctttgttgttaaacgtaaggctactaatatggttactatatatatatatgtgtaaatttatatttggtactttgacaaattataaattaaatataaatatacattataataattgttttgcagctcctgagaagaagcacaggctaccttcagcttacaatagattcatgaagtaaggagatattgagagagacattttattaaacttataaaacaattagtaacgttaatgaattgattatatatgaacttgtacttaagttatagtgtatatacatattgttattatacctgatatattatatatatatgtcccccagagaggagattcaacgcatcaaatcggccaatcctgagattccacatagggaagctttcagcgctgcagccaagaatgtaagttaattggacgttctatcaaatttaaatattgatgatatatcacagattcttaaaaagtatgtttttccatgcaaatatactggttctacatgtataatctattaattaataatttttagtttttatatcacaattaagatatacactacactgatcatcataaaaatatcatgagcactctcgtactttcaaataatataatattatatatataatatagtaagtctggctactaacatcatattttaatctaaagtgggctaggtacattcctcatccgcctgctggatcagtttcgggaagcaacaaaagggtataattttttttttctttttttttttttgattaatttgattttaatataaatattaatgatcttttcaattggctcagattttgcagcaatgagaagttgtcttaaatctcatcattgcatggagattcaaataaatgggaccatatatatatgtaatatatgtggagatcgagcactttcagcccacaagttaactagctaggttcatgaagagagcactgcatttgatgtgtttctcaaatgtatgttttggactttggttttatgttttattaattttcctactgaacttaatcttagaggtacttttattgaaactattaattagcttattattaattcccactactctattaattaattaaataatatggatgtgaagtcttgctctttgctcttgtaagtatctccatatatagctagcttcttatgttcataattatcaaaatcatactctcaaaatagaattggattagtttgtttgattattaactaaaaaaaattcaaataaattaatttcctcatgaatttaggttgagagtaaacacatatattttttttaatcaagaaaggaattcattaataaaacaaacaaatttagcactggagcctcacattttaaatttaggtaaaaatgatttgataaaactcagctcaatttgttatgagttagagtgctttcattaaatacgcaatgcacattacaaaaggggtgagccaaacgactctatcagttagacacaattgtcaaagaaatattttaacaacttgatattctaatgattacacaatcacagattataacagaattggacatgtcaacaatccgtgccaataatttaagaggtgctagagtagtgtgcaaggaaggaacacaagaattggggactgatttgctattccttaacatctcccttcaaatgaaagggtgagattctcacaccaagtatgtcaatgaggaaagtaaaaacaatagtatttgtatctatggctataatttcggttacaccaatccatataaattgttaatatgtcacttaaaaatcgaagcaaatagctcttttcgtagtagtgttggcagaatcactccttgtaatgatgatatcatctacaaagattagcacaagttgaatacatttttcttatttgtaaaagaataatgaagtgttagatttagattttctaaaattccatttcaacaaggtatcttttaatttatcaaaccatgttctaggtgtttgtttcaagccatagaatgatttgttcagtttgtaaacataatcttctttgccttttttctcatagccttgaggttgtaccataaacacattctcttccagaactccattcagaaaggcattattaatttccaattgcattatgtcacagtctcttgatatagcaaaagtgagcacaattctcacagttgcagcctttattactggactaaaagtctcaccatattcagtacctagtatttaatggaatcctttggccataagtctggatttgtacctttgaaaggttacatcagcattcatctttactctaaaaactcacttaggttcatgtgacttgaataaggaaccaacatccatgtcttgtttcttgttaaagcaacaacttcataatccatagcatttgatcagcctggatgttgcagggctgcttccacactataaggtttagtatcatcaagagaagttgtcacatggctcaataaatccaaggtttaaatatgtaagccttatctctagtcaccatggtgttagagatattattacaatggaagataaatcaaggtattacaactctattgcaatataatacaaggaccaacaaagagattaaataaat

SEQ ID NO: 16013 - DNA, 3959 bp, Cannabis sativa
  modified_base (207)..(211): a, c, t, g, unknown or other
aaaaaagttattcgacaaaaaaaaaatgaagataaaaaaattgaatttaattttatattggttgtataaatatgcttttgatatagcataaaaaaaatattttctgatatttttgtaattaactaattaaattaaacataaaaattcaataaaaaaaattattactcatctttagattaaaatctaattatttaatatttttaaaannnnnatttatagttaaatttttttaataacaatcaatgaatacccattaaaaagtattatatatataaatatatattataaatatttatataaagaggtttacatttttttagtctggatcattattaaaacgttatgcattaatgtaatatgatgtgtagttaccattactggcctaataatatgccaaggaaactacaaatctactcatgttttttgtgcctaaaacaatggatccgcagtccctatcaatgtagcttcaaaattttctatcttgaatctcttgacacataagaagattccaaagtaaatttcaatagttatgattcgtttccagttacatacaaatagaaaacataaggtttattataccaactcccatgtgcataatcaatccacggatgatcaagaacctatccatactactacttagtacttacaatctcatttcaattacagtcaatttctaatccattaaataaatgcatataagttatttctttagcagaaaaaccaaatgcaccaccaccacgaccatcacctcacccactcactcattattttatgttgaattggagcatagaaattgctgcattttcttatgttaaaatatataatgatgaacaccaaccttcaccacctggcctatagtttaggtgactaataccaccatttcgtacctacaaaccttgttagtcaacttaaattttgagtaaaatacgcgaaaaattattgactgattaccaactacaagcccatgttattgtccttgattttgctctttcttcaattgtataagccttttttttcaacagcttcccctgcttataagttacattagtatttttataactgtccactaatcctaattagtaattaaactgacaggtatacatatcaaccttctcaattgctgattggaaaattgagatcagaggaataaaaatgagagttttgttggtataatgataaaattttgcatgactaagtcctaagccaaataaattaatcaataactaataggtaaaacagtacgctgcacatacccaagtgtcaatttcgattatggtatgccctgaggctgactgtttgagtccaactagaacattaatttattagtccaacactagagcaaataacatcctcgctcacaagaataatatacgatagtaactgtcaaatataaatcttgcaatttcttatttgtgctagtgactaaatcagatagctcttaacaaccctccaaattggtttgtcttggaaaatcggtaccatattgagggagtgaaataacaatatgcctggctgactccaatctaagaggcactagctccattgagttgtatcttctgagtaaagcaagtgttgccaaaggttatatcagacagagaactgtaaaatctttacagccttgccgtattactttcttagtcaaaatgttcattattggcaaggtgatcatgaggaccaatggctttaaggctcacatttcttcatctgagctaacaaaatctaattcaatcatcttttctgttccctgcttggttttgtctgctgaagtttgctccttttcagttttatttctttttgcattgagttgttgatttctcatagcttcagaagaatgtgtgttcaaactagatgcttttctgagaaatgcttacatcaaaatcatcagtgaaaaggtttaaaagttgacatgcatatacgaatgtgatacagacagcagaaaaaagaaccttgaattacctcttctgaaagctattgcattcttggttttgcatagctgattccttctttatgttattgcttcctgctttccctgcaataaaaaagacgccacataatccttaattatctcggggaaaaaagaaaaagctcacaaaaggtactccagcaagagctaaaagtttaggattctgacctgtgatctctgtaagaaatcttattccttgcgagtacgaatttgttgtcactttacctgcattactgtttactgcaacaaatgagcaaacaaattgccaaaacataaacatttcactaaagtaattttcttttcaatggattaccaccaatgacaaacctcaatgcctttttgagtccttcaacagacaatagtttcataggttgcttgggttttcttgaatttgttttatcagccagtggatcaaccatgtatatcccttccgatctgggtggatccctaaacgctgttctgatgttcctgtgcacaagatatgaaaggcttcatcaaactaagattgcaaaaaatgtatcaagtatacgaagagtggattatgcaatcaactatgctctgtacattcatcacttaccctcccttgagctcacttcgcatggtggtatacttttgtgattctttctgttaaattgtagcatgaagagtatcagtttagcaacattgttcgaaaagaaaattgtggcattgcagagtcatgcttaccgatttatgaaatttacaatatttcccacgacgtctgcagaaaaagaaattcgatatttaagccacaaacaaaatcaatatgttgcacacaattatttttttctcgaatatgtcactgcacatgataattttcataccgatcctcataagtatttcttcaaacatgttcattatcaaaaagagaataagaatattgcttgtaatagtcacaagagttcagaacttattgtaatgagcatattttatatacaacatatttccttttgcctaaaataaatatggcctacttgtttatgactgatgtacaagcaactccatcattcctcttcccattacaaactccataatcaactgaagtaccaatcttcaagacttgtttaggtgaatacagactcaaagagaaaccctgaccctgaaagcataataaacaaacacagaatgtgctgacatttcgaaacatttataagagaaacaaaaacaaataaacatcagcatacaatctaataccatagaatctttgcggacagtacaattaaatagagcaaacacagttccagcttgctctttgctgagttttatgtaagcatcaccaaacaagaataatgaaacagtagtttcatccaaacacccgattttccatatacaatagctcttccctgttgagctagtccttggatttcccttctcagtcaatactccaacagttgcccaacacccagaaagagtatcccctatcaacagattcctataaataataataattgcttagtcaaaacatacaaactttcttcccttttctatatactttttattagggaaaggaatccccaacacagattatgcttcttcaagtagctaaagagcactaatgacagaaataaaaatgcaaacatgtctgtctattaagagacattacatactttatagttgataaccgaacgaaacgaatgtctgagaaatggttcttaagctcggcaggggtcactgcctcattcctgaacaattacaaaggcatgattgaaaagggttttagtttacctagatttgtactaatcaagaaggaacaaagaaaaagaaatgtacctaattcgtagacccgaaaacctctcgaccccgggttcattacagagctttgtctggcttgattttgaagccttttgtatatgatctggctcgtagtcaagacagtctagaacagcttccctaaacacggacatgtccgcctgtccttttcggctcggaggtccctcatctgagcaatactctattgaaacaaatatatatatatata

SEQ ID NO: 16014 - DNA, 2975 bp, Cannabis sativa
gaatcacaaggacttacaacttcaataacttggacatgttgccaaatgactctggaattgtactcccatcaaagttgttattatcaagttggctgcaaacaaaaatgctgaagctgttaaaacttgacactaggttccctttgtattttgccaaaggagaataaaagaaaactacgaaaaacaacaaaagctgcacattgccagaaactcagaaagcatacagtataagtaattcgggaagttcggagaactcggctggaagttcaccagataactcgttattatcaagaagactgcaaagatcaaagatagatttgatcagcgaaaaattgggaagaacacagacacaaacaagaaaaacagaataaaaaaaatggcacagatagaggagaagatcaaatgtatgacactaattattcttaagcttacaagtgaactagattcggtaatctggagagctctggagggatttgcccacttatagaattgttgttcatgtgactgctcaaacgaaagaaaagaatgtgaaacaagaagattaaaagacataaaacaaacagtgaatggattagtgtaaagaattcaagtagcatcatagcacatacaagtgctttgttttgttcaagtttgcaaatgatttaggtatgggtcctgatatatggttctggtcaatctgtattctgtccaagtttggtagataaccgagctcctcaggcaagattcctgttaattgatttccattcaggagcctgtagacaaagacattaaagtagaatgaaaaacatgctaacattgtgtcatttcatgaatgaaattagataccaggtgcagagaaatattgaataaacaaattcagaatattagagctaaaagaccatgttgaagaaagcaaagtatgtaatggattaaattctaagcaatggttaaacaatatgtgcctaaaatatgatgccaatataagctgctcatctagtttaggaaaattaacttacaagagttccaaggatgtaatgttgcctatctccttcggtatagtaccagttaatttgttccacatgaagtccctgagacaaaattaaaagcctaatcaaatggaagaagaaatcatatgctactttggaatactgagaaaacagtgtccaagtaccaaaaatgagagagcttgttttttcttctgtaaaaaagataaaataattatataattgttttgcagatttcaattttctttgccttacaatattcgcatgtgagataaacggccaagctctggtgacagagttccggaaaggttcatatttaataattgcctgcaacaaataagatagcaattttaacaagattaaacctcaagaataggactgaagctgtattatctaacacataaaacattgattattctaacaaaagccacagagaaatggatggatatagacactaaagaaaatatcataatctgagactcaattttattaggatgacaaactagaaaacacatgtgtcccaagattctttagtccaatcaattatattcaaagctgaattttatgctcagaaaggataaaaatcatacaattctctaacatgtagataaccatcatcaaacgttgtattgaagcataaaaccccattccaactggatgagcacggatcacctcgattccaattagtcaagttcttgttgggatcatccaaacttcttctaatagcccgcaatgcattcactgaaatgaaaaacaaatggcagttataattccatgaaatcaaccccaacaaatgaaaattgagcttttgtaggtgttcagcaaagtcctactacgagcccaaactgtttcataactagagaattgttttgataaatagtattcatttaccacaatcatagattagttttatcccacttgaaaaacaaaatcattatatatgggaattcttcttttatagctaaagttctccaaaagttattttattaacaaaaattagtaaacccaaaataaatactaaattcaaattaccttcaacagggtcagtaatgttaaactgggcttcaacatataatgaagaccaacataaatacaaaaccagagcggttgagaacaccaaagattttgataaatacatctccaagacttaaagctcacaataactatgattatgtcttcaaacacaatacgaaatttttctgcaaaattcgattatttcctttcccctgttaaacaccaatacgtgagataattttttaaatgaaaaagtacaactttacaaatggaaactacacatgaactttcaaactaattggccatgaaaaaaggcaaagaaatgtaccttttagtattttattttacaatagaacaaaagggaaggaaaaaacaaaactttatggttgaatagcaataaaaaaatattatatctaaaaaaagagagaagagcatgataaactaggaactgggtcagagaccaaccacacctggagtttagtatggttctgaccaggtcgccatacgaagagctgaaacagtttctgtaagtgctgacgaaaacgatgatgatgacgatggttgggcatggttactataattgttgttgttgttgatgatgagagagagtgtgtattgtattgtattaattgaaaagtaaaataaaaattcaatggaagtgggttggccttgttgactttccagaggaggttgcagttgagacactcggtttcccattcattaatattattttttagctgaaaaagaaatattaatcaattgattaatatttacttttgtattttattttattaaaggttgtagaattaggacaaggactcacgtttgaaaatacactgggggctaattaattagactctgagtacaattttttagtcaatcttcacgcttaaaaatatatatatactggaatatttttttttaatttttgttcacggtggtgttcattatgtttaaaatattatctctgtaaatttttga

SEQ ID NO: 16015 - DNA, 6555 bp, Cannabis sativa
  modified_base (2256)..(2260): a, c, t, g, unknown or other
tggaggcttgaagcggggacgttacagttatagtcatttcaaccttagttcttgaaagtttaaatgtagttcttgaaaatttgaatgcagatcttgaaaaatctcttcttggagcatgtagctctgataccatttgtagtgaaattacttcactcgaacagatagcagcaagaaccaacaaaatcgaacaacaataacaccagtaacaataaaccaaaaattggtagagaggaagaaaactttgctcgatttcaatgacagaaaatgaatgaactttattgttcaatgacaaaaaatgaatgaactttattgatcaaataagcacattaaaatgagagtttacaactcaatcacagtcatccatggtgttgaacaccaattacacaatacctcatattgaggaaccttgatcaaacagacaatgatctatttacaaccctctactcagtttcttgtacagactttaggaagagagttgaatctgtgagatagtataattcttctaggtactcagatcagtcttgagttgtatgtgttaatgtctatttatatatagatttaggtattagttgatcgaaagagagatatgataactaaccactaacttttattcccaaaaaatagaaaaaaatgttaatatgattagtgatctaatatccatataatccatcatgttcgtgatttatgagttagttaaacatgtattttggatagacgaaaaacttggttagttagaagatttttctcctttgctcaataatgtattatacttttattaattcttaattttaatgaatttatggctgtaaaaaattgtagactatttaattttagaatttttttttcggggggtgaatcatcagaactatatattagatacactttattagtatagaaataatttattagattttccaacaaaattaagattattcatgcatgcacataaatgctattagaagcaaaagaaaaagaagtgtgaatcgaagaagaagaagaagaagaagaagaagagacctaataataatataagaagaatataattatcaaagaacaaggaatgggcaaatcttttggagtttagtgggtgcatatatatatatatatataaaaatatatagatatatatgagacatatgccatcactccatgtgtttttctctatttctctctaccttttattttatatataatatagtatattatgtatctatatattatatatatatatatgaaataagagattgaaagccatacacaaaaacttgacaaaagagcagttgaagtattcatttcgtatatatataagcaatctaattctaataataatatatacgtacatttttgtcaagtgctctttaattgtagccaattcatgaactgtaatattaaagttacgattaatatatatataggaagagaagagggtttgctatccaagcttattatcttttatctgtaaagaatatttaattattgccaattcatgaactataatattaaagttacgattaatatagtagacgagagatacttaaaaaaaaaaaaacaacaacaaaactttaatgtctaaaaaaagaatacctagctcattataagatatacacaaagtaaatatttagagctaacatcaaagacaaggaattagagaataatgttttggtttgatatatttcgagtccattttaatccaacaaatatcgcaaaaactgataaagtacctctaattaacttctatgaaaataacaaaaacaaattgattagtatcaactataaaacaaagatattgtttgtatatatgtttgtttttatatttattgcctaaaacagctaaattattataagacactactgttagagaatattataattatttatatatgtatatatgttttgtgtggtggttaagaaatttcagggtttgaggcaatttgatctgcatggatattgtttgcatgaatagcatgggatctcatattgcctgtctttattatattattaattaataattaataatctttctcagattataaggaaaaaaaaacagaaaggagagtgtgatggggtcatcaagcagtgagtattggggaaattaaaacattcaaatatttatatatttaaatagagagagagagagagagagagaggaccctatatatatatatgcaatgttttagtttaaaatgtacaataataatatgagacattgatttaacatatacctcttcctctctcacacacacacatatatatatnnnnntatataaatatttatatatataaaaaaaaaaaaagtatttttcgtgggattttaatcttgacttctattatatatgcaatataaattaatcattacattactattaatattatgttataaatataattttttattacaaatatatagttaattaaaatgcgttagtatttttttctcatattttaagtgacaatgcttttacgtgggtctgccctgcttatcatatataccaaattattgtttttttgatgaatataccaaattattttacaatttgcataagacattgctttctttccatagtattagcaagggtgaaggtgttcaatattattctgttgaaagatttagtggtgtactttattagaagaaaaataatcaataaagtttaaataatacttatatgaaaataaattagttaattgagctaagtattaagagagattcgaatttacaacttcttgaaaaagtataatattattggactatgtttataattataatcactctctttgtgtaaatatatatatggtacatgtctatgtgtatgtaccacaaccttatatatagtttattcttagacagacaattatataatttgagccaaatataatattataaaaaatactaaaagtacctagctagtacgttatatatgtaattaagtatcgggtcctgtataattttaaaaaataatttttaagaaatatcgatcactaaccaatcgcaaaacgctatttatttatagaaggtattaggtaccactagtacccaataaaaatatttaactaattatagagtatcacctcataatagtactagacacctaaaataacttcaaaaccagagttaacatatagtttaataatgaaatttgggagcttaaaaaattgagatttccatttaaaggaaaagcaaatgttttggggtataattgacacttacaaaggaatttcacaattttaagaaatttcaagtatcaagacacacatatatatgccttgaaattagaattgggtcatcatctataacactaatttctcttataaacacatgtttttaggtaaaataactagaaatactcatgaatttacttggaactagcaattttcttttttttttttttttttacctttttcaatattgattatttttgttaccaacaccacaaccaccgtccatggataagaattatccatatatatacataattatataatttttgtgggctcttatccatgtgcatatgtaatggtaatagctcaacattagagacacaagagttttattaaacccttttcccaatatgaattgcttagtagtgttcaatgttcatagtgatcactctgaaaataattctcaagttggggagcatatgatggaccaggggcccactatattaattgggcccagaccagatgcaggaaaagcccatatcaatattaatgagtaattggattcggaaccatattattttgtgtctacaaagaaagaggaatatgtcaatctcttccatttgacaatgtatagtaaaataaataaaattatcataaatgcaaaataataataataataaataaataaatagaaattacaataagcctcatcttcccctaataatgtctaggagagggctaccttgtgtttttgtataattattaacttacatatataaataataatataattttttttggggttctctctacacaaactgatcaattgggttttgttagatcagtttgaaaaatacaaaaaacagtttggatttttttttttaatttttttttttttttttgtgtatttaataattagatttagaaatgtgaaatacatcttctatgcctagctgcaacagatttcttcttctgcttagtctcttctttccagcttttagcaatgtcatgtgaaacactcatggcatccaaagatgcaccagataatcctcttcttgtgaacccaactgcatacagtccaccttttcctttccaccctaatgggaatggattctttgggattccatcctctgagaaaaaatcattctcctattaaaaacaaaatcaaaatttattagatcatttatccacattaaacaaaaaataaatgtgaaaaaaagacttccgaactacgtggcactgtaagatttgttaaataaatttaccaagcaaacctaataacatttgtttgtttttattaaaatttgactttatatgatatttatatatgttctatatagccccaaaaaaaaattgttaaatataatttattagatcatctaaaaaaatgttgtcttatgataaaaacacacttttaagccacgtggcagtataaaatttatgaaaaaattacaaaaatgatcaacaaacttaataaataatctcattttgtttttgtttgtattaaactttgactttatatgatcacacaaaaatgatccaatttttttttttaagtcaaaccatatatttatataaaaaccctttaattattaattaggtaaaataaaaaaaataaaaaaagggaatggaaaagcaagtaactaccataactgtcagtgagatgggattaattaactgagaaaatataaataaatataaaatgttatgttttgttaccttaagccatgaagggacattgcttctatatccagtagccaaaacaacagaatcaatttcaagatttgtgccatcaagaaggtgaacactagttttagagaagttcttaattccagggaccactttgatttgacctgatcttattttcttgagtgctccaatatcaagtactggggtccttccttgtgtgtttttcaattgtattggtccaatttctggtcttttaagcccatgtttttcaaggttaccaaaaattattcttgctattatcaatagtatcttgtccacaacccaaactgggaaccatttcattaatacaactgctaattcgaatgttgacttcccaactatctctcttggcaacacatgaacctgtattcattaataattcattcattaaacacttaattatttctcacaacatacacatatttatattactaatctattaagacatatatcaaagtcaaatatatatatttaaaaatcaccttatttcttttgccttatatatatattcatttactatcactactatagctcttaaataatgctaattaattaacaataaacagtgaaaaaaatatgaactaattatgataaataaagtaattatcgaataatttttagagttttttatttttacattttaaaatagttttttttatatatttttacgaaaatttacatagcaactcaaataactattaacagagcactctaaattacagtaaattaataaaaaagaaattaaaaaataatatataaaataatttttaataaatttcattttaaaaaggtgtttttttattttttacatttcaaaacaattttttttttcataacttaatttgtaacaaaaaaaaatcgtataaaaacccctataattcgtaatattatttatacattatttcaactgtattataaattactaaattagaattatcaaagtccaatattgataacatgtagtaacgaaataccatatatatatcacaacataagttttgttttttttttttaaagaaaaaatagtaaaaaatcacaatatattatttctaaatattactcaaatatatatatatactcaccgagctccgaaccaccatggaaggtttagcattatgattacaaagatcaagagaaacttccataccagaatttccacaaccaacaacaagaactctcttccctctatgcccttctccagatctataatcacaagcatgcataacatccccacaaaactcctccaacccatcaaattccggcacaactttctcggcattctcgccggtggctacaactaaccaccggcacagatactcgactactaccgcgtcattacccgcggtagtagtcttaacacgccacagtccgaaagtctcgtcgtactttgcggactggactgtttcattgaattgaggagttatgtcaaaatgtttggcataagattccaagtactcaatgaattgaaactttgaagggtattctgggaatttttcggggaatggaaagttgggaagttggcaaaattgtttagggagatggagtttgaggcgattgtatgtccttttttgccatagagaggcaatgcaatcttctctctctatgacaacaaaagggacaccttgtcttttgaggccgggggccaccgcgaggccggatggtccggccccg

SEQ ID NO: 16016 - DNA, 7836 bp, Cannabis sativa
agataaccatttacaccataccaaacacctcataatggtattaaattaataattaaaaattccaaactgaaaagttggttgaaggctaacatgaaggtacagggaccgttaacaatccggcgccaatattctctctctgaccactttcccttacaaatccaaacaaaacccattaattatttgtttatttatatataaaaaaaaaaaaaaaaacacagagaaagagagagaacatatattataagagtctcataatctcccatagtcctactctaccggactactaccccctcaacacttcaatactaaagttactcactaacccttttcaagcttttaactcttttatctttttttcttgttgggttgttctcaattctcatggagaatggtttttcttctccccggaacgacacttttccggctggtctcagagttcttgtcgttgatgatgatcccacttggattaagattttagagaagatgcttaagaagtgtgcttatgaaggttttgtttttttacttggttgtcgaattatattgatgtttatgattatggttgtgtgatttgatgtgggttaatcaagttatggattgtttttgtggaaattgtatgtgggtgtgcttcattttctggttttggtgcttttcttttcttatatgatctatttcatgaaaccttttttttttctatttgaattcagtattcatttttctttacctatttttcttctttccctttatgttagtgtattattgtcttttttaagtgaaaaatggaaggaagtttgctcttatatgaattgtttactttgttttctgatgaaatatttgtcttatatttcaatacctatgagattggttttgtcacacaaagaaataaatatttggaaccacaagactttttctctagaatcaaattttgaacatcagggcaactctcaaaattgacagaggactcgaattgtattatggtctgatctgatgatccacttcaacaaggagttaagactccatgacagttaagttgaaagcagttcaatcgggtcgaagctgttccttctaatcgataggctattttgaattagtaccccattttttttccataaaacttcaatgtgtaacactattggcataatgtataaccttacagttacattgactatccccaacaaaatctaagtacatgacttggaccaagaaactcaggggactcaatggtctaagagttttgttaagttcatagattaatcccatcataatggtattagaaccagctttttgggacacgcttactcggatacactagagttcttgacatgaagagatgatgcctagtgactagtgagctattttttttggaaaaactagttcaaggcatctgttgacttgtattggatatgagttttgttttcatttggcattaaatgcacacgtttagagaaaaaaaggccattaagtgaagattaatcaatggaaagtactcaacgactgactcagttgttcttgatgagaataggactcctattagtacctgatctatttaatgagagttctgaattgtcattaatttgacattatttttcctgtctgtctttcagttaccacatgtggtttagcaacagatgcactacgactgcttcgcgaaagaaaagatggtttcgacattgttgttagtgatgtcaacatgccagacatggatgggttcaaacttcttgagcatgttggattggagatggatctccctgtcataagtcagtaactaatttcaagaaaaaaaaaaaaacattcttgaatgctaaaattacctggcttggcttcttgtttctcacttagttgtatgtttgaactcatgtagtgatgtcagttgatggagaaacgagcagggtcatgaaaggagtacagcatggagcttgtgattatcttctgaagcctataagaatgaaagagctgaagaatatctggcaacatgttttcagaaagaagattcatgagataagagacattgagtcccatgaaagcattgaaagtatcatgactagaaatacatccgatcattctgatgatggtcactttcttagtatggaagatttctcttctgtgaagaagagaaaagatatagacaacaagcatgatgaaaaagactatggtgattcatcttctgccaaaaaggctagggtggtttggtctgttgatcttcatcagaaatttgtaaaggcggttaatcaaattggatttgacagtaagtctacttattatttaccaagcttgggcctcaatgaaccatcatgtaggagacattttagaactgcatgctaagaagtatttgatgcatgttccatcatttatgtcgtttttaatgatatagccaccatattatgcttctacagagcgatgatgtgtaatgtctgtttggcagaagttggtcccaaaaaaattcttgacctgatgaatgtgccgtggttgacaagagagaatgttgcgagtcatttgcaggtacctctcttaaaccgaaatcttccttctatgactagaatttgttttttctgataggcttttcatactgatgtagcactttttcctaaaactgttatggttatcaagatcttgatacatatagtactctatatcattaagatggatgatacttagttgatatatgtcatgatatttggtaaggatattttagaaatatccatttctattttctctcaacttatatgctggaactagatgtgtgacagtatcttcttttccttgaaaatggttatgagttatgatgtgttttgagttattatggggattctcattgataagttttcgtctctgcagaagtaccgcctttacttgagcaggctgcaaaaggaaaaggaaagtgatgggaaaacttctttcggagggttaaaccattctgatgtacctctaaaagatcctccagtgagtttcggccttcagagctcgagtagtattcaccaaaatgatgttctgaatggaagctacagaatctgtggcggtaacttgcttctccagaatgtggactccagcagccatgaagatgatctcaggagcatagtttcagagccagtggtagaagctaaggcacctgcagtcagcctttctgattctcacaagaataacagttcaaaaatgagtttcaaccattcatttgtcccattggaatctgaagtaaattttgcagcatttgaatcgggtatcccagcaaagtactcttggtgcgaagtttcagaaattcagttcgggcaagaacataaaccacttatccacttagagaatggcttcactaagctaccactgccagattcactgcaccaagtccatgccgagccggtacagtcaaatccatcaatcagttcaaagccttctactgcagaaaaggcattaagtggccctgtcgagagcaaggctccatatcccgagtatggaagcaatgaagttagtcatattagtccaaacataagcacaataagcactcttcctcttacttccaagagccaaatggtaaatcatcaggcttttgaacccatttacacctcttcatcaactctgactactcaaggctctaatttatgtagcacaactgatttggagtctgttcagagaaacctgacttttgcaagtgggtcatctcttgcaacatttgatgaggatttacaggtattgttccaaggtgattgctttggcgaagaagtccgaaatgtagaattttcagactatgttgatccttggcctatgaatgaagtgcctgctcacttgtatgattccctgaggtttggctatgagaactcctatgaccctgaatatgctataatagatcaaagcctattgacttgatcctgctgtctcctcttttcgcaagatgatgatatttggtgtttctgtttctaaatgataatccagtctttttaagtggatctttaaattaatggcttggaatattatttttctaaccagtctgggttttgatattgagattatgtgtattgtagcagtgatatgcaaacataataaacttactcccatcacttttggcaggtttagaatccagtacaggtgtatgtatctcttatctctatactgtagagctgtaaactccattttctctcataaaccagcaatgctatgagaattttggaattagttgctactaatattcaaacccattatcattattgacatgtctcattcttttcttcaatggtgacagtcaaactcacattgaagcataagatttcatacaggcctagaagacaagatagtaagttgtacatgtcttcacataatttccatcttattttcctagcattttgtaaattcaaaccatatttaacaattgcaataatcttatagaaacaaacaagagtttgttatacaaggctgcaagttattacaaaatgagaaatgattaaaaacaaaaaaaaataaattagagaaagaaaaaaaggctgtcttgttgtgtaagttattactttgttcccttccccatgccgaaactggtacggtacgattaaaggaaagaaaagaaaatctacatattttacaaacagaattaaaatactacaaaatttttccaactgatgtttgagatcacaattctactacccccacatgtctcctaattacacaagtggcttttggtgtgatggttgatcagtcactacaacagcagtctaatctctgagataattcctacctttttactgttgaactctaaatatttggagtggcattctcgtgtgcgttattcttctgaaagcgtgaagcgagtgaccgaatagttggtcggttattttcaacacacttcgagttttctttattgtctgaagactgagaagttgcatcacagattttgttgggagttgccaatcttccaagagtaggtgatctaggttgtctcaaagggatctgactcataggaaagacatttgttcttatgttattaaagcaataatagggtaaaaattgagtgaccaaaggctgaaattagatattaagtcaacagaatgacaatgtatttcatattgagtgaaaaaaaagcaactacctttttaatatgaccagttggcaattgcgatgcagaacacagatcttcatttggtttgctttttaacaaagtgctctgccgcactttcataacatcatgcgatgtttttccctgcatattttcaagatgcaccaatttacaaactcatatcgaacaagtttatgtaaacaatttgaaatttatcatgacaccccatgagtttatgattatagcatgaatgtcgctagtcttagtcatcacagcgggactcacatgggagcagcacctcagtgagttgcccaaattcattactcatacatacctgagccgagctaatcctctcacagctcaacatttactgaactctcagtcagtcccttctaaagactacatagatgggagaaatttaacactctagatcaagtgactaatcaaattgacttgacagtcttgatttattcacattgttgaaagaactgaaaccccctaacgcatatctacatttgtgagttgttatccttctcaactgaaccagataggccaattggaatttgtatcatgaaatggtctcacaaatgagcatggaatgaaagttatgctacaaacctggaatcttgtctgctgacgcttcttttcagcctcatctgcatttcttttttcttcgagcttctcatagaactggaaatagaaaatcaccaattaagaagaagaagtaagcataattgtaaacaacagctattatcacaaggagtaattatgtgaacaaaagaaacgtatggactataatcttgcctcttttcgttttgctgctctttcatcacttttgaatctgaaaggagatgttataatagaaggctgtgatttgcttcctctcccaccagaagattttgagttgctgccacataaacattttttcaggaaaactaaataagtaaagaaaatcatgagtacacctctgagggaattctcatagggaatataatatcataaaaaactagagaacaagcgggattataggaacaagtgacaagaaaaaatcttactttggcgagaggcaattctgcttacgatctaatgttgttccttcagcaactgatttatttagtattgctttactactgtatgttacattaacatgtcagtctgaatataatagtgcatgtgcacaaagtaataaaggattgacttggaagtttgaaacattgattaaacacttatcatagtagaaagtttgataccttctattttcagacttgaggtttggtggtctctttactactccatttacagaagcctgaagttggcaaggtgaagtagtctcaataaatagataatgccacaaacatttgtgcaaaacatacaaaataacacacacacacaacaaaaagaaagaaaaaaaaaattgcattggagattatttgatgagaaagtaagtacctttgtttttatttgtgaagttgaactagctgcaaacaccttgggtgaagctgttaaatctttcgagcttatgatcttttgtctaaagggtgaagctgttaaatctttcgagcttatgatcttttgtctaaagggtgaaacaggtttactattttcaccagtgcaagaagaaaagtgaatcgacatatggattgattttgcactttttttgtcaaccaaatcttgcatgaaattcttacaccttgaagcaagattgcttccatttcttgtttttataggggtcacctgtttggatgatgtccttggggaagagttggccggcctttgtttgcacgtggaagctgtaatattctgacaaacaacaacctgcattttcaaagagattattatgtttaaatcccaactaaaaacaaaatctacatgctaacaaagaagaaaacaaattcaattttctttttctttacctgactgtgcatatttacttcattcttctcagatagatttggaatttcaattggattacaactccccacggaacattccttttcatccctatccacacacgaattagactcagtttcattggtacaataatcagtattttgaacatcaatttccagcggatcatccacaaggctctctcttttttcaaattcagaatccatagaagagacattgcagttcttctcctcatttactaccgactctgtgacagcttcataagttgtttcaacatttgcagcctcaagcaacgccgcagctctttcagcagcctttttcttataatgcgcctcaaaataggctttcttctcagcaacagaaccaggtttagagtatctctcaacttcttctaagtagcgattttgagtgaaagctgaccacttctcccaggccaggggttctgacataaacctcccgaaagagattgattctcctagcacacgacatggatcaccctgcaatcaatcataaatacacttgctcaaaaatgaatcaaaatcaagtcttcaactaattaaacacacagataaaaacaaatacaatatggtaaacacagtaattaaattattcttccaaaaaaaaaaaaaacagagagagggaaataccaattacataaaaatctcatcaagttttttgctgtttatcctaaacaaaattgtgaggtagaaataacagaggtaattataccatgtagatcaatcaatcaaaagctgaacttgttaaaacaccaggtgcacaggacaaaaaaaattctacatttacatttggtgttcatcttggtcccctgtggctttaagtatggaaattgggtaaaagaaactaagagaattggcttaacgaatatataaaatttgtta

SEQ ID NO: 16017 - DNA, 6696 bp, Cannabis sativa
acgtcaaattactcgtgctgtaccttcaactatatgaggacattaaaagacaataatatttgaagtctctttttcgcctgaaaaaaatatttgaaccctctcaagttattatgccaatttctcaattatgtagacataaagaaaatagcaaaaaaactttttttttttttttttttttttgaggaaagaaaaagctaaaaactttaaatgactatttgcacagttgtacaagaattaattgataatttatatgactcctctcattagatatgaaagctcaacacaaatgaaaaacgataatacaatcggttctagatttagatatagaaaaagaatgagccctcgagctgaggacataaaattaagtagtgttaaggcacatacgcattaaatcaaatcacaatgaaaaacttacccaaccaagaatataataatactaataaataactgatctaatcttcttcatcaactaaggcttgggtagaccttcctacccaaaccgtagatgtctttcgaaattggctgacttgccttttttcatttaaaggggtcgagtatgtcttccacttgctcttccacaaagaagtgcattctttggaattgggtactcatccctcaaagaagttgatgctgtatatacacgcaaatatagctgttgtcccaaatattgtctagcccagaactcagacctcaagttccacatacccacattgtccaatgccacatgtatggcagtccatgacttgggatatacctgcactcaccaattcaagtatgtcaaactcacacattaaataccatatttatggagttgcaactcaaaactatttaagcttatttattttatttggttttttcaaaatgtcttatacctgagtggtgcaacgtgaaactgcatctcggagattgtactgattcctactagacggtgtccactgccccccatccattctgccaccaaataacaaataaacaaagaggtttattataaacaaaacacttagaataagagagaaaatgtacaagtcaattgtaaattattatttgccttacccaacaacaaagaaagagtagccatccaaatgcaagctctgtactatgtcctcattgttttggaagacgaattcaacaaaagttctataatcagctccaagaacagctgtgtcaaggtacaatcctccaccactaggcctatcagcaatgcttcccactcgaaagcctccaagtttgaagaagtcagcaagcttaaggggagtatcacttgggatgaaggacacactgttgaatccatatctttgcttgccgtttatttgtcctgcggaacttccaagtacaaaggttttgaccaagggtatgagtccatagtggtacgacccttgtgggttcggccttggcccacttgctgtaagatttgtcctgaaatcaacttccatgtttagcatacataaaacataatattccataactattgacactgcttaattctaaaattttattaggaatgaactgttctccaagaaaaaaaaactaattacttgcaatcttcatagtcgcttagtatataattattgattattttacaaatttcacatttcatgttgttagagtttaacaaataacacataaatagacgtgcaaatgtggccctaagtgttatgtttgtagattggtttggttgatcagttataatcacagaatgaagactcaacaaacacgggtcacattaggtaggcataataattataaaaagggagaaataaaatggagtacctaatagagcgggcctggttcaaagaccaatcaatttggatggtggggccaccaggaggtgggccagagactttgccagcagaattgctataatgaagaacaccggttgtggtgaggtaattacggccagtggtgaagcgagaggaaaccactatgtagtaatcttgtccaggctggtctgctgtcaccaaaacggagtacgattggcctacgtgtacatccagggatgagtaggtagtctggagtgtgtgtgttccctccacttctaccaacttcattttgtgattttgaatgcggaagtttaaggaattttgaagcccaacgtttgaaattctaagcctgtatgtttttcctgtaatgggaaagtttatgtatttatttatttacaccatgcccagaaatgagggagctttattacactgcatgttaggctaatttaagagcttattaccttggtcaacagtaagagagtaaccattaggaccacggccattgatgagaatgccatcaggagaaggcaacttcctacccctatcaagatgagctttcaaatcctaaacacaaacacaaagtataatcatcacttaaacatccaatatataatcgagtaatggaagacagacacggtcaactcatgaaagggagatattctttaaacgacttggaaagggttgaaacgacaacttttgaaagagttattttatttttaccacgcggtcaatgttaaaattctgctccattcaatactatgaatttaaaccaaacacttcatgacttttttttttttttaatttatgtatatagcatgaactttttttttttttttttgaaagggatgtatagtagagacttaagacaacacaagtgacccattcaaatcaataaatgaatgaaacgaataagcatggccactgacccgccatgtgcaagattttaagtgcagaaaaataacagaagttgccatgatctaaacatttaaaagtcacaattaaaatacagttagaaatttgccccgcgcaccaaagcagtggcaattacaatgatgatatcgttgactcttctcttgtatatatgaaaaaaagaaaaacaatttcaactagtttggcttcgaaggcaagcgatagattattttaaaattttaaaatcttataactgacatgagtaattatgtaatcatttaacttcttcttttaaaaaaacttctacaactattactactactagctaaatttaaattaaatagttatagatgaagtcagatttgatcaaaagcaagtaacatggaaaaaatacttttcctagccgaaaagtagtggtgggtcaactcaaatcattatgggcaatgaacagtaatcttgacttttgcttagtacaaaattttgagaataaagggaaaagaaaattatgttttaccgacaatggagatggttaggaacccagctgtcaaaagacacaaaaagacaaaaacaaactattattgtccatctaagaacatgtttatcacggccacagttaatttcctcctagctagcactgaccacaaaaaaatattattttctaataaacaattggcggtggtatttaatttcaaactatcaatgtacctaaacaaaagtagatcacatgcacataaaaaaaaggactgataataaataaatagtttgtctaaggaaatgtgctaaccgtgtggttggacttgtaccagtccccaataagaactgtgaaatcaccagcagggtctggaaaaggaacagggattctgggcctgctaaggattctaatacctccaaagccaccagcagctttgtgaaatgcaagggaagggaaatagtaaaaactcccaatctgatccttcacttggagaatgtaagtgaaattcttgcctgggggtattgggcatgtggttccccatacaccatcttcaaaagaattcctcctgttttgaattccattcctatagccaaacacaaaacgacattacttctctactagccaaaaatttaagcccatcacctaaaatagttcattattaattgtgcattgatatttgaagtagaagatttaaggcagctaataacaaattaaaaaattgacataattgaattgatggctaccaaatttgcatgtgcaaagtaaaccccaccgtgcaagtgcctcatctcattttttggaaggtaccacatattaattcaatatagaagtcggtggccaaaattaataattgaaaataaaaaggggaaacccgcactattttttctacttttgattttgtgtttggtcttgctgggatataagttggactaagatgtatcaaattaccaggaatcgaggaatacatcgaaattgcaaaaataaaaaagcgatttccttttaacctctcatactcataattctgccaggaatttggattctattcgagcgctctttacctttgtaccagctgtcctttttttccatcaaataataattattttaaacaaaatgaaaatgaacttcaaggtgtcaatgttctaatatttatttattattaatatactaatcggatagatacttaatgtttcctactaaaaataccacattaaattaatcctgttggtttattcaatattaaacgggtccggattgagcttttgacatcgttattataaggacctatatggtttgtgggacccatcttggaaacaaggctttgttttacgacacagatttgataatgaccaagaagacatacgttttcctatatagaaatttcccaatggtggaaaacgagtcacggacagacttttcattttgccttgattattggaatttgatcaatagggaaaagggaatatcagttgacagaaacatatgaaacttccagatcaaaaataaagtcactaaccaattttttttttaacaaaatcacatgattatgtataggcaaaacaatatcataattgaaagagaaaaaaagaaaaggtatcatattagctagacattctcaatcacatggtaaaataatatgaatcacacgattattacgactgatttaggaaaagtccattgagcttacattattctagtctaaatgcttgtaaagtaagatcagcgagtgtaatgtagtcttctagaaatagctaaaagtaaaataaatttatcggttattagagagagagagagagagagagagagaatgatttggtttaccaagataggagaaaaggctcgtccaagctgttgtggacattgataatgagattgtcgttagtaaccgaatgaatatcggggccaggaaattgtccattgataagaattccctggaaacaaacagatcggttccattgcagtcagatcagatcgaaataaagaacagttataataataataataatttaaacaggtacctgttggcgaacaccgagcgggtaaatgtcaccataagtgacattccagtcaaagaatctgtaaggatcttcagccctaacaatggcgaacagagaagtgatgatacatagcagagcgcagagtttaactctcgctaagcttattagcgccatagaaactgaataaaattgttcagttcgtttgttactttaacaatagtgttgtttttggtttgaagaaagaaccaaacaaaaaagaaaaagtagagaagaagaatggtgtgtgtgtgtggatggaagaggaagaaaaacaagtgagtgatggcacgtatttatgtgagtgcgcagtacagagagaaagagaaaagaagagaagagaaagtgttgtgtagccgcaaaaagaaagagagggaaataatatataattttttttagaaaatattataaaatgaaaaagaaaagggtgtcggtgtggtggggtccagtccgcatacactctaattagttacaagttacatctattgtatcagtaattttagtatttggtttggttgtgttgtgtcttccgcacatgggattgtaaactttgtagtttggcgccacacatattttaaattctagattgagaagtttaaagaatggagattatttttgagtgaaaaaatctgttgtattgattgtaagtgtatattactttagttaacctaagtatatacatatatttagattagatgattggtccagatcattttatttttattgtttatttaaatagttgcaaattaaataaataatagtttaaaattcatattttagttaatttaaaataaaaatctttactattcaaacaaaaaaaaatcttaactaaattctaaggcttttttaaaataaaaatctttactattcaaaaaaaaaattctttaattaaattcctaaggctttttgaaaccctaaatttcatatcttcatgtgatgaattgaaactctaatccagaaaaacatgtcaaacattcatgtaaccaaatcctcagtatcctctaatcgccatatccaaacgcagagggaaaagaaaaacaaagagccaaacactaaccccagacaagttttcttcttcgtcaaacccataataccactataccatctgaaaccccaaactcgagactttaaaccccaaatctcagatgttaaacctcaaaccccggatttaagtacccaacctcgttagggacgcgcacaactttacaacagagcacggtgctcgggctttgaaggtctcaaggtagcgacgaggagagatgggcgatgttgtgctggtatgcgcgtcagaggcgagcccccggtggtcgtcattgatgccggagagagaaatggagaatggagcgagagatgagtgaaatcaaaggggaatgagagggcttagggattttggggccagggagttcgatttggcgtaagcttaggacaatggtgaccggagatggcccgtctgggctggccgtgggggacgacaacggctgagaaccagagcgaagggggaggcagcatgagagaaacatatttg

SEQ ID NO: 16018 - DNA, 3837 bp, Cannabis sativa
attagtaggctagttctggagtgcacttgtatcaggcttgaatgtatcaagacttatatgttttgcctctttttggggaaaatatttattttatgttttacggtgttctttcactagccacagggttatccctttggctagtttttttcctttattttttcttagcattgttgattttatcgttttggggttgcgtctcttgtggtagtttgtctttaatttatattcatagtttttcattgtggtgttttctggtttgttatgtcttcaggaagtatctctgtattacaagcggagactttggcacttttgtttggacttaattgggctctttcatgcggaatccaaattaaagaggttttttccgattctttgtctctagtcacagctataaacaaaggaaaggttttttttcaacgagctgggtgtgttatttgaggatgtcatagctttattgtctaaactcccgggagcagttttgtcccatgtggctcggaatgcgaattctgcagcacatggtttggcaaaacatgctcttcggttagacaatgagtatcctggttcgaggaggtgccgccgccgattgtggattgctgctttatcaatcatgtgtgatttggatcaccgcgtcaaaaaaaaaaaatatcgagtctcatataattcaataagtacttttatacctaataagtttttttaaaacacaatgatgtatacataattaatcttaaactatacaataaaaaaatgatataattcttacttaaactattcatgactaaaattagttatattatattatggggaaaaagtgtgtgtctagtattttaatacaaagtttgtcacaaaagattggcactacatatgctattacaaaatatattaattatttaattgttgaaagatgccttgagggtggtgacgaacatttaattataagctaaatttgttcaagaagatcattaatttcttgataatatattttaaattgcttttgtagctagccaatacactgattgttattttttggtgttgccgggtttcatttaacacactctaacgtgttctaaatgaaaagtgtgataaacatttgtatttgcttgaaacgtaccaacctggaataaaaaaaaggttctatatataagtgtcaaaccgaaaacgaatgaatgagaaacaaaagcatgcacctagattagtattaatattattattataattaatattaatgacattgcttctactaatatatattaccaaattaacaatacctctttcttactattaattaattatttttttattgaaaattaatttatgatatattactatacttatatgttacgtaaaatttactctgagtgcgaataatttgaaattgaccaaattggcaaagacagttatcgcctctttggaccacagtagcagtatatagcatagtacgtatgagagagagagagagagagagagagagaggctaaagctgtataatccgttgatgaatgggtagctggggcccattactgcatacttcgatcaatgaaatccgtacaccaaaatgtacgctaaaaaaatcaattatttaatgcgtcgacgtttgtttcttctatccatttttatctcataatttataaaataataataataatattaataatgttattgttggctttcacgaagaaacaactcatggccacttaccaatgatttaaccttttattttttccttgttcattttttatatgttaattaggttagaccaataagaaatcttccttactgataataacagaaaaccttactataagaacaaagcgtgtggttttgcatctggttttttggtttattggaaataaaacaactaatgtaactgtctcaattatttttacaaaattatatatatgtttcttaaaatgtcataatattaagagtatgaaacgtgggacatgactatatgcttgatacataagactcgtttttcataattattaattagtgtatacatatcctaatcctaatgcgacacctatctacgttcacactaattaaccgttacgatatcgccacttttctcataaatatacgttataatttattagcattttgcttcaaacattgaaattattagttgtgaatatataatttaatgggaaatcaaggcacgtaattaatgatgaccaatcaaaacaaggataagctctaatgccacaaccactggccagtagtatcactttctttattaatttcattattttcttaaacatcactttctattttcaattgaatatttatatataaatagcttagattggctgtagaatatttaccacctaaattaatttaatattttgtgttttttttatataaataaatgaaaaggagatgttgtcaaaccaaaaaagcgcgcgtgtgtaatttaagcagtaagcgttacgtgattgcatgaccttggcgggccttgcatgattattcatatcctttggcaggggaaggaggtttcccactcgcggaggctgtggttataattacacgctctctcttgatttgttgttgtttttcacgtggggtattttcggtaataccagtgagtgggctttatgcgagagtcaaactaagaaacgaaattacgaaatacccctcggctcttccgaccgttgggcgagagtggcaagggaaccattgggataaaatggaattttgcgcatgtgctaacgacgtcgacgaaaaagaagcgagtgaatttaaatagtaagaattgattttaattaaattaaattaaaataggtagtagactcagacgacgccaaagaaatagatacaacactctcggacgtgtttttaaagcctcttataaataatgttatggattaaatttattttattttctctcactacccaaacaaatataccaaaaactatttttcatctctctcaaaatccctcctttctctctctctagctttgtgcagtactatagatcaggttgcgaagaccgtagtctggattatgctcttttaagagctctgatggtggtgctggatttctagggttttatgtaaggggtttttatttatttatttatttttttctagagactcgagtgagacttgtacgagcttcgatgtcgactgcttcgtcttcgtcgccggctcctaaggtctgctacaattctgagtgtaaggaattgaaaccggagcgccccagaaagggatggcgcctccgcagcggagagttagctgacctttgtgatcgatgcgcgtaagtacacttttttttttggcagttttatctgatgttttgttttgttttttttttctccctctttgcttgaactgtgtaagtgatttttggtttggtgctctgtctgtttgagtttgaatttcggcgaggtttagggttttacttgtggctattgggaggaattgactaaattgagagttggttttagtagtgttatgcgccggtttggtaatggagattaggtctgattaaaaggtttatttggggagttaagatactaattttcatttttacttcttggttttgcatttggggattcggagtgtatcaggaatgatcacgggtcttgaagaagtttgccttatttcaatttatgcgaccctttctctcttttttaattaaaaaagcaatggaaattcactgtgatggttatttttcacctttggaaatccaggctccagtgaatgtggagaagtgtagatgtgaaattttgcttgtaattactatggctttcacttggtttaggtatcgagtcaactccatgtgtattgcttctatcctggcaaaattaattattacaattacaaatgtttttcttttctt

SEQ ID NO: 16019 - DNA, 4443 bp, Cannabis sativa
tttgctttgtttttttttttttggtcaaaaacctccaacaataatttgctttggttataacttaataaaattattaaactatttccacgtataataaaaacaaaataattgattttttaatccatttatctgcttattatcttaataaatctcttcctaccgaaataaatctcctcttatcgtagatttttttttaaagttaacagaaaaagaaaaggaacctattctattattatttttcatattccaaaaccaaaaacactctctttctttctctaagaaaacacttctttctctctcaatctctctctcttcccatagagaaagtcatgaccttttatttattgttataataatagagcgggtattttgcaatcttgtatctcttttcttctatttttctggtgcttggtggttgcccctataatttctctttgtagtaactctctctctctcattgtccattttcccaaccccatctctatctactcccactaaacacattttttctccatttgggagctgggttttattttttttctgttctttttctttccaccactggtattgtgttagctttcaccagagaaaagagagagtcagaggaagggtgtctttttctgtatgccaagttgccgaatgagctgttctgaattctctgcacattttctctgccttcgtttggctattttcgcatgagtttcttcggttcattgggttgatccaagaagagttatttcgtttgaggcgctctggtttttgactcaagatcacaactttgagacactcttttgagaacaactttgagacactcttttgaggtttgaattagtagtatttggaattgaatggtgttctttctttctttattttctttgaatttttgtataccttgttcagatatcaagttgggtttttggtgaaaaaaaaagtgatattttgtaccatagatctgctctctttatccatattctggccttatacttttctatactatttttatgattaaatataaataaataaaggcaagagcttgtacttctctatatataattattatattaaacaaagcgaaagaaagttgtttttctttaccattcaaggaaagcagctgaaaagggtctggtattgaatttcggattggttcctggtgggggaagaattttattcttgtaattttagcataattcaagtggtttcaaggcgaatttgttggttattctgacaagtgacacctgaaagcaaaagggtatctggatttggacaatttcttgcggttactgatcggaatacaacagcttcacgatcaaaaggcctattaatttgaatctcaggctttgagctcaaaagggttctctcatagttgtgattgaagagtccaaagctgcaattttgtaaagatttttagctcttagaaaagagaaaaaagagagcttttttttttaaggatcatcaccaagcttttctgacggatccttcaattgaaaataggggttgtgattgtttggctggtctggagtgcatattaaatataatcagggccctgagaatggggtcctgcttatctgcagaaagcaggagccctcgtggcagttcaccgttgtctccctcacttggggtcaggaaaaggaagaactccaaaaagaaacctgggtctcgaaactcttccttcgactatcggagagaagagccactgcacaggattcctgggaggatgttcttaaatgggtcaagtgaagttgcatcactttttactcaacagggcaagaaagggaccaatcaggatgccatgcttgtttgggaggtaattatctttttctaaaaaaaatggtcatttctactcagattattattaatttttatgtttttagatattcatttcatggtatgcttgaatatattgaatttactttggtatgcttacagaatagtatgcaaaacagtgggctactaataaaccctcatctttcctgaattatagagtttccacttgaattttcgtctgcaatttttaggttaattggatattaaagggatccgctagttttgtttttttttttctctgtctgcatcttgtaattagtaccttactcttttgcctttttttgaatatagatgtattctagtactgaatagagggggggaaaaggactactaatttgtaataattgactgcagtttgttccaggaaaccatgctttcatggtagcaaagtgaactcttcttttctttttatagtttggaaccattgaagtctttttatatttaagtacttacccccctttgttgtattaatgataggttttgtgttactaactaaagttcacgttcattgtttaaaaaaaactaaagttcatgtttgtgaatagtagcatccatttttgtttttgcttctttgtctttcataatcagtaactcttttcaatttgcatttcagaactttggttccagaacagatacaattttctgtggtgttttcgatggtcatggtccttatggtcatatggttgcgaaaagagtgagggattctcttcctctaaaattgagtgcacactgggaagtgaacataactagtggcgatgttcttaaagagatcagcctcaatactgcaggaagcatgaatccagaagatacgacaactctagcatctgttgatgaagaaccgaggacccccattgatatgggggaagcagaaaagcaccctgagatctttcagacgctgaaagagtcatttttgaaggctttcaaagtcatggacagggaactgagaacacaagcaagtatagattgcttctgtagcggaactacagctgtaactcttgttaagcaggtgagctaatagccattagaaaatcattttttgctactttgttgaccttttggaagattcctcttgatcaccatttagaatcacatttttggttactttgttgaccttttggaagattcctcttgatcgtgagctgattttctcctttgtagggccgggatattgtcattggaaatgtaggggactcgagagcaatactcgctacgagagacattgacaattccttgattccagttcagttgactgtggatctcaaaccaaatctcccaggtgattctcccctgatttctggacatagaaatgaatgttgttccttgactaacatcaggagcagctactaacacagatttcacaattatgatgctaaagtattaacaatattaatagttatttgctctggtgctttcttgcttgaaaaaactcaatggtgcggcatttttttttaaataattagtattaaccgttaaatgccaatgatggatcagaaagtgtctttggttattagtagcatacttgcctttttgttttttgaattgtaatactttctacttaaatatcatttcagttttgttcttttctttgctttgcagcggaagctgagaggattcgtaagtgtagagggcgtgtatttgctcttcaagatgaacctgaagttgctcgagtttggctgccaaacaacaattcacctggccttgccatggctcgtgcttttggtgatttctgcctaaaggattttggtctaatctctgtgcctgaaatatcctataggagaaccactgagaaagatgagtttattgtcttggctacagatggggtatgccattttttttttaaagaaaaacttgcttcactggatgccatttcctatgcttccaatcttatccctacaaacttacttttctgttgttagatatgggatgtcctgacaaacaaagaagttgtagacataatagcttcagctccatctcgttccacagcagctcgagcattagttgagacagcagtgcgagcttggagacataaataccctacatcaaaagtagacgactgtgctgtagtttgcctcttccttgactcagacaccaacaatttgtctgttgctgcaaatactaggcctaaggaagatggggttaactgtgcagctgagaaagaagaagatatctcatgtactactggtttggaccggtcaggtactgtccgaacatgtgaagagattcatccagaagatgggtcagatgtaatgaattcagagccaggtaaggattggtctgctttggaaggagtttctcgtgtcaatacattattgactctgccaaggtttgtgcctggtgaagatgaaaccaaaccccaaaaataataatacaagggaagaagaagaagaacaagtcagttttaccttcttccctggattatttttttccttaaaatttttgtttcctttttcacatttttctttttcaatttttattattttctatagatgggaattcagaaaaatatttgtagtgccttcaatgttagaacttggacaggagaagttggcccggctatattagcaatgtctggggaaagtgtcctctctcttgtgtgggtaggattggaatttttgtaaa

SEQ ID NO: 16020 - DNA, 7236 bp, Cannabis sativa
tctattactaatactattgtcaataacgacgtcgttttaatattacgccttatcgttttgagaggttagatccatttgaaacagagatctcagctcagcacacaatagaaaagagatctttcttcttcatcatcttcagctcacacccaaattgatttgattcgattcaaagagagagaagttttgaattcaatctcaatggaatcggcagtagaagaagaagaagcttccgtacccatggctgaacagctccaccatacctctctcaaaaacacaaccttgctgtcctctattggtaatggtaatggaaatggactcgatgctactgctaacgatcgcgatcaagatcacgatcaccttgtacagactgtctttgaactaggatttcagaatgaatatctcaagtctcagttccgaggctttgctgaagattctcaatttattacttccgagaacgatggacaagctattgtacagcttcaggaaaccatcgaatctttgaatgcacagctttcggaagagagacttactcgtgtggccgcagaagaggctttgaagcatcttcaagtggctcactcggaggctgatgctaaagccctagaactctctctaaagcttactcaaggtctgattttctttctttctttctttgggttttttgatgtgagagatgctacatttgcactaattcttaatccaatctgaatctttagcactcttttcgattttttcacagctcaacagaagtttgatcaagaaattaaagaacgtgacgataaatatgctgatcttgactccaaatttaaccgtcttcacaaaagagccaaacagcgtattcaagatgttcaaaaggtaaatcatttttacaaagtttaaacaatttccattagttcacgactgtgactgaagcaaatttttttagagattagaaatttaaagctttcaactttaatcacacttgttgtaactacaatcttgtttgtagagttcatattgggatatttatgcagaatttaaatttgaatgtctttggggattgtaattttcaggaaaaggatgatcttgaagcacggtttcgggaggcaaatgaatcggccgagcgagcattatctcaacaagcgacattgcagcaggatctggagcgtacaagacaacaagcaaatgaagcattgaaagcaatggatgcagataggcaacaattaagaagcacaaacaataagtaagtatctacttaacttcttttcgatgtatgcttaaaacacaacgataaagaataagaacaaggagagattgtgtgcgtattttgagggatctgctgtttccatttgcctccactggactatttagattagagcataagaatagtgatcgaatagtgagcatttgaattaaattctataaaagtttcttcatattgtacgtgccacttcacttatctgccaactataactatgttgttgacatctagactccgggacaatattgaagaattgcgacattcattacagcctaaagagagtgctattgaggcattgcagcagtcgcttctagagaaggatcaggtatgaaattgaacttttgaaacattttccatggatctaaaggtatcttgcatgatttggtgtatgtttatctatagtggcgataatcatatatatgatcaatctttgtctattctttgttcaaattccatcttgcctccacgttattaatgtaccagatgtttttctcatcccttccatctatcacatggatggaactttaaactcttagagaaccaaattattcagttttcgttattagaagttttattttcccaatcaatatgtgcaaaatttggccagttcgtttatgccataaaaatttcagcacatcatcatgataaagttgtatattatcagcttgatttttcttgtcagttgacacttttatttaaccatctgctaggcaccaatagagggctcacacgatcctagagccgtgaaattcttgtttatattccctttgtgtcttagttcttttactcgtgtagtagtatgtatattatgtatatattaacccacattaatctcagatgttggaagacatgcaaggattgctacaggctgccgaagaaaagcggcaagctgcaatagctgaactcttagctaaacatcagaaggttcaaagatttgaaaaatcagtctattggttattaaacttaaggcatctttattatgccttttgattaatatgaacgataatggtggcatatttttaacttcagaacttggaaagcttggaagcccaacttgctgatgcaatatcagacagaagtaaagcaactgaaaccatttcttctcttcaggtgagaaataggataatgtccatttcatgtcaagttacataaggattttaattttatatttttggaatgagaagctcagttacaagggtggagtacaggttaattctcttattactttaaaaacttatacaataattggatcatgttcaagactagtgaaattattttccttcagatgctggttgcagagaaggaatcaaagattgcagaaatggatgcagcatcaacgggcgaagcagcccgactcagagcttcggtggaaactatcaaaggagaaattgctcacttgaaacatgagcatgtgagtattttatcattcaatattaacatgagcatgaatttaacattcaattatattggggactcaaggatgtgattttatttagtttttattaatttcacttttgtgttcattgctgaactggcatttgattcttcatatcctacttttactcttagtaatttttgttttactgtttaagggttacttgccttttgaactgacttcaggggcatccttgaatcacaaactttggggatgcagttctttctacatttataatattggatcacttcttcttgatgttaatcgagttgttggaaattggtttaagacatttacttttgaagatatgatttgttttagtaaatgagaaggggagaaagtattgttgaactgacctttcaagtcatttaccaattacagagtgagtttgtacttaagcatatttttctttttcaggagaaagaaaaggagagctgggaagctacatctcaggcacttaaaacaagactggaaaattctgagaataactgtatacgtgctgaagttgaattagctaaaatgagaagtatatatttatcccttctttagattttatctactgacatgaatatatgtataatagtatccctgatttttttgatggggcaggccaactggaatcagatttatcctcacaaactcaagcgctcaatgcaaaagatgctgaattagaagctgccaaaaatgaggtatctagaaatgaccctgagtgcttgatataaccaacttcagtgtttacctgagatatttatgcacgaacatcaagaaaatattaataacctgtcaactaataacatttaccgtagcaaagacatcaggatgctctcgcaatctttcctagttaactaatgtattgttcataatttcgcaatattaggtcattgaatctttccttgggaaaatggaaattttggttgccctgaggaatatttgcttttgttcatatatttgactttctaagaacctttcttaatttgcagcttacttacacataaaaatatataaaactatcttctgattccatcttcttttaatttgtttataccttgcagatcaaacgccttgaagctgacttttcctcttacaaaatccgtgctcatacacttttgcaaaagaaagatgcagagctagccgccggtaaagattccgagcaagtcaaagctcttgaggaagcactgaaagtacatgcttgtactaatttcaatttctgtattttaaatttttaataaaaacaataaacgtgcagctctggctaataatcacatctatgtcattctttaggaggctgaaaaggaagtttcattggtttgtgctgaaagagacagagcccttcaagatcttcaagaagctctggctaatcatgataaagaacttgcaggaaggtagaattgttgctgagaagctgctgaatgggttttttgtttgatccaagtttcctagtttaatgagtttcttaaagaaagcttttgttatgaaattgtatatttttttcaagagtttaatagtctatgatatgccttcagatattctttactttcatcacttcggtaaagatttattaatattatcctgtgaattattttgcaatcatatccaatttttcaattccattttttttttttttggctcagagagtcagctcttattgatgtcaagcagcagataaagagcttagaaacgaagcttgattccgccaatgctcgcaatcaatccgacagagaggcatgggaaaggaacctccgtaacttggaagaaatgtggcaatgtatatatttatatcctaatccaaatgaatttttttaaaaggatggggcaattgcatgtagctcaaaattgactgaaaatcatacctgataaataactttgcagcaagatttgatgcgttgaaagttcaaaatgaagcatcgtccggagaagatctagaaaaggaattaggagatctcaagctgcggtataaaaaactaaaggtacttcacatccttctgtcaatggctttgacatcaacaatgacttcctattccctcattaactgaattcttaaactgtaggaagaacaccattcatttcgtgatcttgctgataaaatgattgaggaaaaggataatgaaatctctagactcacagatgataacaagaatcttcagcgatctctggaatcaagaccaaaagtactcctttaagaatattcatctaacctctattgattatagtttttctttttctttttttcatttctcggtctcttctaatgttttaaccttctgattatgtactggggaaacaggttgacaactacaactcaggtaggaagacagtctcagttgtatttatcttcttttcgtttacttgtcttgtaggaagtcctatcctatacattgaattattggatgtagcatgtgatttctaattttgtattattacaaaattgtgttgtcaggcttgcagaaagaggatgcatctaataatgcagcagaacagcagattttggtatgaatgtattttcgtatgcttttgtagttataaaaaaataactatatttgctattgaattttgttttctttacatcctttccaagatttaactcccaaatcattaagtgcattccgtgacatcaatttttccttcaaaatacagattttggcgaggcaacaagcccaaagagaagaagagcttgcacagtctcagagacacattctggcgcttcaagtatgtatcataatttacacacgtttagtttttttgcagtgcagttctaatttatgtcataactcaggaagaaattgaagaactggaacgtgagaatcgcctccatagccaacaggtacgtatcacttatcagaaagcctggatcggtgtagatttcttcttttaatacttcttttttgttatttcccctgctatgtttgttttaatttatttttgttatttaataaacaacaactacaggaagccatgttgaaggctgagcttcgcaacatggaccgaacacagaagagggaaggggtggatttgacatatttgaaaaatgtcatcctaaagcttcttgaaacaggtatttgggtgaatgattgatgtatgaatctaaaaattaaaccgttttataccctctcattttcttcctaacagtgtgctcaactaaaaagaatatttcattattttgagattgaaaaggcttattatagtctctattgttgaaacacaggtgaagtggaggctcttctgccagtgattggaatgcttcttcaatttagtcctgaagaggtgatatactatacttattgcattggtatcttataataacatgctgttgttttaagcatggaatttatttagtatgggattagtcaaaattgtgagtttttgttatttggaaggaaaatccgttgatcacagggggtgtagtagtaaggttcttctttctagagaatgaaagatatcatacttctttttaaactataagatatcatatgggaaattacaatagcatgagcaacatttgagtcaatgtgaaatacaattatacaataggttttaataacccgatattatccatgtcctgaattactactggtgttcatttgctaatgcagatacaaaagtgtcaacaagcctatcgagcatctgcagatgctgttccaagcccatcgggtgatgcttcatcaaaatcttctggctctcttttctctagatttgcatttgcataattgcaaaaaggatacaaagaattctttcgttgcttgtctattgcaatccagggcagcaaagttagctgcttgttgcctttggaggcggagcactgcatgctgtctcattatcaacatcagaagagagttgtctgtcttggtacaacgttatgcaaaaccacaggaaagtgtaaagagagattggcttacataaaattttagaggggggaggaagtaacattttttttgacagtatgtatttataatgtccaagagaattaactatcgtaaagctgattctttgatttttgacaattattttttagtacaggtgaaaaatgcttatagattttgacatagtattgtttggaaataagaccaatatagaatgaagggtactattcagaccaattaagctcagtatagaaaccccaagtaatttggacttgaggagtggctctagattcgatcatagtcttcattgtgttcataatgtataatattaaactgtcttatatgttttgaccattatttgtacactcttctcgcactacttgttcattgtgaacctttaatattatttgtggcaagttcaattcatgttgatgaggattgttataaagcacacgtactgtcgagtcgactataatatctataaatatatacgtggtaaaattgttgacaatgatgcaaaattcgtacaatcttaatcaatttgtcggccaccatttgtaatataagaagaataatttagtctatacttttttagcaaatagttgtaaattttaccctaaaagaatatgtttctgttaataatagcaataaaaatggatattttctgataccgactgagaagtatattcccttttggaactttttct

SEQ ID NO: 16021 - DNA, 7250 bp, Cannabis sativa
ctcttgttgttagtacataaaatagtggctattaactattgttttctgtgaaggtggcttttacatgaatccaaaatgccgtaacattgatgtttcagatgcatgcctgtatataaaaacaccatttggtagcataaacttgtcagataattcatagctttgttctagttaacaacattttatctaatgaaaacaatttgggctcactcatttttccatatagtttttatgtaaattactcattgtcttatgttgcttgttcatttttgttttagaactgttttgagtcactaagttctttatcaaccatcaacaactctgaccattatcctttttaagtttgtgggaaataatttggttgggtagtatctaggttgctttattttgttattttgtatgaatatgctagactaagatgtgactacatgacatatgggctttgatgatgatcgacatgctagactatttgaggtcaatcgctatgtgttttgaaactgtttgattgtgtgcttagcttatgatacttattgcgaatgttgttatctcaatcttttgatcacttgtctcttgcatagtgtgattgagtgggtactgtagagacttggaaattgtgataacattgaaaaaactggaacttgcttgatttacttgctgaggcaaaatcctaaattggatatgattgaggcattttcttttaaatgtttgagtcaaaaagctaacctttcatacattatattaacctcttttgggcctaatattatcattttagtatttgccatttaacccatatttagccttgtattgtaagttctcatcttgattaacttttacattttaccctcttttgcactagaaacataggttgagttgtattgaatgaaaatataaaagtgaagtaggattggggtttattatgaaagtgttatttttgaaggttttatgtgttaattctaatgaagaagatgagttactctccattcgctatgtgttgcaatgtttcttgtcacattgactaaaccttggcatacaatttgaatttggtgttttggtatatatctgtccaaattcatttatgcatttttctttatcaaattattttgttctgggattgtttttcgtaacatttttctttcttatgcataatgcataacatgttttcctctttgttttttatacttatattgtatttctttgctatcaaaaagttgtctagtttattttgacattcaccattctaactcatttacttttcaggcttgaggaacttcaagttttggatatcaaatttctttttgggtgttcaaagcccacaattgtagttctttaccaggtcctattcattctcctagcactttgtatgaattttatttgttgttgatatgggtttacactggctcataattatattcatttattgttaatattgctgctgctcatgtatcttatttctgaagatttgaatataatgtgcacaactgcaggataataaagatgctcgtcatgtcaaaacgtatgaagttgctttgaaagataaagattttgttgaggggccttggtctcagaacaatcttgacaacggagctgccatgctaattcctgtacctcctcctttctgcggtgttcttattatcggagaagaaacaatagtctattgcagtgctaatgcatttaaagcaatcccaatcaaacctgtaggtcacagatattctacttattatgctaaattttataattgctgaccatgtaatattgtggttaatttttatgaccgaatttttctgatcttatagtccatcacaagagcctatggaagagttgatcctgatggttctaggtatttgcttggtgattacaatgggctacttcatctcctcgtaattactcatgagaaagaaaagtgagtgtgacttggctaacgcacatcctttttattaatggaaagatcagccaagtcctttggctaaggcttgagtccttgcttgatgtactatattctcaggattttcttcattattgtagggtcactggactcaaaattgagcttttgggagacacttcaattgcatctactatatcatatcttgataatgcagttgtctttataggatcaagctatggagattcacaggtgcaatactgtagctcttgaactatgttacataaccatttgttttgtaaactcgtgcctttgtctaaattttattgtgaggttcattttctgaagttctgaattttttatgctgtggatatttatgagctaccaattttctaccatttatgatatgaaaaaacctaactgttatctgtaatgcatgatttggattctggtactctgcaacatgtttaattctatacagttctcttatcatccgtaatattgaatgttgacactttgtatttgatgcaaaaccagcttatcaagctacacatgcaacctgatgccaaaggttcatatgtcgaagttgtggaaagatatgtcaatttgggacccattgttgacttttgtgtggttgatcttgaaaggcaaggccaaggtcaggttgtaacatgctctggagcttacagggatggttctcttcgcgtagtccggaatggaattggaatcaatgaacaggtttggcttgtcttagagttgttttctctagcttgattagtgattcactttccttttatctaagtcacaccttgacttgtatttttaggcatcagttgaactccaaggtataaaaggaatgtggtctctacgatcttccactgatgatccatttgacacatttctggttgtaagctttatcagtgagacacgaattttggcaatgaatcttgaagatgagttagaagaaactgagatagaaggtttctgttctcaagtgcagactttgttttgccatgatgctgttcacaatcaacttgttcaagtaagttattttttctggttttccttttttttttctctaaaaaaattatttatgctataattatccccttgatgggttcattttctttttctatgttgttgataactcatttttattatttttatatatttatatatgtacatatataaaaaaaatgacaggtcacttcaagctctgtgagactggtcagctctgaaaccagagtactaaagaatgaatggaatgctccatcaggattttccattaatgttgccactgctaatgccacccaggtattcttcatactttctgcttaataaattgttcttattttttttcttttgtgtgggtgggggtatttggaaattacatggaggctctaaggagcttgggcatcatctaattctattgagaaagcttccaaagcagctgccccactattacttgcataaaacttttggatggtgtctgattgaaactttattattcatggcaggttttgttggcaactggtggggggaatttagtgtatttagaaatttgtgatggtttattgaaagaggtaagccatttacgattggattatgagatctcatgcctcgacataaatccaatcggtgaaaatccaaactacagcccgctagctgcagttggtatgtggacagatattagtgtcagtatgttttcactgcctgacctaaagcttattacaaaggagcctttaggaggagaaatcattccccgttctgttctcctttgctcctttgaaggggtaagcctgtgctcaagctttctaaactaaattattttaatactgctcatgttgtattcgatgctaatatttaaatgcgtcatatgttcaactactgatatgaccactccaaagtgttaataatggtatgtgttaagcctgtctggttatatctagaaaagcaccctcacgaacaaactcttaatcattcttttaactctttcggagattgttttccttttcagatatcctatttgttgtgtgctctgggagacggacaccttttgaactttctgttgaacacaagtactggtgagctgacagacaggaagaagatctctctcgggactcagccaataacactacgcacgttctcgtctaaaagtattacgcatgtatttgctgcctcagatagaccgacagtcatttatagcagcaacaagaaactgctgtatagcaacgttaatctgaaagaagtgagccatatgtgccctttcaactctgctgcttttccggacaggtatctttctccagccatttaagatttatcgctctagcccagtgaaaagtgttaagcaaacagtgttagacccatctgcaattggccagtgttttatggttctgcaaaatgtgagactaattagtatctttttcccctctttctgtgtgcagccttgctattgcaaaagaaggtgaacttacgattggcaccatagatgatatccagaagcttcacattcgttccattctactaggggagcatgctcgtcgtatctgtcatcaggagcattcgaggacatttgcaatatgcagcgtaaaatataatcagtctgctgcggctgctgatgattctgaaatgcactttgttcgcctgttagatgatcaaacatttgacttcatatcaacttatcccctagatacatttgagtacggctgctccgtacttagctgttctttctcagatgataatactgtatactactgtataggaactgcatatgttctcccagaggaaagcgaaccaaccaaggcaagatggccaagtttatactttaattcctctgattatcaattacatttttttttcaaaattgaaaatttcaaatcttttattctgaagtggaagaaactgatgaattttatcttcgtgtagggccgtattctggtgttcgtagtggaagatggaaagttacagcttattacagagaaggaaaccaagggtgctgtgtactctcttaacgcctttaatggtaaactacttgctgctattaatcaaaagatacagctgtacaagtggatgcttcgggatgacggttcacgagagttacagtctgaatgtggacatcatgggcatatactcgccctctatgtacagacccgtggagatttcattgtcgttggtgatttgatgaaatcaatatccttgttaatctacaaggtaaggccaagtgtagtacaaaactttcttggctcttcaatcttgattatattttatatgctcattttctctattcatttgtattcagcacgaggaaggggccatcgaggaacgggctcgagactataatgcaaattggatgtcagcagttgagattttagatgacgacgtataccttggagctgaaaacagctttaatatattcactgtgaggaagaacagtgaaggtgccaccgatgaggaacgtggccgacttgatgtactaggtgagtatcacactggggaatttatcaatcgattccggcatggatcccttgtaatgcggttgccagattcagaagtgggtcagattcctaccgtcatttttggaaccgtcaatggtgtgattggggttattgcttcccttcctcaagaacagtacgtatttctggagaagcttcaaacaagtttgaggaaagtgataaaaggagtcggaggtttaagccacgagcaatggagatcgttcagcaatgagaagaaaacagtggaagccaagaatttcttagatggagatctaatcgaatcgttccttgatctcaaccgtagcaagatggaggacatctccaaacaaacgggtgtttcggtggaggagctgtgtaagagagtggaagaactgacgaggttgcattgaggttttctttcttgttatgtggggagttggttgttcatttgttaattctttgttcccttattttgtaacatttctataattgaaattcctaagaagagtgttgtctaagatatattttctgggtggaaccatagagatagagatcatgtgtattgtatatttatgttaaatgtgtgtacctggattctaatggttttactttgctttgttttttctcttttttctttttcttattatcacaattagggtgtttattagtcattgagaaaaattactaaccttttgtttttaatgtattgtttattaagagagaggagatgagattgagaggcactaaccaacttttttactaagtcctctgattttgtcgctctctttagaggtgcagtgcgggttgtaattttttttaaactaaattaatatgtaatttttttaatttttcaaaccgtaattgcgagattttagaaccacaaaaatacggtgtagtgaggtgcagtttgagcgatttacactatcattattattgaactataagttgtatcaacacaaaaaaaatcttaaaatttgaatatcataatatatatactaatcatcaagtcattatattaaattctttaaaaaataatgcaatgtataaaaattatattacatatatttagtcttatattaaaaaatgaacaaaaattatattataaaaatttattactttgtaatatatagcacggtgcgttttgaactgtaattattaaattaaaaactgtaaattgcactacaccatgcgatttggaaaaaatgcaaaccgtaaccgcaacacaaatgattgcaaatcatattttttatacagtgtgatgcagtgcgagcagtttgtgcagtgtgagcggtttgatgaatatccttacctctctcatttattaggaaaatttgattttcttatacttaaaatggcatcatgaagagattatgtaatatagttttgttatagaggtagaaactggtttcttcatcaaaaaaatattttctggcgataatgccgatttcgatgactttttcggcgttgacaacaactccgatgactttcctggcgccgactgctactccggtgacttttcttgcgttggcagcaaactccgacaccttttccggcaccgttgataactccgacgatcactgtagtttcatttgttttatttttcttaaaaaaaatatgaaagaaattttaatattttttatggtaattcaatctcatatgttaaattttaattttaaataccatattttttcctattaaattttcttaccatactcattaactagttttatttttcccatatttatgtaaaattgggttgtttagaagttcattgggttgtaggcccactttgctatgagtttcattctccttaccttttcaaatgaagtttttacaccacatactgaaattttaattttttttcttttttactgtggagcgaaattttttcaaaaatattgtat

SEQ ID NO: 16022 - DNA, 2428 bp, Cannabis sativa
tacagtttttatattttcttatatacaactgacatttgcaaaaacacggtttttcattttttaaatttttttggttgatcttaaggaggaattaattcttttctgtttctttgattgtatgtatgtggatggttcaattgcttaacgtattatatgtgtgtattatattaggatagtgttattttatgtcttaatgtagagattaatttataatcatctatcacactagattaaaagaagaagattacttatattattgagttaaaaaattgaaattgaatccctaattttctaaatcattgttatttttaatttgtttaagtgattaatttttggtatttgttagtgattcaaaacttcaagtatttatttactaaataaaactaaattagattcaattaatcagtaattagtaattagttacaattttagtagattgactttacttacgtgagaaattacttagaaaataatacatttacttgcatgttgaaattttcacaatagtccattaaaatacctctaacccaatcaacccaactcatcattgacactcctactccacagtacagtctctttcgcgttctctctttctctcccatccttcattttatctcgaaaccaaaaggtggaccaaaacgcaaaattgagtttgatttttttttttttttttcagttggtttatctcagatttgtggggtttttcttttaattattattttggatgtgagtttatctcagatcgaatttggatttcttttttttttggagtaggttgtattgttaaaaatcgaaattattttaaataactccttaaaaggagtttatcgatgcacctctatctatttttccatatgagagaatttttagttcgattttttttcatggttgtctatgttgtatataagacatcctgctaaatttagagaaattttaaaaaaaaattaacacgatgtaaatagggtttaataaatctgttgcacgtgagactattttattttatacgcgtgtgaaatagactgtttgaatcctatttttggtgtgtaaatatatcctaaataattacagcttagatgactgtataaaaaaaaattagactaataaattctttcaaatgctgaaacaaatagagaatgtatcagtgagcccctttttggagtgcattgtagaattttttgttaagttatactaaaaatttcttaaaaataaaattctactaaactaaataatattgggtgcttctacaatagacctccttaaaaatgatacgttgatgaaccttctaccaatttcggtatccagaagaattttttagtctaatttattttttcatattcatgtatgttatagttattatatcatacaaaagaaattcagaataatttacgatatagaaagtagtgttcaaataatatattttcacaagcgtataaaataaaatagtcacacttacaacacactgtttgaaatatatttttaacgtgttaatttttttcgaatttctgaaaattttacaggatatctcaaacaattgtaacgtacgcgaccataaagaaaaaattgactaaaaaattatttcagataccaaaagtgataaagatgcatcaaatatattgtagaattttcataaatttattttagtaccatcaacttaatattttcaccacaataaaaaatttaaaaacaaattataataattaactaacaaaaggatttcattattattaataaatagaagataagtgtcgtcataagcataacttagtgattctacattttttctcaaaagaggatattccaagttcgaattttcctttcccattatacaaataaaaataaatagaagataagtttattattagtgaaataaattacaatacaaattctatcaagttgtcccaatgtatagggagattattataattaacttaagtactattaccataatggtaattaatatgggattggatctataagtaaagcagcaatgctatctttcaacacctttccaacatgtgtatattggtcaccaccttctctgtacataaaatcagctgtcttggtcaaattaataatacgaaataaaataggaaaaggcacactagttggtctaataaagtcttcatttatttctttccaacaattggccactcttttattaagttctttaattgcttcttcctctgaaacctcatattgcttcatgtaacattccactgtagatagtacgtgatttctctcttgttcaaactatatacataaaaaaaagaaaaaaaaaagcaatattatttgagtactatatcatcatataaaaaatcaattactctaattaaataaaataatcactacaagaaatatcacttttaccagcacagttcgctactgcgcttgttaggctatttttagcatacgttttgggtcacttttt

SEQ ID NO: 16023 - DNA, 9394 bp, Cannabis sativa
tttaatcaagttctccctttcctaattttattaatgtaagtaaacaaatgtaagggaataattaccttactattaattcccattacttattagtaaacatgccattatatgtaacatttatatggttagacttccattaaagtctttctttatatagaaatagtgtacgtggttacatgtagttcggctgtgcaaacttctcatataaaataaattttaaaattaaaatattaaacccctcattatggaagaagacattctgagcaatacgaaaaagaaaataacccatattttatttattttatgaatagtacgaggataaacgtcgaacgaagcttgaacaacacagataaaatacttaattaattttgtaagagggtaacaatagtcactagtttctacaacaaaagacactacttttcccttaaataaatggtcaaactacagacaagcttgatcaattaattatgaaattcacgtgtgaagtaagtaacaaaacaacatttggattccctagtaataatactaaacaatattatcaataaactcttatttaaaagtaaatagtattattattgagcacaataatgttgaatatattttataggtgacattttacaattgttaacgatattttttaaaagttacttttttaaattatatgaaatctaatgtttaattataccgagaaaaatgctaaagtatctttcaataattctcaaaaaataattattaaaagatattattgtcgtctaacattattcaaaatattatatcattattaatacaattaaatattagatcttatattatttaatataataatttttgttaaaatatccctaaccatttttaagtatggtatcactaattaatttctatcaaaccaaacaaacatcaataattggaatttgcaaggcaaaatattagaggatcaccaaacgttgattcacacattaattaattaaattccatttcaattcaaataatcaaactattttaattaggattataggtcccaaaacgatgtcgtatggtgtgtagatcttgggcgcataataggggcctgatctgatgaaaattgaagactgtcggtcacgtcagcccaaacccaatgggtaaaacctgtgatctaagcaattgtcacagctggccagaatagttggtgacccaaatccacacaaccatttcattcaacttcacatctcttcaaacgtgacctcctcaaccatattttctttcttccattttttctttttgccaagtagattttcttctgctgatgccacgtgtcaattattcataacaacaattaagttggttttctttttttgctgaaagaaataactaagttggtttgattcctaaaaagaacagcttgaggctgggaaagagtgtagtaatgtcattgttgttattaccctttttcctttctttctttccttttatttaaatttatagtaataataaagttgagggtaactctatactgctcccttataattttttttgtacatgtcctatatctttgttatttaggaggatttttcaatctattttacattgtaatcatttagaactttaattcttttttgtttctataataaacccgccctatgtgttttttcatataaaaaaatcagactaaatttttttcttaaatagcgataagtataatgtatacaattattaaaaaaaattaaaacactctggcaaaacaaaatagggtgtacaaacatacaagtttaagtgggtgtactatatatttttcctaaagttataatgtttccttctcatgctttgtattttttatatctctttcagctcatttcttgagcagagagcagaagtgagtgagtgagtgagtccctctctctcttgtattattatttggaacaaaatatacagagtatcattgatgttaaacactgttcaatacttttgcatagctggatttgggtttggtatataccactccaccacctcactctctttttcctcactcttcattttgtattgtataaatatacatgtataataatagaatgaatgatttcattttctactgggttttgaaattattataactggttgttgtatttatttattattttcacgttttcagcgctaaactcaattgatttcagtaaaagttcaaatttttagcagccccaagatattctgagatttgttttttggtttttattgttataaagaattaaatagttttcgacattggttgatgcagtttaaacaatatgaaaaaaagaatcatggagaagagagaaagagaaagcagcttccattatatgtggtggtctctgcaagttctgagatgacttcacgtgaagttatgtccgtgagagagagagagagagagcgtattagcaatgcccacaaatcttttgtgtctccagctcaacccctcttccgccattaatgcacttcaacaaagcttaggttcaaatgggtttggattacttttgggtgaggaagattttagatcttgaagttgttttagtcatggaaagcgattgtactaattcaccaaaaaaaattcactcacagaggtaaaaaaaataaattaagaagagagcagaaacagaaatattatgatttttgcttattttggttattttttccattcatggaaacagatatagattgatttttgttgagaatattcgaagggttttttgttattatacttggttttgatttgagagaaaaagaagtcgtaatggtggttttacaacagtcgagtttgtttgggtttttgttgttgttattggtttgttttgtactggttcgatcggacgatggagaaacgcttatgcgtttgaaatcaacgattgatcctttagattcactcccatggagagggagtactgagcaagtttgtcaatggaaaggggtaaaggaatgcatgaatggaagagtctccaagcttgttctggaatatctcaacttgactggggttttggaccagaagatcttagaccgtttggatcaacttcgtgttcttagcttcaaaggaaactccattaatggtcaaatccccgatctctctggtctcgctaatctcaaatccctttttcttaaccagaataatttctccggtgattttccggcatctatttctggacttcacaggttaaaggtcgttgtactcgctgacaatcaaatctccggtaaaataccggcgactctgctcaatcttcgacgactttactttctcgatttgcggaataatttattgacaggtgagattcctcctttcaaccagaccagtctcagattcttcaatgtttcgaataacaaactctctggagctattcctgtaacttcgtcactcgtacgattcaactcctcgtcattctccggcaatgtcgatctctgcggtgttcagattcagaatccatgcgggaacgaggttagtctcagtccttccataagtccattttcgccattgattcccagctcgagaaagtcttcttcgaaacggacaagactaatcaagattatcgccggaaccgccggtggcgccgcgattctccttatctgtgtgcttcttctttggatggtttgccggagtcgaaatcgccggaaagattcttccgacgaggcgaagaacaaaggagtggtagtagcagcagcagcagcagtagaaggaggaggaggaggaggagaggacgagggcggtaacaatggcggtggtcggagaggtaacaacaatggtggaaaacaagggttttcgtgggaaggtgagggtctagggagtctggtgttctgcggcgcaggggatcagcaaatgaattacagcttagaagatttactaaaggcttcggctgagactttgggtaggggtagtatcggaagtacgtataaagctgttatggaatctgggtttatagttactgtgaaaagactaaaagatgccaaataccctagactagatgagttcaggagacagatggaagttattggtaggctgaggcatcctaacttggtcccacttagggcttatttccaggctagggaggaacgcttgctcgtatacgattatttcccaaacggaagcctattctctctaattcatggtacgtttcctttaaaaaaaaaaatatatatttggtaggtcaagatttatataatgaaataaatgaaataattattatcagtatcaggacatttatggtatgagttctaaggttttttgtttttaggttggttgaaattggttttaatggattcatttttcaccagttaatttggtcagaattttggtgatgagtagtaatatttttctagggtttaagcttccttttttagtattattaaatgaaataaccaaaatccaaatccaaaatattatatacataaaaaagtaggccatgtgtattaatgtatgcttcgtcagttttatgtctcgagatactcattgagtgtctcataatacatataatttaattatctgcaaaacttaatgaacccatatcattgttagattccactttttctttatccaaattatttttttcctctagggaaataatgtgacattgtacaatgggcattttttttcttcccctaattaattttgacccataaatacctttctcatacccttatttgttatttaagattatcttgaaatttttaaaaattctaaatattttgtagtgtaaaatagaaggttaaagtattgtgttaattacaggcataattatatttttattatatgtgtagtaagtaatttttaaaactttattttctgtactataagtattcataatattttatgaatttattgttaatcttaaataagtattatacatttatataagaaattttaaccaaaatattttcttaaatattgaatcagataaaaaaaaaaaaagtatactaataaattttagattttttacagtaatataaatcatcccatatatatttttggaaaaatctttagtacaatgcatgaaaggggtatttcaatagatctttttatttgttatttgagaattttttattctaatttttttttattattatatatgtcctacttatttagaattgtttataaatttttaatagtttaaggtaccgaaaataattatttatagtacgtagaaaaataattagtataaaaaaatatttaaatattattttaaactatttaaattttttaataaactctaaataactacaacataaatagtgtgaaaagaattacagtaaaaaatttttgttaacggataactaaacagaaaatctactaaaacactcgtttattaggtgtagtagtcttttcttagactttgagtttaattttaatttttctgaaaaaatagatggagttgagaacaactagtcaaatttggatttggtctattattattattattatccacgtcacaggagcaaaatcattaatttttgtgggtaccacttggtaaacgttgtgtagtgtagtgtagtagtagtttgaattgtttctgtactgtattgtgtcctagctttccttggttgttgggccctcacttgtgtactcttctagcccctctctttcgctacctgttttcatcttaccatgtgcatgtgttcaaagtagttccgaccctcattattatatatttttctctattattaatataacttttaaatgacattgtaaatggttgattatgtaatgattattaacatcaaaatgtcaagaaataaagtgtttaaaatttattattacacttttttctcttaaacaaaacaaatgatatttagaaagttatttgtcttttttcttatccatttctttttaataggtttattctttttttgacattatgcacatattttggctttatcttttgaatatctgttaattgtcctaaaatttttataaagatgtatggttttgtatagtgacaactcatatacatatatctttttagtctaagccttttcttactttgtttttggcctcttcccattcattcgttagatgtcaatttaacagagtggtgcttttcacttagctctttttaagtttatcattccttctttttgttgaaaaaatatatattaatatatattgtgattcacaatattacaaaaattcttatttgtagtgataaaattattataatgaaaaaaattgtgaccaagagatcatcattatacccaagtggtatgtagttaaaggtatatgtttttaggtttaataaattgtcactttatattataagttgtattaaaattatattaattgtaaattattactaaatattatttttttagtaacaaatatttattgtgattaaaagtgacatttaattatttaaaaattgaatttttaaagttaagactagatgataaattgagtaaattattattttaatttacgaatatattttcttttataaaacacaataaaattcgttattattatatgtagtttttagacaggtaaaattttacttaataaatgaagtttattagtatgttagtgataattttgtctaatttaacttaacggtttattattttctcaaaaatattttatgaaccaaatataagccttttcagcaacttttaattgtggtgcccactagtgttaggtattgtatactactaacacgtggtgtgtctgaactctgaatggttaaaatacaaaggtggacctataatactatatggaacccacacatgaaatatgcagtcattaacgaccaagatagatgctcatgttctcaaatactgggaatatcattagcttatgtttcataatacataggacacaaactcttaaattctaacattttgggcaggcccacatgtaattgagcataaattatcagatgatgctactgttcatatattattgaagcttttaatgttttgcaaagcctacgattatgttactgatcttatgcaacattattataaagcaagctttgtgacagtaataataaactatactacaatgactttcatagtgtcatgcttaaatggtagtttttactctgtttttttcatttttcttttatggtatatgattgctcccatggcatgcctttcccactgttattttaatcttttggtctatatatggtcggttctacattcacataattaaaattgttcctttttcatcttatcagacttgttgtagggtcatcttgtccttattttcttgcttcattcaacacctacattaagcagctcagtcaaaattgtttgcattcaaaattatgcagtgttttagtattattccacttgccaccaaaatatcccctgtggcattacaagaaccatttttttttgcttggaataattatgagactcgctttgtcatttactagttgaagattcatgaaatttgatatttggactttttccctttgtttgtttctgcgttgtttccctctcccatctcttaataactgttcatgttgtcttcttgtaataaatttgagataccaaattagagaaaagtaaatagaaatctggttttgaacaaactctaggttaattaacagttagcttattaagataggaaaccatcaagagctttgctaatacagctcatcaagatataaaagaacttttgtttgttttgatgcaaaatgtagagttataggttattcatatacatactgtgatgtgtcactatcttttctttcactaaagttagcatgactttaccttagtattctaaaaaccacttaaaacatttccacaaacagatttactaaatgggtaaaatattctgtgaaatataatacgtatgaatacatttgatctcttttgcaaactaattcaaacatcttaatatccacattttcctttcacatttggtttatttatgctatcagcatagtgttatgtattacttatatttgtacctgaaatgtctgctagttttcatgttttaagtaatttttcatgactcaatatctttactctatgatttacattataccaagtgtgagatttttgctttttcctgtgatcattctttaattacaatattacttctacctatgtttgcaggttcaagaacctcaggaggtggaaagcctcttcactggacatcatgccttaaaatagcagaagacttaggaagtggtttgctgtatattcaccagagctctggcctaactcatggaaacctgaaatcctccaatgtattgttaggttcagatttcgagtcctgcctaacagattatggccttacttcattccgagaccccgattcactcgaagagcccagtgcaacttctctcttttacagagctcctgaatgccgtgacattagaagaccttccactcaaccagctgatgtgtacagctttggtgtactcctcttggaactcctaaccggaaaaactcccttccaagaccttgtacaagagcatggctcagatattcctaggtgggttcgatcagttcgcgaagaagagactgaatccggtgatgatcctgcctcaggcaatgaaacatcagaggagaaacttctagccctcttgaacatttcaatggcttgtgtctcgcttgtacccgagaaccggcctacaatgagagaagttcttaagatgattagagatgcaagagctgaggctcagttatcatcaaacagtagtgaccattctccagggagatggtcagacactgttcaaagcttgccaagagaagaacatttaagcatatgagtggtttactttaaatttatggttttttctttttccttaaaatttaattttcgattggattgatgcatgattcttctcttaggtactgtagagttcacttgtgtaaagttttcaagattcatttttagttcttgtgttagccagctagttgatttatactttttttaagaagagaaaagaagaaaaaaaaagggtgctcaggtaacaagtatggtgttggaaactagacaacatttgatgaattgatgtactgtacgtagattctgatctgactatgttaaaagcaaggttttgaagaacatactttggagttgtttcactcataaaacattcttccttgatgtgattaagaaagaatccaggttgtgtttgtgcttccgatttaatgtacttctgaacctcatgtggattgttgacaacattattgtactaactttggcaaaccatatgattaagttggaactttgcttagtttgctattttttatttattattttaggagaaaagcctctaaccaccaaaaatagggttgttctgctcatgttcttaaaccaaagtttggaaagctcgcttctaaattgaagtgtgtatatttataggatattcagatgagactttgttgcgaaaattattaattactacgcaagtccacgcaatcaagtagtatactcacgcaagtgagg

SEQ ID NO: 16024 - DNA, 2468 bp, Cannabis sativa
agatccatgtctacctgaaaagtgccatctctttgtgttgttgagttatgaacaggaaggcatagcttttcttggactaagtatccattcatctgagacaaaagaaaaaacaatttaaaccaagggaagggaccaatctccatggctgatccagtttctggacaggactaacttgattttgatgatgagactgggacgaagcaacacccagattcaagtgttgtttcgaagaagaagaagaagacacccatgaccatgggggcaaactcgaattcaatctattccatctctccataaaagcaccaccagctctgtagaattcactccacgagattactccatccataatcgtaattgtgattgtttgagaggaaaaaaaaggaaagctttactttttatatgagtctggattttcgtgtcgttttgtgtatttgtatgtagtatagtcctctgttaaagggttgaaacgacatgtcgttttgtgatgaaatattttaagattaaataaataaataaagcaatttacaagagagtgtcactgcagtgatgacaaatattacagagactctactagtactactactgaatggtattgtcaaaattgaaaggtctttcaagatttcattttgagggctttgatggagttggagaggaaggaggtttcaaatctggatactgttccaaaacaacaagacaaaaaaaatcatttacaaatgagataaatatgtatatatacaaacagattgagaaagaaagagagagagagaataacatacattggggtaaggagaggaggatgatttggcaccatttttggttgttaaaattgattctgtgatcttagctacttgattctcagctgtggagctaggtctggtagtggtaaccttattttcatcttcattttttccaacagcaccattggttaaaggttcttcttctgactgtttaatcttcctctttttgggataaatatgagtagaaggtggcaaaagtgtttcttgtatttcctgaataacaacaaagtgtaaatcttattcattctttcaaaaagcattgtgtgaatacaggtaaatatatttatggccttaaatctatgttagtgcaaaacagtgaaactgaggaagaaatttgaaaaggaagcttactatccagccctttttgcctgcaattccatccttgattgcataagctgctttgaatccattcttgaataataattcagccactttcagggaattcccatcaagactaatttacacaacaaaacctctcatatcaatccaataaaaaagaacgataatagaaaaagaaccaatttttatttttatctaaggataaagaataaaatgaggaaagcaatatatttagtttagacttacttgtccaaaatacagataacagtattttcagggtctttgaagttttccaaaaccttatttacaaacccaactgtatcatcctctgaaaattgaacttggactacactcttatttatgatcttcaaatttggggatttgagatacctcaaactcttctggtctctaatatccaaaagctgcacatttgggtcatctctcagttttctaaaagcatcaatggcgtatatgaacttgtacttcctgaaatattcttgtgttaaaggtataacaaccaaccaaatgaaagtacacccagcaacaaaaaaagggtatctgttaaaaaaattatcaattgagaccaagactgcttccaagtcgattttgtttggtgaaacttgatctgttgaggaggagactatagattcagaggcaaaacatggagatgtgtagtaagttgtaataagctctgtgagcacgaaatagaggtggggttttgctaaggtttgagaaagtggagaccttttgagaagagagtgattggtttgaagatgatttgaaagggggtctgtgtttggttgatggattttaatagaggaagaagggaaatgggtttgaagagaatttgatagatgaaggtgagaagaagaagatgaggaagaaggagtgagtgttgggagaaataagggtggtttagagttaagtgagtagtggggtttggaatggttttggagaggaggagaaccgaagaacacagtggaaagagactccatggatgacaatgagagaggaagaggataaagaatgacaatggtgggttgggctctcttccccaaccaataggaaaacaacacgacctcttgcaatactaaataaataaatgattaaatattagatacctgttcactaaattaaataggcttaggtagcttattagctagtttaactcttgccttgtttaaagtatataatgtgtttcatgtctgtgaggaaatatatatcaactcatattttgagttgtgatgatgttaaatttcagacaaatttattatatgagaaaaatcagttgtttaagttttagaataaaaagaggaggtactatcaaatttc

SEQ ID NO: 16025 - DNA, 6958 bp, Cannabis sativa
aaaaaaagttaagaagcctgttgggccggttagctgtgggcaacggccccacccactgacgagcctatgttgaaagttggttacaatatttttgttttaaaaaaattaccacattctttctcttgaatatcattcatttgtttttgtttatcctacgacggttccaaattttttgtttatcactaaagaaaagtattggcaaatcatttttcttggcgagtttgtgaatcggaatccactacacaacattccttctgagtttatgagacgaaaacattggaaggcaagtaatcatctttccattttttgagttcttgaacatgattaggaatcttactctcccttgattattcttagtcttattgctctctttattactctcccttcattattccaaacaaaggagttttggaataaaagtaggaaaaaaaaacgggttgtttgttttcatccaatttttcatttcatattatgactatgcatatatttgtctcccacgcatttaattacttagccttaataaaaattaaaaaaaacatcagagaaaggagaaaaattcaggagaaacttgaataagatgagtttttttttttaatcattgataataatcaaaatgtcattcatcccttctctcaaaaaaaaaaaaaaaaatgttattcatccctaataatctaaatgtgtctaaaatattaaatagttatattcacatcttttagtttttttttttttaaagcaataatcaatatttttgataaaggaatccgaaagaagggaatgtcacgaaagaaccttgcactctcaaaacgttttgtgccagtggatgtggtgaagcaaaaataataggtatttatacttgtctactaaagaaattggttcaagaagataataagaatcaaatgattatttttggtggtcctttttacatttggtaataatttttttttttgttgggaaaacataaattgattttacattttgcagtcctttcctcaatattggttgattttatatatgagagcattcaacaatgataaggttgtcaatttgaccatttctatattgagcactcattcatacatatcatctagccaccttttggcttttgagtgtcttcgataagtatggataccataggcatcacctttttctttgttttctttgattattgttttctttttcagatgtgtgtgtgtaatattatatacatatacacacttatataggttaaccatttcttattcttctgtattgatgattctatatatgataggacttagtgaaactcattagtattctattctttaattaagcaccttgccaaactaacatctggttcctagaaattagcttaaacttgagattaagaaagaatgctcacatcagcatatataaagctacaaatgagggcacatattatagtttatacaagtggtaactccgtccagtttttccttgatatgtttgaagagaggctttaatttggacgccagcacaaggttggtcctaaaatttagtgggccattaaaatattttgagctcttatataaaaaattatgatatttttcaaaatgagttaaaaagtgtaatattttttttgagtccatgaactaagtaagccttaagcacagacttagccggtgtatgcttggtcgggtctgcatgtaaagttaatcattctcctattttgtaaatactatggattataagagattccctaattctagatatttatatgtactaccaataacaatatagatattgagcaccctagcatttctctaattctatgctctataattacttgatgccataccaaatagatctcattctatctccttatctctgctgtaactgtatggctaaatccagttgtttacattacctattttgtaggattttaagtactcatgtatgattgccaatggatctctcctgtctgttgactcccattttcattctcattcccattccactagcaataatatttaaccattcatcatagcataacaaaagtgaaactcaatatagattctttcaaccactagatattcttaatagttctggtccttacaatcttacatattaaaaaaatgaaaataacactgcactcggaagtagaaacacaagaaatttgtctggtacatgtaacataaaatactatcaaatcttcttatataatgtatagattcagtaaaagtgagtacacacacaatcctcatcagatgagggatagaccttgacctatcaactcatcagcaagaattctgttagcagcttcagatggatggacactgtcaaaaaatacatactgagtagcatttgaacaagttcctactgagtgaggattgcacaaagctgaggttgtctctagagtcccagttccacagcagcctcttgctgcttcagcaaagcctataacaataaattcagatcagagacattaaataattgtatgcagtatgggaaaattgaaaagaagaaagggtttgattgtgagtaccatattgagaaggagatttaacaacatcaaaaagaggcttgtaaatgtcaaatataacaagtctaagatcagggtattgcttttggagactggtagcagcagcattcaacttcttattaaatgcttgagcatctgtgttgaacttagagacacacccattttcatgatatccaaataaggttcttgctaatggaagacaacccaatggagggagtgaagtcactccaattttccttgcccccaaaccatacaagccctgtttttgcaataagtgttattttaaactatatagcttaaaaatgttcagttttaagtattacttaaagtatattaccttagtaaaggtgttgaatgaacttaggagcatggaactgtattgctcaacagtgtaggctctgttgactaaaggattgatgtagtagttttggacaaagtcgccactgccagcgctcactacataaagagcgtccttaataatggatttagctttactctggccagctactttagccagctttgtttggtattcctgaaaatacttcaattgctgcgacaatgggattgcgtgctgtaaaaataaagtttaggtattaatcaatcaagttagttgaagagagctaattaatgcttaacaaataattaatgatttaagtctaattaattagaagtttagccacattaaatataaaggtagacacttttaaggcttgtattagtataaaaatatagatcttattacttacatttagatttgcagcattctcatcataaccagatgcagctgaagcaaagttggctccaatgagaaggtttttccctgatgcttctgggctaagatatgccgctgggtaagtcttgaagcctaaagtctcagctgtacaaacaaattttaaactatttagtgtcagatcgagttaaacaaaaacatcatgatatcttttttgtttgttttcctttctttattgggtttagagtactacttaccagtgaggtcagtggctagttttccattgcaaaatcttcctgtgggttggtgattagcgaagtcccttccataaggaggataattagccttaaaaagagtggagagatagttgttgttgcccacatcaactacagagtcaccaaaagtaatgaccgctggaacaagagtgtcctgagcattcccaccatataaaaatagtaatacacatacacacaccaagttcaaaaccatgctagctcctcctctgttatgcatttctatcttcttcttcttcttcttcttctttaacagtggtatggcagtagagacttagcaaagacaaagtccatatatatattcaagtcgaaaacgaccttagagaagcggctattgaagaaggaaggtgggggttgtgtttggtcattaaatgattgccttaaaagttttctgtacctagctgctatagcaccatttaaacctcacaatttaactttataattttagaaaaagtagtgtaacttaactctccaacagattatatattgtgtgttcattgtttcatttttttggggtccttttttctatagtgactattttgattttcttttttctttttctttttactcatgattttgaaagatacaaccacaataatatatggtctctcttcattcaatataagttggcatggtagttgagatgaattatatataaaaattatagataacactacaatagcagctgtcactgtgagtttaagctctccaatggagaaaagttgcacatgtgatggatttattttggtggttgagaaatttaagggaaaacagcaacatgatctgctgacttatgtttcaactaatattgaactatactgtagctttggaaataaatacctgtcacacagagagagagattattgtataacattcaatacatattaaattatgaaacattttggggttgagatattcatgaacatatattcaccaccatggcatgcaccatctatattttctttctcaccagacaacaacatttataaatcgatgtggagtaaaggaaagagatgatgtaatatatatgtgtgtgtccccatagatataaattaataatgtaattaagtaactatatgagttgatagatgagataatggattctacaggctatatatcttaaatttgaagaacatgcaacagcaattgctatcatacacgtacttactgatatagattgaaccacttagctgtgcccgggatagttctcaaataagctgatcttgtattcgaacactttttttatttattaagaatttgcatgcatataaatatatgtgtgattgatatataatacaataaatatttagtaaaaaaaattagctataaccaaataattatcttgcaagttctagtctatattgctgcaactgttttataatttttttttttgagagatgttttataattaattaattacctactagctagctaaaaatatatatatagagtacacctttaatagtttacttgaaaataaagttcaacaattagttaccatgtataaaaaaaaacaatcacacacgtatatacaaaagaataatcacaagtgtaataaaatatttaaatttattatttttggcatataaattatttaaaactctctaaaaatttactgtaaattatgtgttaaatacttacaacatatataataataataaaaattttcttgaataccaaaaaagtaattaatgtaccgattggaaccacgctgtttaagagggtattgtataaagttatatgtgtggttaataaattaaggaatagttttttcttcttcaaattaatatcaacttttatatttgtaagtaaagaaagaaagatatttgtaaaatattatataggaaccatttgatccgaccgcaataagtactagcttggtagggagcaagccagatcaggagagaagaccagaagtagatactattaaatattattattattattattattattattaatattatataaaaacatgaatatatttatatatatatgaattggtaacaatgatcagtacttttgtttggtatattacatgagatggatctggttgagctcaaatcagaattattaaatactacgcggattttgtttgactattgacactggaaatgggccttcataagttcataaattaccgtacagactactacagtatgtactagtatagcactgtatattattaattactattaatactgtcatgttctacccattaccatactatatatggctaagcacaactgaacctctttgatgcacataattttctattaatttccttaattcgttgtttggccaatgtgagtactgttgtttaatcatatcgatatatttaaatattgttggaataaatcctcataacattacagtacaatacgaatttacaacagaaaaaatgaactattacacatgtggccttcgtccttaactaactaactctcatcactctgaatcaaagttagttgcagatgaacatatgctcgatccactaatatataatcaaatataataagtaccgttttatttcttatctttaattaacaaactactccattatatattagtaaattgaattccaaatccaaggtataatagtaggaacggtacatctttaatctagcgtgaagctaactaaaagttgagaagaaacctatcatgttcattgctaaatggcattattattggtgccccggcccaaacaccaatgtataatctttacaaaataaaatataataaaaaatatatacaatgtatattaataatgattcaatacactaagagttaatcatatatctagtgatcagttcttgataattaattgaattttattttatcttaatttaatccaatttacttttaaagatggagaaaatgaaatgatcatcgagagataataaaagtacatatatatatacgttatgatgagtgagagaaattgcaacaagaggaaagtgagagcaagacgtaacaaacttattatactaaataattcatggtaattaattaagttatttctgtataatttattactcattacttataagttaaaaccatgcatattgatctcatgtgttcttcatcaacgtatttggctttgggggagattagatggtcatggaaagccttgggcctgatcagtgatttcaccagcacaacattccgtacaacacgacccaggtcgaggtggactgcagcacacacaagcgggacatatgggagtcgtatctgcatatatattatatacaccaaactcatcatcatataaatatgcatggacttcatatatatatatatatgatatctaattaattttaacgactaattaatatagatatatagatcattcatatatatatcatgatgatgtgtaagctgttggacaccacaacacgtgaaaaacgtaattactttattattgtaaaagcaattaca

SEQ ID NO: 16026 - DNA, 5235 bp, Cannabis sativa
tcaaatttgcaaagaaaaataaatataaagggattttgctactaaaaaaaataagaaggttaagtgtataaaaattaaaacataaaagggtttagccaaaaaaaaaataataagggaattaagtgtataaaaactaaaatataaaatatttttaccataaaaaaataaaaagattaagtgtataaaatttaaaacataaacagattttgcctaaattgttctaaaaaatatgatagcaataaaataataataataataataataatactattattatatttttattaggattatatttctgtaataattataaaacgttaagagagtgtagttgtaaaataaaaagaaaaagtaaactaagtcttaatgaaactttgttgcatagcaaatcccactcttcaatattccgcgtgagacaccattttgttatcgttcttcgtagctacaattacattgttttcacgattacctttggggattccctttcacacctctgcaatttcgctgctgattccaacaccaagttcaattcccacttctagggtttcagatctcgttttcttcctgcctggtaatttggatcttctgttcttcaagtctcgttttttttgctcaaatctttgattggcttgcattggtcacggattttgaattcgtagactgtagtaggattttgaggatttttttttctttttttaatcgatttcaggttgttatgatattgtagaattttgaagttcagggttctgcaaaatgcatatgaaagcttctcaatcgtcgtttcgggatcggacgcatgaatttcagagcgtagcggataggttaaagaaatcaatatcgtcttctttgtcggctcccagtgcgagtgggccaagcagccgttcgaaatctgaagaacagcgatctgcgattgcaattcagtctgagtttaatcggagagcttccaagatcggatatgggatacatcagacttcgcagaaacttgcaaagctggccaagtgtaagacatcgaaccaatatatatatttatatctttggtgttttatatcctactgaacaacttagttaatgtataacgatccagattattatcaatagattgagccatcagtaaattataagttggttctagcgagcaagtgtgaaaaggggcatgaaagagttttttgtagagtttctttttgcgattcattgctaaaggatgttacacatttacaagattgtatgctcaaaacatatcctcactgatgctgacattaccgttaagctttaacacttatgaacactgtgttatcccaatgtcactttgataattgtagtcgtatttggttttttattttctttctgatatattagtaatttattttcttttttttttttcgtaattgtagtggcgaagaggacttcagtatttgatgatcccacaatggaaattcaggaactgacagctgtaatcaagcaggatattactgctctgaattctgcagttgtagaccttcagctcctcagcaattctagaaatgagactggtaatatgtctagcgacactaccagtcattccaccacagtagtagatgatctgaagaatcgtttgatgagcgccacaaaagagtttaaagaagttctcactatgagaacagaggtaaggctgaatgttatgtttcttttctcgtccaataattaggctggttatcttgtttgagagtgttttattatctttgctttcacatatttggatccgatttttatactggactcatgatacttttttgcgttcttgaagaatttgaaggttcatgaaaatcgaagacaattgttttcctctacaacatcaaaggattctgcaaatccttttgttcgccaacgtcctctagcttccaggtcagctgctagtacttccaatgcccctcctcctccatgggctaacggatcatcatcttcttcacagttgctccctgggtaagagctcacgtggaatttggtttatttgagtggcaccaattttatgagtttgctatttagttaattttagccgatacagttgaagacactagatagctttagttattaccaaattgacaatatgggaggtggaattatgtgatataggtccatttcttacatataatccgcatttgaaactgtgatttctataagtcttttgcctaccattatattcgttcttgttgaacttgtttgtaattattaggtagtgccatgggacagcttgcatacaacactaactaatatggaggccacattcttgcttactgctcactctcatgctctttctttatttattttttttttatcaaaatgtattccagtgtttaattattcttctgtatttttctgagcttttacattttggcctgcacgttacagaatgcttgtgtctaatcattgaatcaactttcctgtacaattaatgtcactcaataatttggtttaatgaatgacattgtatttatctttatttgtggtttccaaacattcaggaaacaagcagagggagaaggtcagccattgctgcagcagcaacagaaccatcaacagcaacaacagcaacttgttcctttgcaagacacttacatgcagagcagagctgaagcactacaaaatgtagagtccaccattcacgagctcagcaatatcttcaatcaactggcaactctggtttcccagcaaggagagatagccatcaggtttctctctcaaactatatatatggactaaatcttaggatgaaactgacacaaaacacgagtctataattatccttttattattttatttcctgcgtgattgttcttactgcatctttgggttatcaaaactgggcagagatattgttttagttttgtaaatcttgtttgacattatctttgaagtttgaaccacggtgaaatgctgtagttcatattgtgattcatcccatgtgtgtataatatatctacaaactcataccctagaggggtagctcaaatggttaggcatgtggattgctcccacaaagtctgaggttcgagtccctcatgggtacctacatagcaaaattgttatagtttcttggtccccaaatataattgggctatgcggggatcctagtttcaaaaatatatgtgtgtatatatactcatagatatcaaaagcttagtttcttttggcctttccaaatagtgtgaatatatgatttagacttataacttattgtaagataattctttcatgctactgatttgcttatctttttcttggtttgatattgctatatctctagaatgttatcaaggatcgagacatctgcacaagtagattaattatccaaataagcataacaaatactgaaatattttgatctatttttttttatatggttgtgttgggtatatttgaaaaattgaggttggcatattttttctttcaggatcgatgagaacatggatgactcattggccaacgtagagggagcacaaggggcactactcaagtatttgaatagcatatcatctaataggtggctgatgatcaaaatattctttgttttgatttttttcctcatggttttcctattttttgtggcctagtcatttggaacacacaattgaaaaaggaagaaaataacttatcttttttaaaattagtggtggtttgtgactgatgataagttatttctgatcctaaatcgttctctcgttttgtttattattatgtgttatataagttcataccaatgagtaatagtttgtctaatggtatgtatgtactactgatacatgtaaaagctactaagcacaatgttgcaacaacttttcatttgttgggcttggagtatatattacatacaatttaatttattttatattaatattaaaactttatttttattttttggctagatgattattattatttgcttgaagcactataattgtggtctcgttatactatgatgtcatctttatcatgtgttaaaacattttttcagataattattttttggaaaaatttatggttttgtaatttgagaggtacaattgtacaaatgcatagtgctataaatacaaattgagtttttcgacacggcacaaaactgttacgagcgcaggaggcacgagtacaacaaggcacaaaaaaatatggatttgaatacgacacaatacgatattataaattggcacgacacaaaaaatgtgtttaagcacaatacgttacgacaagctcgaaaggcatgatacgtaagcacaaatagactactcaaaaaatacgacataacacattataattttttataaattaattataataataagaaatatgtatttgtcaattataaataaattaaaattataataatctttaaatctgaatattataattgtataattaaactatatatattaattaatttgtagagtgcgacctaaaaatttgagtatttataaataaatatttaaattctagtaatttttttatatggttatgtataaaatattgttgaaaattatataaaaataattaaaattatgaaaaatacatatagtttagtaattaacacattaattataaatatatgaaaaagtaaagtatgaatttgagccaagatatgaagacggcctaacatgtttaagaaaaacagaccggcccgattaaagcacgatacgaaaaaatatcggacctacagacagtaccaaatccctttaaaaatataagtacgaaacaacacgactcatattttaaaaagcacgaaaaaatattgtttgttgttatctgtactttaattaatattttgatttagcgaaactaaaaaatgaaaaaaagacagaagttggaccaccatatatagtaaggtccatgcatgtcgaacgtcttagtgaatgagaatcgctaaaaggcactaatggtgtgtagcactttcctcggtatcatattgctattaatgtaattaagtatcgggtcccatataacttaagaaaaataacttttaagtaatatcgctaactaatcgtgaggtgccactatgaaaagtgttgggcaccactgaaacccaataagaatgctcttagtgaatgtttttttttagcatttttcaactattaatgtctgtattgttggggttggaagaaatcttgatagatttaggatgcatttaataacgattttttaatctgttttttatttttaaaattaaaaaaataaaaaaaaaattcaaattattttttataaaattatttt

SEQ ID NO: 16027 - DNA, 7104 bp, Cannabis sativa
aaaaaaaaaaaaaaatctatatgagtaattatatttacacaggtgtcaaataattttttaaatttattgtttttgatataataaattatttaaataaataaaatttgttggatgttcttaataactctaatgtacattatcaattatttgattgctcataaatatgaatataaatgtgccaaaaatagaagagatgcacgatataaagatatttatttgtcccgggatattttcagatatttcattgggaagaatttccattatttatggtaagtaattaccatgtaatcacatgcaaacaatacattttcgaaaagtaagaaaatatttattttcataaaacattttttcttcacttttttacattatttattaaattaagtttgttcttttaatataattttttattttatcttcattattttacttcaataagttttcatgtacatttataaagttaaaaggaaaagtagaaacaaagaataacttgctaaactcaatataatcacactaaattaacaatatatatatataattatggacaaaatctaaacatatatatatgaacgaaaaaattttgataaaaaaattaagttaatagagaggagagaggcatagcattttcacccaattcttaattatggttgttataaaacgacaaaaagtatcattatttgctcaaacaaagaagaaaaagagaaaggttttcactaattaacttgatggttgttacttaatcctaattattaattttgtaatgtgcctttcatcactttcataagtgaaccaacttttacataacatgcaaacccaactttaacaaaagaaacatatggtgggatctatgattgattatctataaatataccaaagcaacaatatggggtgggatctatatatatatacatttatctcaaaagcatcaaaattttataaacatatagttcatgtataggctatatttgtatgtattttgaactcaaaatggaatctctaataaccaataatttccaagaaaataatatctatcactatcaggatcaactactgaaaacttgatcatcattctttcaattgttttttttttttattttcctaatttacaacatacctaaatttatgtacacatataaatctagcttttgaaattgaaatagcctttttctcatcttttgttgatagtctactgtggaactaacacatatatgaatagagaagactatatatatagtactgaatttaataataattgaaatacttttctttttcagatggaagaaaatattcacaccacacatgatgagattccactttttcttttttcagccaatttccattgtaaccacaactcatgtgtgagactatagctttgttacaaccactctcaactaaaagaaaagctttttaattttttttttttttgttgagaaataaagaaaaaaagataattgaaataataattaaaccccacataccatacatgaaagaaaaatacttttcccttctttttacaaaacactttatattaattaacattgtctctcctctttctcttttgtcacattaaaaagatccaaaagatacatacccaaaaattaacctaaaaccaaattaaatatacttcaagatcaagtaccaccttcataaaatagtgtcacttaattaaaatgactagtaattaagaatatttttttggtcttacaaacatcaccatatatatgccatgtcccacaccccaccaaaaggtccaatggaaggaacacatttacacattaaaaaaaaaaaagacccaaacatcacattctctctctcttcttatctatatgtacgtagtactactatagaattatattgtcaaagcttcacgcaatgcaagtaggcaacaagcaacttgagaagaaactcagccctctcttctgcaaaaaaagacattaaatattaatacatatatacaatacattacacattttatggtaaagtgggccaaaaataaaaaaagaaaaagaaaaaaggaagaactttataataagaaaaatgcaatagtgtaaataaagctttataattttaattacctttttgtgttttttgaataggagttcgggtgagattctatagaggtcttcatctactggcttaggggttggccttggcataggaggagcaatctctttcaactcatcacttacccaactttggtactcatgttgtttggcctctttttcatggcatgagtctcgagctttggtctattaaaaaaatcatatatagaaatttaatcacacaccaacacaatatatataaagagatatatactagctagctactaggcctttctcaactatcaagaatataactttatttcttttcttctttttgttctctacactattgactctttagcaataataaagcaaaattgcaaaagctaaactcatgcaaatctcaaagagagtcatatttccattattgaagccactaaaactgactttttttttctgggcaaatattaaaactttatttctaaagaaaatttcaagaaataaaaacatcacatgatatgacataacataaatataaaatcttgatgatgatattgatatacatgatggtgtaagggggaaaacgacatcattttgagtgattatttttagcttacccttctacgaggaacgacaatcattgcaggtgtaacgacatcgttctcatacaaatcccctgttacgtacaaatcacgatcttcagagtagctatagcgtagtaagccagcttgtctagctgactcaaaacactcagtgaatggaacattgtcgttccaatcccaactcccaaacgcaggcaaatgagtccttctgtagtcctgtaattccaaaccaaacagaaacaacttacatcattagtcccacatcggtgagatacggtaaagtttcactctttataaagaaaaacttaaagaaaacgaaaactaaccaactaaaacttacttccatatcaatttttttttgaatgagctcctttcaaagagagagaatacagaaaatgtgttgtctttctttgttttctttctaacctgtggttgtaagcgtgggtttttttgagccaatttaaaaagaatggtgaagagagagaaaaagagtacagtaaaaaaagaggagtagggattcaaagcttacttaactggtagtgtggaataggtaaaaaagaaagtaaccacagataacgaagtatcactagtaagagacagagggacaaagaagtaaggtaagagagagaagagagaaaagagagtatatatgtatctttattattaccttttatcagggcttaatagctttcccctactttgtctctcttcagagataaatatatatatatatatatatgtatattccaaagcaactacataaaagtctttcattcattcttctctctctctttcaagctcagcttcttggcttgttgtggggtttctttctttcttcaatctcgaagccacacctcctctcccagggttaaaatagtaattagcaactgtgaatattaatgctactgcagtgtagtttaatatggaatttcaaaattttaatttaataattaatacgagaattgttaaaggtattattggtggctaatatttttattactgtcatacttctgttgatgtaatgagaactcttataacttaagaaaataatttttaaaaaatatcgttaactaattataagtgtcacttataaaaagtattgagtattactgatatccaacaataatactaaactaatattaatactcgcacttaatatgatgtatatgataaaatatattttaaaagtaaaatatatttttgaagctatggattgaatgggctttaggcatagttctaacttgtcttaaattaagtctaaggttgttaattttttttttgaattatgaagattatttgatataaagatttttatttaattttattaatacgtaaattatctatgtaccaaattctactctttaaattatgatatctacaaaattatatcttctaaattttaacatatacaaaatcatgtctttcatacttcccttaataaaattactcaaaaaaaaaactttaaattcaataacttcattaatttagttcctttttaaatttgtggggcaaaaatttacaaaattatatcttctaaattttaacatggctttcatattttaataaaattagactaaaaaaaactttaaattcaataacttcattaatttagttcctttttaaatttgtggggcaaaaatctagataaatgcaacatggtcatgtcatagtaattaatggtgttattttaaccaaagctacctaggtagctcttattatttttgcttttcttttttcctttctcttcttttaacttggcacacgagtaagtaaacaaaggaagcaaatagccaagagcagagagagagagagagagagtcatttaattttggggttaaaagaaaagagtagctaagtatggtcagaatctgaggtgtcagttgtctttggtcaacttaaacagtgtgcaataatattgtattccatgttaaattcggtgtcttttcaacacttaattaatattgtattccatcaactaaccctaaaatcaaagttttgttgtttgcatttaataaataaaaatatacgtcttaaaatcttacccgtttttctattctccccatgttgtagacagtttcagacaaattctgctcactttgggttttgagctttttatttattttttattttttttggataattgtgctttcaatgtttttttctttgttattatcgttatcattgttttatgaaaattagaaattcaaatcttaaactaattaggttaggagagtgtgagatactgtttgtttggaattgcaaacacaaaaacaaacctgacacaagaatttatgtaacacaatattaatttcattttgcattacccaatctcaattaattagttttccaaatgcaatgaaagaaatatattgtacactgttaattttaaaatgttatttttatcaatgataatggatatttttttgtcaaattttctttttaaaaaaacaaattaagatgtataatagaataaaaaaaaatacataatgtattaagaaattatttcatttattttattttttaaatttatagtttatgtaattgctccaatagtctctcgggtaatttttatgtaagtataaaaataaaaaaaaaaactcttaatttatttaaattatataaagcttaagtttattttatttaaaataagtgtgactgtaatattgtatacatatatttatttaattgatcataaaaatgagcttataaacaagttaacaatacgagttaaacatcaagcactaattagttgatgatgctaattaagttaacctaaaatttaatatgatcgatctttttaataataaacgagtcactttcaatggtctgtttataaataggacctgcacgttcaataaattatgttaagcattttccttattatacacaataacacgtgaacacaaatattcactatattaatccaaagtcaggttttttttttttttaaatggagaggggctctacttcttatgagattcttgatgagttttcacaccatttgattatctggcatatgcaattcaagtacatatatcttcctcctgcaacccttatactatatctacttttcatgtattgctttttgccctatattcttattatatcgtattctttttagtactttttttttctaaataaaatatgaaattaatcaatttacagaggggcatgcagttcaatattattgctttgttgttcttcaatgaacaaaaatatatgtatatgtagtaaagacatgtgaatgagaaaatcttggtcaaacaccattttaagcaattgtcttcaaaattaatctggcctatatataaatttcttcaaggttaattactttctattattacaatatgaaagtacgtacgtaccatatatattatgtgtatgatattgtattatatatgtacatgttatgtatatacacatgcatatatatataggacactctcacgaatcaaaagcttgtatatatgaagttgtttaaattggagtttttttgagacagtcttttacgaaaatgactggtcattatttgaacgactgtaaaaaaaaataaaaaaaaaaagtgacagttcaatatatgtgctgcggactgtgattctttatttgatgcagctctttatttatcatgacaatttgtcgtatactatctttcttacaaacgagttgtcgtttttgaatcttattctcttctttattccctcataataatgaaagtgatcatcacaattcacaataactaaaatattattcatcatttgtactattattattgtcatttaagtttttttggtattgcttttcttgcaaggtttaactttgaatataatttccctcttaacattgtgtcttgtttcattgtgcaattatgaggattttgttttgttctttttcttcttgtttaattgttaaggtatcatgtgttctgagattccaaattatatattgcttgttgaaaacttaacctagtcccaattaagtagtactgatgtagtactcaataagaaacaagaggtatctaaaaagcaatatgctaaatctcgtttttattgtatagtgtaaatttagcaattaaattcctttgaaatgatgccaaaaactacttgtgaatttttaatagcttaagtgcactctagctcaaataataaaatgtaattgtaattaattaaagccttgaacccataagtgattcatcatgaccaaaagtttgcctaatacatatttttcttatttttatataaacgtaattgaatatagcaaattaaataaataaatatgtgattcttctgttccatttataaactaagtaaaaaatttgtcactttaaatcatttgatgttgttgtaattaagttcatatctgttataagtttgatagctcaaatacatttttgaattacataagttgggattcgatcccaagacccctaacacatgcatctcaataactcctattatcacttgagt

SEQ ID NO: 16028 - DNA, 11424 bp, Cannabis sativa
tttaattatttattgtattgtttttaaataaagcaagacacacctaacataaaatttagtatacgtgcctcgcacgtggcgttctactagtatgtatatatatatatatatatatatatggagtccgggcaaacaaaggtgaattaattgtttcaagggataagggataagttagaaatatctcttttttatattcattaataaaaaatactcttatattatattttattaaaatatactttttttgtgggtgagttgtccaatatactattactttccacttaagtctagcatataatttatattaacttaagaggtataataggtacatcatctataaaaataggtatatcttaaagaatatgaaattaaatgaaaataaaaattaaaacaagtaaaataaaataggtatacaatataatttcttcgtgtctcaacgtgacttattatttgatcataagctactaaaaaaagttggattgttctttaaacataaaatcgaagctaatattattagcgtcggtttcaaaatcgacacatatgccaacattgcaatttagatatttagagatgttatcccaaaagtcgctctaatgacgtggcataatacgatgtgagacgcggcgaacataaaagaggttgagtgggtgagggacctttgaggagactctccagaagactttggtcagttgtatagaccaaatggagtcgtctagccttgggcatacgctggacgaggtaaaccgaccagtagtccaagcaaccaaagagccatctcacagaaagcgtccgtccgactagtgagttcgcagaaggaaaatgtccagattcattccaataatgtctttccttgcaagtaggtcaatcaacactccagtaattgagggattgtgagaattaggggaaatgagaagatttcatgggattctaattttattaaatgaaaattttatactaaagagaaaaaaatgaaattttgaataattcattcaaatattaaatgtcttattctataattaaatgtaaatattctaaatctttttacctataaatagtggatcatattcattattacagggatcgatcgaattggatattctcaaaagagcttttacgctgtcaaattatctgtaatatttagaaatagtaagaaactcacttgaccatgttcacgtgatcttgctatttctcgaagaaatacaataaaaaggggagtaggtcattaccgatcaggggccgaacctctataatcattgtgtgacgttgatagttcttactatttacatcatcataaacacttaaaattatcgtttcattgactctgcgctgttgactaaaaacgaggttaatattttgacactttcattgagagcttaaactatttttgctctctacttaaaatctacgtttcaaggatcattaaatgatctccactttaagaccgatggttcaaacaagaagggtatcatcaaccgaaccgcgtgatcctatggctacaaattcgaatgtccaaatccctactagcattggaatcgacaatactagtgtccatcttcctcctcgcaacaacactttagtggaaactagggcttgagaccccatttttagaggtgttagaggtacgacaggcaatccaactggagttactactgagctgccaaggttcacccctggtgtctaggagacagtgaccaccagtcaatactctggagagactgcaatagggacaggcccgccatccaaaggagagcatcaagtggacctgggagataaatctgagttggagaacctcagagaagtcttggggtaagtccagacgcataccaacactctccaccacaaccaggaggagacccatgcaacggtgaatcaggcattcgaacagtaaaggcgtgaattctaggcatggatggatcacactacttgagagatgcgggcccaataggaagaaatcaaccgtagggcaaaggaagctgatctagcaattttcccaacaaactagaaggtagaggattgaggtccaactgcccaaacaggatgacaaaaagggaaagaggttgtatatcctaagcagggggcttgtgcacggaccagaagagcatctgaccaactatgtaaaatagtccaggagaaacaaacccaccaattcaaggccacgagaggtcaacccttaccgccacgctaatgaacaagtcttgcgagatcactacctcgaaagggacgatcagaaaaatttatgaccaggccaaaaggaagaagtgaagatgcacctcctcgacatgcatgagggtcgtaagggtatgtcactcaatactaccaggacggaagggtccatgtatatgggtggaacaagaaaaataaccagcaaccccaacaagatcgaacaagatctcaaagtgatgagtcacaccctaatggaaatgatgacgatgttgaatgttggcctcgtgatgacaatgtcaacgaagatgtgataatcgttaggacaatccacccaataatggcaataataaccaggataatgttttcaatgatggaaatcctctcaggttagcgaggtccactagccaaaacccgagtaggaggcccaaagtagattcaattttccaaaggatgggactcaagcctggacatgaccatcaaaatgatttaaatcgaagaagggataattgggatggacgttttgtccccccacataataaccaacctatcgacctagacaacttcatcccaaacagcggaggtaatcttgagcccatcatagttccaaccaatcagccagtgacacaggccgataaacaagtagcacaagttgacttgtgggtgcaagcccaagtggatcattttaaaagcttgatacaaagcctgaagagcctaaatcttactatttggaactcgaatgaacttgaggtttgccattttctgcacgggtcaatgccatggacctccgaaccaagttcaaaatgtcaacttagaagatgtatactgggaagcatggtccgttgtctcacatcaaatattttgagatacaaactgacttgcaaggagtaaaaagtggcattatgtgtcaaattttaccagcaacgttagcagaggtttcccaatagtggtacttcaagctaactcttacaaattttggctcctagaatgcctttgctgcataattctacaactaattttcctcctctcgataggtacccacacaccttgaagacctagttaaggtaaaataagtaccgggtgagcctttgaaggactacatcagtcgattcatgacaagtgcaactaaagtcaaaggactaattgaagaaggatgtcttaccgcagtcctaggaggaatagaacctaaggtgagctctggaaggacttaaagagactcattattggttgaatgggtgagtttttcaactgagcagatggtttcatcaaacttgaagaagcagtgagaagggtggacaatgttggctagagtaagactgacccgattcaatttttatccacaccaacctcctttgcatctgctccgaactagcaaaacactagccatgttatcatgcccctcacaaaagacattatatattttatcatgtagaagttgacttatgaaagtaagattgctcattctttatttcattgacatatcttttctgggcattattactctctccagcgagatgtggccttctcgagataactaatatatcctcaccctcaatagggggaggttgcaatctttggttatctgggttattgcgctgattgggctggtttggcttaatttccttgacgcttcacatactgtttgaaatatccatgcaagattaggctctctatctcgtctttcggttgccgacactcttcggtagtatgccctatgtctttatggaatcgacaaaattttgttgaatctcgtttatgtctcgcatgtctcattggttcaggtttgcgaaatgtaacctgtgttcatttgcaagaaagatattttcatgagtttcattcaactcggtgtatactatttaaatcgggacatattcgtcgtgctttttttgtttcttcttatttttagatgattctcttgagtcatcttttcttttggtgtttgaaccacttggattatctgcttttgtcgagacggtacttgctgtggtagtacttgtgctgggtttgtttcccaagccagtcttcagcaacttcatctcgttccttgcttcctctttgtgcacaaacacttgcgctcttttgttgaattcattaatgtttcttactggacgatcctgtaagtcatcccacaactcacccccaactgttgaaaggtcagttgtaatccctacttgaagagaagtaagctgaatactgtcatttaaatttctaacctttacagcagctgtgctgaagcgactcaggtaagcctttagtgacttgcctggttgctgttttatgttagttagagacgatgctttagttagtctatctctgacaacttgaaattgtttcttaaagtctttggacagctgttcctaagacattatcgaatggtgagtaaacttatcgaactagctacttgctgccacagttaaagacgtcaggaataaaatgcaccgcagattattcgagacgttgttggctcgcattatggtattgaagttattcaaatgagcgactgggtccgtagtcccatcatactgcgaaaggtgtggatttttgaatctctaaggaaattcaaaattcagaatattaggatgaaatgcctcaatttcctcatttgagtcataaccaggtaattttccatgttccccatcctgatattttctaaacttatcctccaactcaatgattcgcaactggatgaggtccacttgctgttggttggcattaagttgatggcgtaagttaggtgtattttgatttagtcgctcgcaaagatcgggttgtcttcgattcaaatgttcacgaagatcacataattgctcacagatctcgtctctgagtaactcttagattgatagctttgcgtatttctcatgctttcttgatcagcataacatcgaggtctgcttccttctcgcgtttgccttcctgatcgactgtgccctcgagacctcaactgtcccgagttagaagttgctttgtcttgtaccagtcttctccttcggaagaggttagatacacgtcctctatttaggtacgtgtatacaccttccctctctgatcgagaatgatgttgagattgtcttggtggaatcccacttgtcctaggttgagtcccaggatttctctcgttaccacgagggatttcctattccctaggttggggctgtctcgtgtcttcattcctgcgagaagcctttggttcatcattacattcattccctcggttcataaatccttgggatctttgaggaacatcttgacttgaacatccctagtacccctaagttgttcctcctgggtgttttggggatttccttgatttgcttcctgtctcttagttcttgaagcttgaggtcttcctcgtggtcttcttaccccaggatcaggttgattctaagtattaattccttgagtcgctctagccgctgcaacctctctttccaactcagcattttgtcggttagatttggctaagcattggcagagttgtctaatttccaattccactaatggtacatacctagttggatcatacgcatcctcacttctaggtacatatcctgcagaagtattggtttcttcattcctcccttttgggttttgattatcaccaccataatttctccttgaacgtgttgttctagaagtatggggtctttaagaacccattggctctttcccagggcgatgtgtagtttcctcaggacgatttccatcgttttgattatgatcagccatggatagatttctgtttgcaaggagggattttttttttttgagttttatcactaaggctctcaataaaagcaccaaactattaacgcagatttttgttaactaaaaataataagcctttacgtaataaatatatcacaaaaatagtaataaacgattgaataactccaaggattttacgtggttttgcagttaaatctgcatactccacgagtctatcttattatgacatttttcaaaagaatagatacaatatacaattgataatctttttctctcaaaatattcatctcttttctctgtagaatctttccctatttataggaatataggttaacagttatttacaatcgggatcagtttaaaatgtaaccgttcatgaaacgttgacaattcccatgtttcattcaattacatgtaagataatactaaataactacttaactgccttttgttcttatccttatcgatgattaatgctgatttagacaattgtatctcgcttaactctgagttattatctttgtctatcttgatgtggaaaaaacggtaagtattaacagatgattcgcctcgtcaaggctctttagttagaatcgcgaggtgactgtctcgctattcgtaacccgaggttcctttttatgattttatccactcttcttttaataaatcaattatcttctttggctatgtacttcgaggtaggtgcgtatctcgtcaatataagtttcaatagtcttttatccttaccttgctaaagactattgtggtcaatgagttatgaatatcttctactaaacctttgttaacgaactatcttatcttgcatttaatgatataaaattattatactaggaggttcatattccactgcaacacacgtgtcactctctgaaatatagccgaatttcaagtataacaataaaaaattaaaaaattaaaataactgaaatttaataaaatatttctatttgctgaaaataatttaagaaatttgaagttttgacaaaatttgaaaaattcaataatatatgttgtatttatctaagaaattataactaattataagtaagaaccattaattacacatacaaaaactatgtaatatattttttttttgaataaaaaactatgtaatattaattttgtacaaactaatataaaagaaataatgatctatagactataaataggctctaagtgcatgaccacattcatttttaaataatgtgggatttttctcaaaataactcactaatgagtgaaatcaataaaatttgaaaaagtaaataaaaaatataaaaaataagataaaaaaataaattagaatagaactcatagcagatgccacgtcaccgccctatttttcttttttatataaaaatatagatactagtatgcacaatgtacatatacttattatatttttggtttttatttatttatttttgaaagaaatgcaaaatttattaagaaaaatctgctgttacagaagaactcaaaaatcgaagacaagcatctgtacaaacacaatctcctaaactagtaacagaggttgccagtgtatggttaacaccattccctgattgcagaatggcactgcaagaaccaccaccaacaacaactaaacaagaatatatatctaataaaatagactgaaaactaaaattaatgtgaagcttattagtccaaccaattgcaacagtagaatcactattaataatggagatattaaaaccaaattgatatgcaagagtcaagcccagacgaatggcaagcagctccgccacattagcaaagaaatcaactaacacacctgatgaacacgccaaccaaaccacaccctctgcatcccgtatcacttcccccaatccaacaaagcccctccctgaaatcactgaagcattcgtcgctagagcaaattcaagaggaggtggcatccatcgagtagttcggtttacaactgggtttgcaaggcccaatcccaaatgaaggcctcgccgatcatactccttaaactctgccagatggttattggctaagtctggaataatattcaatctcgagtgcttgttgccaaataatgagtttctatcataccacagccaccaaaaggttgtcatcatcaattcaaaagcctcacgggatagcctgtcaatgagtaacaggaaaatttcctgcattggtccatatgcacatcaacggagcaccgaccacacccccaaccgatgccacattggaatcaaaccagaacagaaaaatagagcatgcttaggagtttcagcttcttcttcgcaccgagaatagcaaaaaggtacctgaacttttcgggagatgagttgtgttgctactggtaaagctaaatggaacatacactaaacaaacactttcacctgtggtttccaccaacgagttaacttggatgaacttgcaactccctccttaacttggagcgaccatgccaatgagtagccactcttgacattataaaccccatctctatcgtagtgccagtaccaaccatcttttgcctcacgcctcgctaatggaatagacagaattatgtccacatccattggcaaaaaaacttgttgaagcttcctcacattccaagtaccgaatagaagaataaattcactcacccgacagtcatcattaattctcctcgtgattggctgaaaagacctctgacgcggagccataggtccttgaaagccctaacttgtgttccatctctaatagatctccaaagaccgtacttaagcaactccatttcccatatcaaactcgaccaaagatgagacaaatgaacttttttcatggcctcaaggatagagcaatttgggaaatatttatgtttcaaaattcgaacaggcaatgaatctggatatagaaataacctccatacttgcttggccaaaagagcttgattaaaaagttgaaattctaaaaaccaaccccacccatcgacttgggctaacatactgtttcacattcacccaaggaatcttcctttgatctccagatgaaccccgccaaaattgtcttacaatagactttaatttttcacaagttttcgccgaaagcttaaagacactcatcatataagttggaatagcttgaagaatagatttgataagtacttctctcccaccagctgaaaaaaatttcacttccatccccgcacacgcttcctaaccttctcacagatcccctcaaacacctatttttgtttctaccaatcactgtaggtaatcccatgtactttcatgtgtagccactgatgtcaaccctaaaactctcaggacctcatcttgatccacctgttgcacattcggactaaaagtgatagtagatttctcaaaattaatcttctgtcgtgaggcagcctcataagttagaaggatacgctttatagttttagtatcacctctattagccctaccaaatacaaggctatcatctgcaaagaacaagtgagtaacacgtggtaccgatctagagcacctaaaccccattagttcagatttgcatcctgcaagggagaataatgaagataatgattcttcacagaagaggaataaataaggagataaaggacatccatgtcgtaaccctcttgtcggaatcactcgacctttagggcgataaccctaacccaaccctcagcaaagccaaactgtcacatcatactggctaagaacccccattccacctggtcatatgctttactcatgtcaagcttgagtgccataaatccctttctcccgttatttctttttaacagtgaatgaagtagctcaaaattgaccatgtatcaaatgccctgagacaaatgcactttggaaagatgagatgaggggaccaagaacactttcatcctcagtgataaagctttagtaacaattttatacattacacaattttattttaattatgtgtatttttagttatatattttttcaaaaaaaccagaaagatttttttaaaaaaattacaataggtaaagaagtcacatattataaacactttccctattttattactttttaaaaaactttaataaaaaacatatatatttaaatatgtgcaaaataatgatgatttttttttaaaaaaatatgtaaaaatgcaataatagattaataatttttaaatatgtttttttacaaaataacaatacaaagatttatttagatatgtctcgtttaaatttaacttacaattttcgaaaaaagaatagcactttttattttatacctaaatttaatataagaacttaagaagatataatatgatgaatggttaataaatttatgtctatataagtgaatctagttatgactcgataaaatatataaaaaattaatttgagctgcaattaatagggccatgatcatcttgaaaactccataacaatggttcattatacatgtatccgaccctagagtgtgccaaaagccattgtaacacagaagacatcaatttttataacagtggaattaattaattattgtactaaattttcttattaatttaggtagagtcaagcatcatcaacttaatccaaatgattaattacatcgacatcatccgtcacctaagttttctttctttttttttttgggacaatttgaaagaagatcatctcataatattaaaagtcaacaaaactatgttaataagactactctgattaatctaataccctcttcaaataactttctacatttagattacatataaattaatattatattaatacaattggctatagttatatgtttagatacgtatatgtagttaattaagaggtttaaaaaactataggagagcttattttcattattcttaattaaggtcctcccaatcaaattaaataataacaatatttgacaacttgcataataataataataataatatgtctctccataactaaaggccaatatagaatagcttattataataattaagaagaccattctaattattatcccttaatttgtatatattaaatgaaaaataagatcagccatatcccatatcatattatatatggtttactttctgtcacactcaattatatgtcacacagctgtgacacaccttacaatatatataaattaggttccaattccaattacctaagatttttcaaccgcttcgtaagagaatgatattaattatgaggtaaattgtgatataaatacatgttttatattttatacacatattttaattttatttttagaggtaaaaatattcaacaatataattctcttacatttgttgctatacttttgttaactcataaatatgaatacgtagagggtctaaatatattaaatttatttattttattttaaaatttaatatttttaatattagaaactaaatgttatttatttcaaaaaaataaaataaaagagatgcaatactaaattatcatagctgagtaaatcagtacaatatatggaatatggttatcgaattgaagtgtcaatactgtaaagtccttttttggcaagttaggtg

SEQ ID NO: 16029 - DNA, 6962 bp, Cannabis sativa
tcccacatggtttaaaaaccattggtgatatagatctaggttatatatagatcactattttttcactttaattcatctcaaagttagtatcatttatttatttatttttatataagtgattgaagaacttaatcatcaattaagtataatttttataaatgaatgcaaaacacattctttatattttttaatctttgtcaagtatttcatataaaaagttttttcttaagagttttttatcgtaattttcttttaaatatatttaaaataattaaagataatttcttaatcacccttataacttttttaaaatgaaagaagcatgcacttttgcatttttcaaaatttgtgaattattaaaaattaaaaaaaaaatcatttaagttatttaacaaatgaaaagaaatagatcttttttttattattattttaaattattaattttagttgaatacatataaaattattatatatataaaataataaaaaattattccaatttttatttagaattaaagagaaaataataaacacatgatttataatattttacttatttagtaaaaatattaacaactacttaatatatgaatttctgaaataaacaaataatcataaattaaattttatttttcaatgattataacgatcaagtgagcactcaaccaaatttatacggtacttatcatcttaattaccacaaaatattgagaccaatacacattcattatagaaataattagtcatatgaatcatgactttccttttcatttaaagtagaaattaacacattcacataatttatcaaaattaatcttcttattacacatttcatagataaaaattctatcactaatatttttttatataaaatccttatttttcaatttttacaaacatataatgttatgacaaagtattttacagttgtcatcctacattcacatttgtggagaaaatgttctacctataccataaaataaaatgtaaaaattttcataaatcgtatgttaaattatttctttctattaaaaaaaaggtctaaacaatattttaaaaacaacaacatcatcagtcacaagctcagtttattaaattcaaaagctgttatcttttttctttattttattataaaaacacatgcaatttctttgttaattctaccatttaatatttgtcacaaaatcgttatctttttatgtattttaaaattatgttttaagttttaatattattactttgtttataatacacatcaaagtattatatttaagattatatcactcaataaatataatatatatataatttacaaaagttaggcaacaccgcgcgaagcgcggcttagttgcctagttttaaacaataaagaagagaaactgttgtgtgctcttatttgcataattttttagagaattttactacaattttctctttttcataatacttagaacaaccctagtgaaatttacttttaatggtgtcagatttcggtaggatattcttgaatatttttccatttactttttctcttttgataagttatttcatcatcaattagttgaaaaaacataaaaggtacaagcaaatacaggaaatttatacagctaattaaatttagtggctaaatttagtatctatgtatatacgcataattatttaggagtaatagataggagatatttcttgcaaaaaagttataaaaaaataaaataatgatgaaattatttttcttattaaattattatgaaataaattataaagaaactttataattgaggtggagaaaatcccacctagtctttaccccttctctattaaattattatttttttttttttgctgaaagattcaaattcattaagctaaacagagaaagtgagcacatggggactcacctcccagaacggaagataaccattacagctatgagtcaagccccaccttgcaagggtgtgagccgcctcattaaaaacacgagaaatccaaactacaaagtgcctagtaatgtcaaaatcattacaaaatttattgaaagtaaaacgaataccccagtgaggactgcgaccctccgataaaccactcacgagaggcaaattatcagagtaaaaatcggcccccacctcagcaaggtgcctaaccaaactaacaccaaaactcaaagcctccaactcaccttgcatcacagaaacaaacgacaccttcttcgccccgaaccacttaacaacaccttctgcatcaaagataaccgccgccacatcaccttgatcctcagcataagcaaaatccacaaaacatttcattctccctggtctcagaagaccccaacgaacaacctcaattccaccacctgcctctatcgactccacattctgaaccagcagtgaagaatgttccttaaaacccctctcaatcatttcacgtattccttcaaaagccatcggagtgttattatgaaagataacattccttaagctccacgatttatagtacacaacagcaccataaagaataaaatcctccaattcaaaatgcgacaaatcatgagagaaaggggattaagtagccattctaccatgtccttcccactattcaggtggaagttgtctatgcgaatgttccaagtgctagaaaaccacaaacaactggtgacattacacttagcaacaaagtgtttgacagtatctccataatcttcacaacacaacacaacacacactgacccggaatggaacttgaaatggagctcagtttgcacccaaaaggcaaggcatcatgataaagtttccagaggaagagtttaactctttcttggagcttagctttccatatccggctgcacgtggaatctcttctgtgaaaacgagtctcattgagatcctaatacgcccttttgatactaaattctccatcagcagacgacctccaaagcagcttatcttcattcgaaagggatcgaaaattcgttcttgccagctgttgaaccgtctctggtatgatccattcagctaaaaaatgcaagtcccatccttccccagattagtgcataagatctccaacagtatttacttcaatgcacctcggattgatgtcaccagggccacagattaatccgtccatacttgaccaattgcctccccaaacattgacttgcgaatctctgccaatagcccaaacacttttctcaccgatgaaagtttttgttgcccaaatccccctagccaccggggatgcagaacgaaaaattgtagaggaaagaaattctgagcttctacaatatttctccatcaagactgccttccataaagtccaggactcacccgccataacccaacctaatttagcaatcaggcagaaattaatgtcagccgctctccccataccaagacctccacaagattttggtgtgcacaatgtttcccaagctttgagagccatgaatctgccatttttagtgtctcatttccaccagaatcttcgtagaattccatcaattttattagtgatcttgcgaggtaacataaaaactgacatagtgtatatcggaatcaaagccaggacactattaatcagtagttctagccgcctgggatagcaatttggcccaccacccttctaaccaagagcatatcttctcaacaatgaactcaaagtctgaacagcccctgccaccagtggtaaatggatttcccaggaatttctcacctctagccatttcatcatacccaaagtaatccatgatctccccacgacgggcatcagaacaattcttagagaagtaaagtttcgatttttgatcattgatcacctggccagaccacctacaatacttatccatcacccccttgaaagatgcaacgttgttgcagtccgccttaaggaaaacaactaaatcatcagcatacattaagtgtgtaatcgcctggccgtcaacacctataggataaccaatcagagccccctcaatctccttggctaagaacattcttgaaagaacctccccacaaaggatgaacaacaaaggtgaaagaggatcgccttgtctaattcctctcctcggaaagaatttcttagtaatacctccattgataagcacttgaaaactcactgaagagatacaatgcctaaccaaattacaaaaataattattgaatccaaaagcattaagaaccttaaagagaaaacttcattccaatcggtcatatgccttagacatgtcgcatttgatgctcacaaaggcactccctccacaccttctcttcatatcatgaacgatttcgtttgcaataatcgagtttttagcaatgtttctccccttgacgaaagcagcctgttgaggggatattaacttatccaataccgtactcaatcgattcgccagaatttcggagactatcttgtatgtagaattgcataaactaatcgatctgtaatcattaaacctttccgcttggggctttttggggataaggacaatgaaggtcctattcacctctttgcagaaaatctcattgtggaaaaattcctgaacaaaattaaccacttgcataccaaccatatcccagtattgcttgaagaattttactgggaagctgtccgggcctggcgacttcaaaggaggcaaagaccacaccacccttttaatctcttcctcagtaggacacacacttaatctttcattttctgcctctgaaatgctattcaagatgtattccgatatctcctcatccacagaaggattagaagagttaaacagcgttcggaactttgaccgaaaatattctgcaatgtttgctctctcttcaatagtagtaccatcatcttgtcttactgcccagatatggttacgtttacgcataaccacaatagatgcatgaaaaaactgggagttcttgtcaccttccttcagccgattctccctcgatttctgtttccatatggactccaaccgattctccgcttcatccaactctagcattatagtcccctcaagctccaaattttccttcaaagaagggtgattttgcacctcacttagaagcttttcaagctccttcatcttcgtttggcagtggccaaaaactaagcggttccactcgcataaagcctttgcagtagctttaagtttatagcagagaatgaagctatgatagccttccacaccacttttccaagtattttcaatgatcctgtgacagtcactatccctactccaagcatcccgataacgaaatggagcagtaaaattctctctttccattcgtgtatccaaaataataggagcatgattagagtggcgaatcgccaagtttcttaccccagccttcttgaattgagttaaccaatcaggagatactataacacagtccaaacgctcccaaattaatctttcagcttcttggccattagtccaagtaaaaagagccccaacgccaaccaaatcaatggccccatggttgaagatgaaatttcgaaggccttcccattccgatctagtaaccgctctccctccaaccttctcattagcactaagaactgaattaagatcacacataaccaaccaaggggtcgacaagactcccataaatcccccaaggtcattccagaaattcaatctgtcttctctcgtaggtggagcgtaagtaaagcatcccacccaatccgacaagaatctatctccaccaaacttagccacaattttattagtatccatattagtaacttgaacatcccatctctgtctccagaaaagagccagccctctagacgaaccctctgccgagacttccactccattattaaaacccaaccttagccaaataacctccttgtccaacgcacttctcttagtttttatcagaaaaatgacgtcgggattggcactccgaattaaacttcggagggcatcgactgccgcaggtttgccaagcccatgacagttccaggcaaagactaacatggggcattggggggcatgtgaaggcccgcctcctcggccacaccaaaatcctccttctccttgtccactttctgagttccattctctgtaatgctccttacatcagcagtaatgtctcctgatttcctttcaacatcttggctcccctcttctgcactgatcccttctctatccttctgagattttccaaccatgttggaacctattgaagcattcaaaggatgcctggattctgtattcacattccctgggcaaactttcttcctcaaattagtgaccctttgctccttaataatacttttcaaaccccggcccaattcagtagagtttaggcgcctctttttcccattacccagagaacattcctctatcacaggcccatctttagggaataggttaccatctttaagaggtctaatgggccttgattgtttgtggaccgatttagagttagagcccaaagtagctttaaataccatggcaagatgatccacgtgctgtgaatccacctcaccaattccgttaatgttatcctctttttttgaattagtggtgggaccactgacaacaccagtacaattttgcgccaactccaccccacctacctcgtcgtccttcccatgcacattggaattatcttgacaattatgcccttgactctacgccggcatatggcccagactcaaacattcctcctccatcgtttctaacactggctctgcctcttcaccaccattagtcacaggcaggggagtagcttccacctcccttttggatgtctccactacagcttccatatgtatctctgtgcctattaatgctggctcaaaattttcctccccaaggatcaaattttgcctagcttctgcttgaaactgggcatctgctatttccttattcaacctttcttgctcatattgttcatagttcaaaaaatagtcttttgacgagatcccaatcatatccatggtccatacattggggtcgttctgttgcaatcatc

SEQ ID NO: 16030 - DNA, 4734 bp, Cannabis sativa
  modified_base (3180)..(3186): a, c, t, g, unknown or other
tatatataaatatatatattaagccacgttatagaggaagaaccaacttccattattcttatatatcttttattcaatagtcaatgccatgagttttcaaaaagaaagtcaactaatgccatgtatgtatgaacacaaacaatatataataaaaagtcttattaattaagatgacacaaagtcattagatataataaaaagtcttataaataattagtcttacattatatcagtttattagtgagttgggtagaaaataattaattttgattagtattaataattaattattttcactgatcattacatttttttcaagtgagtttgggtggggaagggtgatacatgcaataattaagttgacatttcattattatatttaaactgttttctaattataattgaagacttaatcacctatgatagccacaaaattatttgtatagcgattattggtagcgaccagggacggacccattaacattaatgtgaggctatatagctcctactaacaaaaattctgtctttttcattcttcttgagctgtccccgcttagaggagtgggactcctagagttgagagacgcaacgaaccagcaaaaaaaaacttagagaaaaaattaaatgtaaatttttcaatttaataattatagattaaaatagtaaaaaaacctccacaaaattagataaatttaataagagtgattattatgtaactataaatattttatttatgataaataagccccacaaaataaaaattcagactcggtagcgacaatttgtatagtcattgtatctaattagcgactattattttagggcttatatattgccactacaaatataaaaatgtaaaatgagtttgattgctttctcagtcaatttggtaataacaacataataaaataatgcttatttctcatcatatatagcattttcatttaacattaagttgataattaaatatgtaaaaagacaggaagaaacaactcaaattaagccctagctctctctctttctctcacatgatataatcatgattatctgtacatgcttcatgcatgcatggatgagcttaattattttattgaaatagaaatacaaatcaccttattaattggaatcaaattaaaacatagcacgatgaagttccgaatcaaatattgtttgaatctatcaaatcaatattgcgtaatgcaatttttaactaatgatggattattatcatcttttggtagcaggggttcgctttcggcaatgaaatccatgttgaatgtattcaaacccgtgaaaatgccgtcattcagcttgtggatgatgacactcccatcgcgtagaatatcgcgctgagtgtaagagaaaggaacatcacacattccttgtgtcgctagaagagtaactgtggttctactcttgggaggcactataaccgtgtacgtagactcgggcagtttcgactgtcttagtggtttcccatccaatagtcgtggtaaactcgtatgaaaatccgatactctctttcgcaaccagtggaatttcagaaacttcaagagatgtatggacacctatcttcagggaaccgctgacgctgtaagtagtagatcttgaagtcttgtaggaaaacgtgagggttaaagtgttctccttttcctcgtcatagttttgggccgatgcatgagccttctcaagggcttggacattgtaaatcctgccctcatctggccgaaactctattccatagatacttctagacccgacggtatccacaactaccaactttgcaaaagatgaaatttcgggatcaattgcgctaagaccactctcatattcattagtataaagcttcgcaaatcttctcggctcactagctttaacgaggagggccacagtgttgtcggtgactttgacgggccaaaaaagtgtattgtcgtcactggccgaggggtcgtcagatgaagcacgtatccagttgttttcttcaagcctaaagaactttccagtagaattgttcttaatgcggatataaccatcatagacgctgaaaatctgatgcgttacactgtcatcagtaacagcatccttgttgaacaacataacatggttatcgccattagggctaagatatttgttgttctcgccaaggaaggccaaagtattgtttttgggaaatatgacaagcgattcccaatccaagaatcgaaagtattcgtaatattttgaagatgcatacaagagattactgtcgtagtcttgtacaacaattcgattagaagcaacatgtgtaaaacagtaattttcaggcatatttggatgttcctttatctcgaaccaagtacatggttgttcaggcgaatcttcttctatggggtcctcggaggaggcaaagatgaaccacggatcatcatttgctgcatccttcttcacttcaatcttcaagaatttgttgttgttgcagcaccttatgtgcaccccttttggatttttttttgcacttatgaattcaaatttgagcaaagggctcgaaatgtcctgttcaccattaatcagagatgttggtggcactccctttgcgatgctctcttccttacttatttgtctcaaatagatgctcttcttctcggcacacacgtagtctttcataaccacaaaccttggccatccagtagataatgtagatgatgatgatgacattattattattattaaatgatatgtaaaattgggtgatgagctaactaagttgtatatgtaacctatttatagaccaccaaaaacaacaaatccagatcatcaacataacagctaatattaattaattattattattattattatatgtatagcaaaatacattgactataattaacttaattatccatatatagttcccaaaagccaagaactcttcgttttattccagaaaataaaataataattattagtgttatgcactaatagactttatttatttaaatacactacaaaaaattttatttttaatcacaacaaaatttataactaaaattataatcattaattctatgttgtgactaaaaagtttgtgactaaatatattaatcacaaaaattacaatttgttgttactaaatatgtttttagccataatacttcttgtgactaaaactaaattagcgacaacttgtatttaaatactatnnnnnnntcacaagtaactttttgttgtgactaaaaaccacatttaatcacaaaaaatttatgttctgactaaaaggttgtacaccaaaaatagttttttttagtagtgaatatactattgctgaaaccatctgttataaactaaaattgatgaccacttagtaacgagtggagcattgttatttttacagacacgattttttaatctttttcccaaggggctgtgacttccaggaaaggtcgcgactcttgctcaattttataaaattgatgcaattttgaattttgttgcaataactgatgatatttttgtcataactctctcgatatagctcgaaattggatgattcaagatgttttgaaaagctaaaagagagatctagaacgttcatccagaaagtttttcctggaaatgaacgaatcgtaataaaaaattagcttgaagcttcaaacttcattttcaatcacaaacatagcgtcttgagcatctaaaatttagaaattttcacccattttatcttacaactccaaaattcatttaaaatccataaaattcatcttatttagcatgttttctctcatttcaatccataagatctactttaccgccattataacatgaaacaagaataaaacaagcataaatctgaacaataaagcataaaattaaatgctaaaaacacacactaaaatagaatctaaaaatgcataaatataaacctaacaaattttcccaaacttaacctttactcgtcctcaagtaaagatctagttaaactgacaaaagcaaacacaataacgaacaagctaagccaccattaccatctacactgttttgccactactcatgaaatctcaattgcattataattaaccataatttcagtttaaccactttgaaaattaaccttaatgctcaaattaagaaaattaacaatataatttataaatgatcacaataattggattccattgtgtatgctcaactcaaaccaaacatatccacaaactaatttttaatatacttgtatcatttaaccttctccactaatgtcaataacacatatctcattcgaaccatagagaacctctaatacctcatcaaccgtcttaccaacaaactcgaaacctcaggacttggtcatacaaaacacatcaccttatgagtttggatccaaaacggagcaaaatcaaagaccatctcttcggatctaaaacgtcacattatatataactatttttaatgtaaccattgagtatagttactcatgtatatatattatattttttttttgaataatttattatttttttataaatcagttatggttgtattcctccaaaacacttttacaacttaaacaacacctctcaaaagcctgattgtatctcaactacatttacaaaacttcaaaccattctatacccacccactacaaaaaaacagctacctttagtgacatttttttaatcacaacataaaatttttgtgactaaatgtgattacttgtgactaaaacatagtatttagatagaagttgtcactaatttagtt

SEQ ID NO: 16031 - DNA, 3476 bp, Cannabis sativa
ggagggcaaaaccattgatctgaagattgatcttgataatcactttgtggtagtggagaaaacccactcagcaccagccgcctgtcaaatacaagaactagaggaagatgatgatcggacgaatactctatatactcagaatcacggaatggatttttgctttggggcctcggagacttgcccaaaaatgtctccacgttcgccatgaaagtcctagcttggaactgtcgtgggctcgggagtgccacgacagttcgacaattggcggctctaattcgtcgtcataaacccgagatgttactgttatccgaagcaagaataccattacaaaagtttgaaacaatttgcagaagacttcatttcgaggaaatcgtctatgtcccacctgttggtttgtcgggtgggttgggactctgctggatgaaaggcgtcaaatgcagcatcaactctaataataagtatggaatcatgtgtagtatttcttcagaccccccaggagtgacttggaatctaattgggatatatggccctccgcacgagaaggacaaagagaaattttggaaggaaattggcgatttggctttatcttcatccaacccccttctcttcattggggatatgaatggcacattacgtgattcagaatgtataaactacaccagacaaggaaattcagcaaaatatgcatttgatttccggcgtatggtggatagagctggccttattgatctgggcttcataggccccccgttcacttggtcaaggagtaatacacaagccagtgtaggacagagactgaaaagggccagactcgatcgaagcttggcttctatggagtggagaatcttattccctgatgcgattcttaatcatctgtcggcttccacatcagatcatcgtcctattctactcgataccataggaggatacagaggtaagatccatccatttcgatatgagaatatgtggtcaagagaccaaaggtgctactgggtggttaaggaagcttgggctaagagacttcacaacaacccaatgataaacttctaccgaaaagtgaagaatactcgcaacaagctcagccattggaacaagaatcaatttcgaaagattaatgttcaaactcaggaggcaactgcttacttgcaagaaattgagcaatctaacccggacgatctgaatatgattgaaagtgcacgtcaacaattaagtgaagctctgcttcgagaggaaatccactggaggcagaagtcgaggattcaatggttgaaggagggagatagatgctcaaaattttttatggcctccaccataatcagacgcagaagaaacttcattcaatgcgttaaggatgctgaaaaaggaatctggattcgggatcagaaggaaattgcggagtgttttttaaagaacttccaggatctttttaagaaggacccaaactgctctaccccacatcttattgatcttttccccactgctattttacctgaggagaatttgatgctaaatgctattcctaaccaagaggaggtaaaggcggcgatagctgaaatgggaaaggacaaagcgccaggaccggatggattccccacaagcttctatgctcatcattggggtacaatcagcagcgacctccatgaaatggtaactcacttttttactcactcagagcttcctcatttcataaatgatactgcaattgtcctcattccgaagaacgacacccctatctatacaaaagactaccggccgattgcactttgtaatgtggcctataaagtaatatcaaagatacttgctacaaggatcaggggaattcttcctaaattgatatcgccaacacaaacggctttcgtcaaaggaagatgcataaccgagaataccttgatagctagagaggtggttcactcgatgaagaggaaaaaaggaaagaggggcttcatgatgattaagatagatatggaaaaagcctacgacaggatagattgggatttcattattgccgtcctcgatcaaatggggttctccaattgttttacaagttggataagggcttgtatatccaccaaggaaatcaagttacttctcaatggctcaattgaagggaaggtaattcctgaacggggtttacggcaaggcgatcctttatccccctcgctattcattatagctgcggagacactttcaagacttatattcagtaaggaaaaatcaggacaactcaaaggcttcaagataggaaggaatggtgccacagtgaaccatttaatgctcgctgatgacattgttctattcggccaagctacactcaaggaggcaagggcttttaaggagtgtctaaacaactactgtctatggtccggtcaatctttgagtgctcagaaatcttccatccatttttcgaaaggggtatgccgaggaaaaattcaagcgattacccagctcttaggcatgaaaagaatgcctcctgatgcaatctatttgggactccccttactcaagaatgcaagaagaacagaagagtattccccacttgttgagaaagttcttggccgagtcaaaggttggaagacaaagcttctttccaatgcggggagagcatgtttaatcaaatctgttggatcatccttggccaactatctagcttcttctgatgctatacccgttactactgctaacaaaatagataaaaccttaagggacttctggtggggagatacagaagacaaaagggtgatgcatacagttgcttgggaaagactttgcaagccaaagatccacggtggattgggttttcggactaccaaagacacaaatatggcgtttttgatgaagtgggcttggaaattaattgtagaagacaacagcctctggtttaagattgtgaatgctaaatatttgagaaacagagatttctttgatattgaagcacattctgcagactcaagaatgtggaaagcaattctaaatgctcgccagtttatccacaaaggaatctgtagaaggatcggaaatggggaggaaacttcaatttggttccacccttgggttccaggaggagatttacaacctgtaccagtgaaagatgcaacggaaggaattagtatggtcaggaattttattactgataatggttggaatgaagatttgataagacaatggtttaatcaggaagatgccaatagaatccttaacatcacattgcctaatacccctgagaaggactcatggctttggctgcctgaagcgaatgggcaatttagtgtcaaatcggcctataggatcaccaagaacatcgagccaaactcaatcgacaatgagaagtggcgtctgatctggggtgccaaaatacataacagggcaaaaatgatgtggtggagagtgcttgccgactgtctgctcactagaaacaaaattctcaaaacatttggtatctcagatccttcatgtcctctttgctcaacggcaattga

SEQ ID NO: 16032 - DNA, 6694 bp, Cannabis sativa
  modified_base (6581)..(6581): a, c, t, g, unknown or other
cgccgcctcagccgattgtcacgacgagtagtaaattgggtttcgtgcgaaaccctaacagagcgagttcgagtctcgttccgctttcttctgggtctcctgggtctggtgatggtggtggtgatgacgtggcggagaagaagaagaagaagcagaagaaggaggaagaggagattaaggaaattgtgggtaacgattatgatgatgatgatgatgatgaacaggttcaaggaatcgataatggtgatttgggtattgaagaagcttcatttggagaaaatgtgttggaatttgagggtagagaaaggtgggtttttctttgtttctctcattttaattttatttatttatttttttctaaaaatctcaatgaaattttgaaaattattttaatttaatcaattcaaaattcatgttactaattgattaagttacaattcaaaataatttttgtaccgttttaactgttgttttagccgttgaagctcttccccttttttttcttttctagggttttgttttctttgtcaaaccatgaatataggaaaaattcaaactttaatctttggggtttctcctttttgtgtggactaattgattcaatattggctagcttagcaatatagacgaacaattttaaatcttttttttttctttttttctttttgtaagtattcagtttcccccttttcctcattgttaacttcttttcaaagttcatgtctttttttaagaaaatatattataaaacttgggttaataattatataaactaaaattatagaattggggtttagaaattttgggtctctgcaaaatcattatattttggcttaaccaaactcaaactgaaatttctcttattattttaaaatggtttttctctgcaattgttatcagagtcaactgatactttcatttcatttatacgtaaatgtctcagctcagactaactttcacaccttgaagtgaagctaaagcatttatttttatttttttggtcaactgatttagactttaatgttttatcagattttcattgttatctgctacaaccaaaccctgttctctctcgaggacatttatgttatttagattattagtgagtttagtattccataaatcttaaaaagattgtcattttgagattttggcttgaaatattgaccaaataggtttcttcctcaactgttttttaggacattttagtgaaaaattaaaccataatgtttgttgttaaggaattgtgctaagttattttgtgatttaactttctcttattacattttctggaaattttctgtcagagagagagagagagagctgctgtttttctagtgtgatttcagagtgtatgagaaatgaaaattaatagtttaaaaaaaagtgtcagatgctgtattttcagtatggcacacacacaaagaaaacaaagatgaaggatctaacccttttggggggctataaagctgagccaaaaccaagtgtgaatttttacagattgaaaatgcaaaaagaaaaaagaagcattttttttactaacctaaaacagtggttgtgtgctagtaactctagtattaatgcatattgcgtgtgttggattggagttgttattttatgcatgattgattggtgggtccttaacagttaaaattaggatcatacaaaaattttgataacccttttctgctatgctaatttgcatgattggggttttgagttaggtaacagagaccaaaagtaacagggtttcgtttgattctgtttacgggttttttttgaaggagaagccctttttcatgtttatacttaattttcaactaaagtttatggctttctgttttcattcaaaatgtgccttgttttttcttttgtcttgtgtaaagatgcttttttgatacattgcttgtaattcatcatatactaatgaatcttttatttttttttgtgacaggagcacaagagaatctactccttcgaatctgataagggatccagatataatcagaacacctggctctactaccaagcaaactaactcagccgaaactactaacaggagaacacagaactcgtctcagagacacataccaacagcacatgaaatggatgagttttttgctggcgccgaagtggaacagcaaaaacaattcattgacaagtaagcacaccagttttcccgatgttttcgaagttttgaaccctttttcaatttcttgcatctgaacataacaattggactttttttcaatatcttcaggtacaatttcgatcctgtgaatgaaaaaccgctccctggacgttacagttgggagaaagtagtttcctagaagacattaaagcatgtcccatctgggctatcctttcctgcatattttggttgaatcttgatcttagaagattttagacttagcaggaacttagttttttttctctttttttagttgtaaaggtagatggtattatttccattttccatcaaccttttcttttttcttttttttacttgtaaagaattaggagtatcaaagatgttgtagacttagactagactaatggtctgtaacataatacaaatcacaagtcctttgtctaacagatcatcttcatcatcatcatcaagaggggaaaatcaagaagaagaagaaggagaaaaagggtatgaagtttttagtgttattaggtttagtgttcagtcagttaggttcactaatgtatctggtacagataaaaaaacaagactttatttactagattttgagtttctttttgtactgtatttaactcctcctcttctttgtccataacttgttgtactaatgggaactttaggaaagaaaataaacataccccatttccccctctcttgacatttatgtcctttcttctatcttcttcttctatgttaaaaattttggccctttttgactctctctagtagtgggggacaatgcatatttcaacaaaccttttatgacttagcttagctaccccacattgatatgcatcaaaataatactataattattattattatttgagaaccaagaaacctaatggttggtgggttttgcttataatggtggggtactttgtttttttttttttttttttttttatttttatgttacctaactatgtatagtgatcacaagtttttgtactctacttgattctttgaagaatggccaattatgagctatgaactagttgttattattttattcaatttctttaaagtttaatgggagtgagaatgagatgagaggttaaagtttagtaaagggttgttgtttttaattgaatattgagtataagaaacttaaaaaggaaaatagaaagttcaatgcagtaaagtggtaataaaatgtcaattaaatagacacaaggaaggagattccttttctctttgtttttattaattagtgtctcttcaccccaaaacacccatggtaattgtagtatatggttttgggtagaggcaaaggagaaaaaaaatactatctttggtattgggattagagtaaatagtggtataagttttaagtttgtaatgtttattttagcggtaaaaatacttaatatttgtaaaattattttttttttttcagtttcatcagtatagactttgttttgaatttattaaaagaatatttagaagtaactgatactacatgttttcgtttagattcaataatctagaatttgagctttatatgtgtcatgtttaagacaataacagagcgtgtacggacaaaattagagaaaaactatatttttataaatattaaatatttatgccactaaaaataaacataggtttatatcacttacaaacttgaagcttttaagtatttatgtcgctatttagctttgggattatgaagaacttttttggtacatgcaatgcaactttttctttttcatgttagtttttaaagaacataatttagaatggtaattagggtactaataaaatggattaagagatgcattatgttcatttcagtcgaattaattgttagattgaatcgacggttcataaagtaattgaaagcttaaatacatcaaaaatgatttatagtacattaaatcttaatctaagtatatacttgttcgatactgttaaatttttgaagatgaattaaaatgtaaattttttttttgtctaaatttttatttcgagatcatacttgtaatattttattttatcagtttttaaatttactttaggaataaaatgggataagataattccaatgaaattgtcacattcttaaatttacacaatagctgtgttgaaatgattactttccatttaccaaacatgcacttgctcaaataattttatgaaaaattccaaaagaaactaagagaatttttgtctttcaaaattatatgttgaatgattaaaaaattgtactagttattattatagaaataagaagaagaattgtgaatagtgtccatggcctgtgaaaaatgttttcatgtggaattgagaaagaaagccaactgtcaaattaagacagcaaaaacagtctgcaaatgtgaaaactctttcattccacaaaacaaagttatatataatataattaatataagaaaaaagattcccatcttaaccaatcatctactatcttcttcacaccacaataagtaatagtaatctctttattatatacatacatatctatatgtatgtgcatatacatacataattacatattactaaaatatgttaactgggaaaaaatttcactattataatatttacttttgtatttatgaaattatgaatttaagtaaagataataatttttttatttatagtttatttataattaatttataattgttatggaattgatttttcgttatttctttatttttgccgattattttttgtaattttaaaactttaaaattataattttgtaaataaaaaaatttaatcgtaaaaaattatttatagtaaatacaatattggaagtatttatagtagaagtatcattttttttttcatttctgtaattatatttatatttttcgataattgagaaattatataatcatatacaaaaaattagattataaaagtgttaaaataaaagagcgttgctattaggcatcaaaggtggctaacactgcctagaagtagtatcttataaatagttaacgatgttttataatagttattacacttgtatatctgattgtttaaattatgtttttggtgctacaatagattactttattttttttaaaaaaaaaaactaatgaaatatctaaaaaattaaattataaaatgtaagtgtttaaaagtaaaagaatatttttattaggcaccagtattaagcaccatttaaatatgatgtcttgtaaatggtcagcgatattccataatagttattaaattaaataatataaaatacgatacttaattatatcaataacaatataacacctctaagtataagtaatactagatactactaatatttctatatattctcaaaatgtatatattcctaagataaaaatgataccctttctatagttactctcatcaaatattaaagggaagaagaaagaaaaaaaaaagataaattggtggttatagtggaagttgatgttgggtagaaaatagtactaattgaaaccaaagattcttcaatttccaatgaaactttaacacattcaaatcaaatcttcacaagacaagattatgttttttcaaatttaacattgattatttatttactcaccaatggaagaccctagaaaacaaaataattctcctacttgcaggagtgtggctttgactataattctcttacaagttttacctttctgtgtaacatttattaaagttaagggtaaaaatgtaatcttcaaaaaaaaaaaaaaatagatgttttgatattttctaaagcttgatttaagaaattgttatgcattcataattataaattaactttatttgataatgctagtttcttcacttttatacttactaatataccattttgtcattggcacataccctttaaatttctaaaaaacactattaaatcatcactgtacattacattcttattattattactagacacattaacatgtctgacactatattaatatagtgtattataagtagacaggttaggttagtacttaaagcacacttattttaaggatccaaataaaatattattatttaaaaaatatgcatatatatttttaatatttttaaaaatattatttattttttcttcaaaaaaagaatattatttatttttataataaaagcttaaaattattttttctaaaactcattttaactcaaaaccgacccttataagtataccgttaataatttactatttgacatggttttaactcaaaactgacccttattaagttttctcattagtcttatcttttgacatggttttttagtttctcttgtccgtcttgtcttttgacatgattctatagtttctctctttggttttgatttattagtttctggcattagttactggttcttggttctgggttcgttcgggtgtccatgncgtcgagtagttatcagcgaatggaggcagcagagaaaatagcaggaattttaatgccgaaatggcaggtgcaacctgaaatagatgaatttattggcataaaagaagcttta

SEQ ID NO: 16033 - DNA, 3614 bp, Cannabis sativa
  modified_base (2170)..(2173): a, c, t, g, unknown or other
ttatatacccattttattttactttacttgttttaatttttatttttatttttatattttttaaaatatacccttttatagatgatatccctattagactcattatgttaatgtaaattatatactaagtagagaataaaaatatattgggcaacccactcataaaaataggtatttgttaataaaatataatataataaatataaaaaagatatatttttcaatttatccctatttttttgtgctttcaaaatatgagtcatattgtaccatgccattaaaaaatagagacatctacaaaattattaaatttaggtaataatttacatttacactgccacacgataaaaattacatttttactgttctaacttatttttttcttccttaaacatagaaaaataaaaaatgagatctctatcttccacactcatggacataaaccataacaaactttatatatatatacacatatatgttttcaagaggaatatatatataaacacaaatatattttattgggaagaaagagatcatgtgaactgttgcctatttttttttttaaaaaaaaaacaatatacaatgtataaacgggtagtaaaaaagtaaatttcagcatataatagtataattatataaaaaaaataagaaaaccaatataggtgtaaatttttaaaaaacataatacgtaattacacggttaaagcagggacacatatacttagtattttcgtgtccttgctctgatttttgttgtactttactcagaccaactcataattttcttaaatagacaagtccattattttatacacactccaattcatgctttatttttttattattatttttatataattaatgagataaatactaaattatatatatatatattcttttttgtatagtttcaattatttttataaaattaaatactcaaaatattagttatagttttatattttttaataattttaattataaaattataatattatgtattatatttaaattttattattattttaatttaaatttttagcgatttgacatatagcttaacaattaaacttgaaaagaatttagttattaattatttattttaatttaaaaatatatcttgtaattaattaaaatatatgtctatattttttaattttttttagaggagcgattgcttgccctaacttttcttagggctttgtccatgcgtaacacgagttttcacccagtatttgtttaatcatagtgttagaagtgaaaatgactaatcactattacattgcttttactgtacataagattagttaaatctgttacagagttagttagttggtttcctttattttcggttgtttagctttgtactctgttggttattttctctctataaataagatactttaggccaactgagttcagttgagctttccattttcatttcatcttcctcctccattcattttccagtttctgctcaatcttgagtactgagtttcagtactcttacacatagtattgtatatcatatgtattgaagaattctaacatacacacaaatatgggtatctacaaatagtaagttgcttataagattagagattagagaggttgttgagaaatccacctctcgaacatagcaaagcattctttgggattgaactctggagctgtatgacctcctccctgctccaaacgaaaacaatgaaaaggttatactatttgttatttaataaataatataatatatataaaattaaatttgatagatcatatgtttgagtttatattatatgatatatagtataattatatacataactaatttatgaagagttagaaatctcaaaatagaaatgttagagtttatagctattggaaaatgtttggaacttatttatatcatttaaatgaagttttgaacattggtatgaagtttgaaacattgatgaaagagttggttcataaagaaatttccgagaaggtcttgggcaaccaattgggcaagaaggtcccgagtgactaacttggcgagaaactcactacaaagaatcttacttttagtcacgacagaacttgtgactaaaaataaaaaacatgtgactaattataaattatcatttttatgttgtaactacaatgtcaatgactaaaagtattagtcacaaannnnacaatttgttgtgactaaatgtgtttttagtcacagtacttattgtcaccaaaattaaactagtgataacttgtatttaaaaactatattttagtcacaaataattttttattacgactaaaaatcacatttagtattacaaaaaatttatgttatgattcaaatgttattactaaatgtaactttttttttttttttgtagtggccttaagctaggcagtggcattggcgagtaagggttagataattaagctagtctgggaccatcttggcctggtgaaaaattagtctaggactagcttataagttattttgggaacaacttgtcttggagacaagccaacccgggcgaccaacttggtctagcgacaagttgatcttagaatctccaagttttagagtcccagagtgttaggtcctagagatgttagctccagagttccgaagacgttactgaatgttgagaatttaatgggaatgtttctgtgccaatgtatctcatcccatttactgcactatttaggttagtaatagctattaggtgtgagtttcaattgtggttcctaacactaaatagagggctatagttcactttatcaacacatttttttcttctctatctatagagcactagctatagaagataatctaaggcttgttgattcctgggaacatttctatatcatcccaagtgtttgatagtaaggagaaataagttttttagacaaaaatgttaaaacattctccaaatttttagtgatcccccacattgctacacttagtgttctttattttcttcctcttctcttttataccatattatatatcatatattatttagactattgttgcttttacttttattttttaccttgtaattttgtgtttttgagttgtattgtcttttatctctttctaatctttcttttatttctattttgcgttcttatctcgttttatttaatttttttttctccttataactttttgcattataagttgtaattttattggttaattatatttcttttcatggatttatactttcctaacaattcaaatattgttacgggacactaagatgtctaacacctctataatatattattttaaaatttgttagcgattctctataatcttcaataaaataaaatgtatgaaatctaatattaaattatactaatatcaatattacatctcataagaatgctagacaccattagcatttctttgtaagttatcatgagaattgctaaaagataccactggtatacctagcactttcattagtgtcatactgcttttgattaagtagcgagtctcatataactttaaaaaataacttttaaagaatatctctaaaccaattgtgaggcgtcatctataaaaaatgtttagcactattattgtccaataacaatcatcaattatcgtatgctta

SEQ ID NO: 16034 - DNA, 11411 bp, Cannabis sativa
  modified_base (10304)..(10310): a, c, t, g, unknown or other
  modified_base (10457)..(10460): a, c, t, g, unknown or other
cataaccttaataatttttcccatatttttgaaaataaccctttaaagtttttgtatggcattcctccttattttttctcatattttaaaattttcttttagaagaatgtcatatttagtataattaaatttttatgccatatatattataacttatatatatatatatatatttttttatatttttgtaaatagccctattttttttttcttcacataataccgatttaggttaattatgtttaaaaaaaaaagattgatcaaaaattgataaaattaaaagttaagtttggcaacatattacaggtaccaaatgctatttatccgtaaaacttaaagaggaaaaagacaaagaagaaaagcaggggccgatgaaaatggattgcattacaaagggcagaggccgataaagctgaattacaaagtttaaatataaaataaaatgtttcccataatcagatgatcaaagcaagctctgcattaattctgtgcatcatttgattaacggatgctgcaatttgatccacagtattcatctggcacccttcttcaacctatataatccaattaccacaaacaaattagttagccaaattaatactctgttatataaatttatatatacacacaaatgattttaagaaagaaaaagaaggaaacatttagactaaccttgacgctaaaggagtagagtaccatttgctgaacagtgatgacattaagatgaagaacagagaggcgaagtgctccgagacctgcgaccatctttaagagctgtctcggctttttctttgacaatattttaatattggcatggcaatcgaccatggtcacttctatgtccgccgcagccctttggccattttcagatgagttgttgctgaagtagtactggttcgcacgtgtggagtattgtgggaaagtgaagaagtcggcaaatggagaagaagattgggaataattaggactaggagaagtggaagttgatgaagaggaagacgatggtggagatggagatgtcaaaggtaaaggtaaagaagatgaagaatgagaaatgttagatgaaaatcttccacaatttctgatatcatcttcatgatcgtcgtgctctacttttgttctgaccttgtggccctccattgactgcaacgactgttctagctccttcacgaaattaatggctcccccaataattgaagcttggtcaccctgttttgaaatttagaattaacacttggatgcagaaatatttatattatacaagccaaaatggtagaataatattaaactgaccctctgaacataagacgagggcattaaagatcggagtacagcaaggtactcgttcatctgtttgcggcggtttcgctctacagcaatgtgggtcatcctctggatttcgagctcttctttgttcttgctgcctcttgtacggcgtcgttttctgcgcccgttttctgtggccggagggtcagcaatggggtccataagatggcaggggaatgacgagggaggagattgatcaagtggtagtggttctggtggaggagtcgaactcggaggctgaggtggtcgacagctgacttcaggagacgagattgaggattctaattgctccgttaagctctgatgaaaaatagcaggaggggtagagtattggtggtggtagtttaaatttgcatgaattgtttggtccaatataggattattatcgaaaatcccaacaagggatttgcgttcttcatcttcttcttggaggcaaaattcgtaccaaagattattagtattattaggagctaccatagaggaatagaagtccttgaagacatagttgaatgtgtcttgagaattatacaccacagtttctaaagccatgttaataatgatgacgatgatttctcgacttttttcagctaaaagtttcctttctttctaataatggttcagaaatgcataaagggtgtttggcttttgttgagaaggaggcttaaagagagagagagagtaagaaagagaaagaggtgaaagctgatgaggagatgtgttgttgtgcttcctttatagaaacccaataagtgagctatatatagaggaaaagatatgttgaaatagcttaattacaagacagaaataaaacccaaagcacaaggcatttatgatatatatccttaatatcaaacaaagtgacccttttatctttcatacacctctcccttgatatagtcctaaacctttttcttataaataaaataaattaattaactcaacccaataataataagaaagcgaagctgcctacagcatgttgcacgtgagatttcactgtagaacagttactatcgtagaccagaggagagggggagagagagaaagagagaggtgagacaagcagattctcttggttctcttgtggaacatagtgagtatataatactataatgattctcatttcaataatatcaagtcctcaaaactaacgaggaacaaactctctaatctctaccaaaacaccttccaatgaagaaagaaatgctacataaactaaacaaatgaatcaaatctaacgggtggggcccttgtataatacgtacggccccataagaagaaaacgtttggttgggtgcggggcccgccataatcatatatactatccttattttatgcgaggaacagtaacaatcagcatttgtgtaacagaatgtttatatatataatataccgattgatctaactagctctctattgggttaatagtaggttctcgatcgataaaggtgaataggactttcaaatttcatgtatcatagttggttttaaatattattgttatattatttataaataaataagtaatataatattaacatgaaattgtcatacattatattatattattgagagtgtaatgtatattgggaaatttgattgattatgcatttgttatactattttttttaaacttaaaatatttaatattggtagaatatctcattttttcctaaaatccattctacccctctcatttgaacaattttctctctctctttcctccttctctctctcgctctatgtaaacacgcacacggagaagtacacaatcgacccacaactcaccacccacaaccttggttccttctctccacgaccaccatgaccacaaaccaaggacccgcgaattcaatgaccaccgtggacccaatgacttctccatcaaccacagtttcactatcggcaatgttgtcaagggaataaattgtatgattaatgtttgtaatatgtgagtagatgttagatttagggtcgaaaattaccatatttgagttttggacaaaaaactggttttttgtcaggcccaatggtggtccgataccttcctgttgttaaaatgaataaaggttgaagatggaggtccgatggtggtccgatggtagcccgatgatatggttcgatggtggtccgatggtagagcttaacatctataaatgtagatatggtccgatggttatctgatagtggtccgatggtcacctgatgctactttttttatgtacaaaaacattaaaaaaaaaaaaaggtagtagatatgattcgatggtggtctgatggtcacctgatgctactttttttatgtacaaaaacataaaaaaataataaaaaaaaaattgggtagcatcgggcaaccattagaccaccatcagtatagatggcaatatgaagtatggatggtgaagttagaaagaagacaagaaagagaaagaagaagagagaaagaaggaagggtataatgggtatgaatataaagtgtgcttattgatttaattttagtaagtttgtgttcaaaatttttatataccctaagtgtaagcaaataaattcaaatttccttatatattatgtgcataagttatattttatgagataaagtgtatttcgtaagttaagaggagttacaagtttaattacataagcatgttttaacataaggaagttttaaatctgaatatagatttataactcatcaatcaaattttgaaaatataattattatcccaatttttacttatctgatgtggcacctccacgtggccaaaagcgaaagacacatgggagacaggtcagtactaaccgaccaagttagtgtcgtgcaacccctcaagatctcagggttgcaagatggtctcaaacacgaagagaatggaaacttacaaaatctacatcttcaaggttctgaagcaagttcatcgtgatattagaatcttcagcaaagatagagatacacaagtattagcaatatcctagtcgaacttgtagctggtcggtcaaaaaggacaacccatgtgccatgcagcctctagatatggcaagccacccaatacatatattacgccctaacaacttgtttttcccatcggccttctagaagattctaaatcgtccacatcactcctacaacttcgaaacgtcttgaattgcccacaacagtaggaaagtttcgtcagagtgtaaatgtcttattttacacaaatattttccatctgttatgtattttgaacaataacttgtaaaaccctaacactatataaaatgtcttaaccctaagtgagagagacctgaattcatccattctataatgcacttaagagctcaaaagtactaaggcattaaactctctcttttcttctaatcactttgcaagtctctaacacacattctcattcagcctgtaatctgcatggtattatctcaagactgaatacaacaaaaggagagtagatcattacctaatcaaaggggctgaacctatataattttttttagtcttttacatatattgtcattccacatgggatagtcataatggaaattagatcatagtcaaacttcgcgtcaattggcctaattcacaatcaatattttggtattttctttgagagccaaaaattcttattcaaaaagctttcaccttttttcttaatttccattctgcatggctgtcacgagacgtggaaattctactaaacaacaggacactatcgccacggatcccgatgtccaagtgccacctactgtgaccaacccaaacatggctacccagccaccacgttctggccagccggctgacacctctaccatagtgttccgaccaggggaccaacctcctactggacccactgtcgagctgactactaaagttcctgacacgggggttggacctcatgtttatgctggtgagactagacctgtggttggcaaccctagtattgacgaacctcacgtgagtatagggtcacacggatttccttcatcaggttcaacaagaaacacatgatgctatgggagatgccttttcccagcagagatgcgaattctaagagtggatggatcagcaagacgcaatcctccaagcccatcatgcagagctgaacaaccaaaataaggaggctaatgaccagatcagacagttcaatgagagagttgaatcttaggttgaagagccacccctcatatgggatccccttcgaggaaaaggtccctatgtcccggagggaactcaatgccctagggatcatgggtaacctcagggccagggggaccaaatgcgtctgaaataaggtcgccatcctgtcaatccaatgacagtcaaattgtgcttgaaagagcatatggcaaggctgaccagtttcaaggcctgcccagagaaaaagagagaagggacaatgtcccgctaaggcaagaccaaagtaggcctcatagtggggagtcttaccccaatcctaatgaggatagtgccactagtcatccaagtgtatccctgatgatgacccctctcgataagcaacaacctcgtctgtctccatccgactctcgaacagtgccttgttcttcatccttcttttttaatcaagaaatctctaactgagagtcgttccattactttgcaacgacttcgtgttattcattggacataaaaattttagtgcttagctggttgatactatggaggcccctttgctgagccacataagagtaaaagatcagcactcctcgctgttaaactttggaagtcggctctgttgatcggattccaatcatcttgctgaaagacttataatggcaccaacaggtggtagcgtactacgaccaaacttgtgaaccttcaatacctgtaaaagatggcaggggcaagaaggctccaagagtaccatctcaggttgagatcctaagaatttaacctgatcaatagaccctaaagcctgttcaccagtgctcacagtagcaggtgctgaggaagtcgcagaggtctcctcttactcaattacaagttgagtcgaggcacatttcttattattagactttttaatccttttcaaaggctcttgttttgaagcagaggcaatgtctgacgtgacagtatgtttttttgtttttcttgttagaacttgaggggttggacaaaagattttcgaagtccatatctgcgagataaaataaaaaatcaaaacttatataactaaaggaaaaatattgtgagttaatctcccacttaagagtattaccataatcatcagacgaggaagaagacctataataattactataaatttcctagaacaaataatcattaaaaggccaaagggattaagtggagacaagttccaatctgaacatccaaccctatcaaaattagtgccgcattgactagcgatcccaaaataagaactgttacaactcgactggacatgatgtttagggtaccaactatcaaacctatgagtgatgagatcttcacggttccagatatagaagttatattggctatctctaaattgaacttatgttgttcgctcaggcctaagaataattggggaccttccacaagcactaaatttattacctcgggaagcatcatcttctgcttcccaaaggggatatattcctcagatgatggttgtgagccacgtagtctcgatcctcctcatcagtaggcattgggacttgctgcctgtctaaaattttggggatcttgaagtcattggtagactgatctctgccgagaagggcgcaagccttcaaattattatcatgcagcaaaaaatttaccgctcacagaccatagggaacaccaagaagaatcacgtgcctcttctcgatctcaggagtatggataggtctcctagtgatcgctggaaacacaacaaatagcagaattagaaagtgtataaaaaacaagaagaaaaactcataaccaagaatttgagaagggtttttaacttacttataatttgaaacttggttgtgttgattgggaaaagaccataggtccaaaagaagtcatcgttgaactcctttttgttggataacctcacaataatcttgtgatcattagtgtgggtcctgtggtaatataagcctcctgcactgcgcttcctcataggacaagctttgacataataaaagtagagaatttcaagtggggtcggacattcccacttcataatatggtagagagattttaaacagaccaggatcctatatgaatttgatgccaactgaaacgagtcaatgccaaggtagttgcagaagtctttaaagtactccttgagaggaaggactgctccaactcttatatgttcaaggctccaagggcctattctggaaggctttcatctctgactagaaattcagggggataatacctgaatcccccctgagcaaaagacctagtgcaacacccctgctcattcttaatgctgcatgaccttaagaaatccccaacataaggtccaatggacctgactttggattctatcaacttggattcaaaggtgacagtgggatcctaggggtctttgatttatgaactttctgagccacaagttcaaagtctaagtcacctagtgaaaaagtaacaatgactggaggtaaaaacatggacctcgctaaggggatatcaactaaattggaagattcaagctaagatgcttctcgcaaataataacgcatactctcaataacctcttgtaataattgcctataatggtaagaggtttcttcttgaccagatttaatgaggtagttcctaattttcgcatcatttatttcaagtatggtttgaggtcctctagccttgagtttaaattcaatggcagaaaattgaggagaaactgattttaagagctctgggattgtaaattctaggataaattgggacatgattatagataataatgcccgattcttggaaaaatagagtacaaacaaagcccataatctgcgaatcacataaccttaaatttttgagccctaaattactcaaacattcaaaccgaaaacaacaaaacgatgcagaaaagaaaacatataccaagaaattaaaatcgaaagcacagaggaaaaatcaacaagagagagtgtcacttagtgttttgatgagatattctgggtaatgaagagcttcgcgatggaaattccaataataaaaaaactggattttgagtaagatgaatgcaatcagatgaaactcgcagaaaaaatgtgaaagacagagaaggcatgcaagttcaggtgagaagatggttgagaattttttgaagcttgaaggttcgtgggttgaaaatagcgaaaatagtgtaaagtttaaaatttacacctaaaaggtggaaactgctcgatcaaaagagatctaatcaaacggatgggaattgtacaagaaaagaacatatggagcattaaataaagaaataacgtgccttgaagttttgaactgtcgaatctaagcattaaaattttaaatggaataaaatacaatagtacccttgaagacatttaaaaaatctttttttattaaaaaacactttttagggagtaattgtcatacctgaaattcggttaacaatcagaagctgacacatgtacctcaaaaggaatatgaatcagcttaataattgtattattaaatgcaatttaaataaatcgcctaaagaattatggttgatagaaatattaaaactcattcccacataagaagatgtgagatgagagtaataactattatcggttgagattggcaagacaataagtccatctcgggataaacagagtacataataaaagttgtttaagatgagagaaccaaaaaattgtagctcattgccccacatacttaggaataagagcttgtagctcatggacccacatacatgagaatatgagcttgaaactaattgatccacatatttgtgtgtggatagaataaatacattcattcatctcgctctttatatatcgaagtagccaccttaataatacattattataaaagaagactgcgaggagcgttgtatctatacttagcatttttcttacaaaaacagtaaagaaggacaactcacacttagcgaggagctatcgacatagtcagcataactacttaaggataatgacgaaagggcggttgggtggttattaaatattatcccatgtgcataaaaataaaacgtgagaaatatccatgtttcatgaacagttacaaatgattggatctaaatagaataacggtcaccctatacacctataaataggaaaagaatccaaagtaaaagagacaacaaatttgagagagaaaaagtaaaaaaatattatttatgagattattgtattctatattctaattattatctctaataaaatacactcgtagaatatgttgattttaactataaaatcacgtaaaaaatatttaaaatactgtaattaattctgtagtgcattaattacaaaaagactaatatatttgcgttaagagtatatcattttatttgtatgctacatatgtttaattattatttttaaatattttaattgtataatatattatttgttttaaataatatctaattagtttttattttattatatacaatgataatatataatttggttgtcatgttatatatattttaatcatggtatataattcgattagttataaatatatatatattagtatttaataatatatattttttattattattgttagtatatatcttttggtgaatagtatgtgtattttttataagtatggtataactattttatggttgtatataattttgttaatatggtatacataattttttaataatattatattattttgttttatgttttattgtagttatatatcttttgttgtatgatatatgatttttgttgtgtatagtatatcatttattaaagatgatatttaatttatattttattatatttaagtattatgtataaattttttggtatgtatnnnnnnnttaatagtggtatatataattttgctagcaagatatttattttttaatattaatttagtattgttataatttttttgtggtatataatttttatactacgctatattaatttttagttatataatatatcaaatactgttgtatatnnnnaatgatctaatatatttattcgttttttacaatatactattatgcaatactaaaaaaatatataacttaatttaattattatatactttttctaaaaaaattaatatatagtaaatgtatttttataatttttattaactaatttattatatttggctattttattaattttttttttttaaaaaaaatgacatttactaatatagtttccaaatttagagtcattttacatctcaaccctaagtcaattgcttcctttgatttataatcattcagcaatagtattttattttatttttttaaaacactagtatttaattatgtgtagtatttaagagatttataaacaatgtaaagtgtttatttattaattgaagtcagtaattattaccgttatttttagaaactatataaataatcttttttaagttaaatttttgtaatacatactctatataattataaaaataaaaattaaatttattaattattgcaaacaaagaaaatgtaataactttaaaagaaaaagaatatattaaaaagtatgataaaaataaatgtattaaaaagaaaaaaaatatattaaaatttgaaatgtaataaatctgaatgaaatgaaaaaagtgggataaaaaaactgagataaaaggtactctcttatactaggataaaaagtaactttttatcccggttattatttatactttttattaggggtgttcgtggtgcgggtggtgcggtttttgaccattttttcaaaccaacctgcacataaatttttttcgaatttcccaaacttcacctgcaccgcgaaactaaaaaactgcaaaaaccgctcctaaaaaaatagtgaggtgcggtgcgatttttgcagtttctgcagtttagactatcaccaaataattaaactatcacatatataataaagcttgagcaacacttgtcaaaaat

SEQ ID NO: 16035 - DNA, 9405 bp, Cannabis sativa
gtattgattaaatcttactttagggtaccaaatatgtacaatttcaaaatacaaagtaccaaataagtattattgaaaacataggatactaaatgagaatattcttttcttttttaactttgccaataattctaatgtgataggtttctatgtttttatatatcttgttgatttataatagtgtgaatttgagtaggagattgtaacgttatgcagttgattgtctttaatctggacatctgattttgtgaccccacctgatagtcaccacctttgcttttgtttgttttgctcctctttgtaatgtttattattcttttttcaacatattatgtaaacagcctgataccttatacatttggtcctttttggttatgtggcagggtgtaacgccaccaaaaaatgatggattttcgcttacttctggagactttccgacacttggttcaggaaaagaaagttctggtaagattgctgactgtttgcatgattatgtatataacatatgtatcaacaatgtgacctaaatttgcatgaacagggttaaagtgcatcaaggtgacaaggcttattatgtgaaatgttgtggtgtactcgtaagttatttttatcatcctaatttttttgatgtgatgttgctgacagatcagagttctcatagccgtcctggttcatcctccagtggattaggaacaactaaagagaggatcgggacttctggtactggttagtgttcacgcttatgaaattcgtgcattacaatttcttacgttgctcctaatagcttgtttacaacatcaatcttggaacaactatgagttcattaattttttgttttaaatattcaggtgatctttcaacaagagacattgtaaaaaatgacacggtaaattcttggaaaagagatagtccaccgtactgtgaagatggggttaggcctggtcaggaaaagtggcaggggaataaccaaacttaccctccccatccacagcattatgaatttgatggttggcgtggcgctccattaaataaccctcaagggggtgtttggtttagaggacctccaggaggtccttatggaaatccggttgctgctgctggttatccaatggaacccttcccatattatcgtccacatatgcccactgctggtcttcccaatccacagccgattcccccacctggagctgggccaagaggtcctcatcctaaaaatggagatatgtacagacctcatatgccagatgcattcattcgcccaggtgtgcctatgcagcctggtttttaccctggtccagtaacctacgagggttactacggtcctcctatgggatactgtagttcaaatgatcgtgatgttccttttatgggcatggcagctcgtcctgtttataacatgtatcctggccaagttgctcctgagcctgggaattcccatggacggtctagtggatatggctctgtcaaccagacacaggtagtagaacaagtggaatcagttcatccccaggataatcgaggaccatacaaggtccttctgaagcagcatgatggttatgatagaaaaattgaggagcataaaagcgagagtgctgtagcccttgatacatcaaggggagatcagccaaagacaacttcatactgggaagatgactggagatcatataaaaaggatgaggtaagggatttaaggaaagcccctgtggaagaagcttcatttccgaattccgacaacaaaggtgctcttttagtccctgtcaaagtgaagtcccctagtagtgggggaaatatgaaggtcattgatgagatttcaggaaagaaattggaaagtgaggccttgggtttgtcaaaagcttcaccacttccagctgccccaaaagattccagtctgatccagagattagaagaattaaatgcaaaagcacgtgcttctgatgggcgtaacgaaaccataattgcttccagtggggaagatcgaaaaaataaatttcattcaaatgcaaaaggtacacagaataggaatgaatctgggggcggttcctcatatcctgagaaaacttatactgctgatattagcagctccaacaaccgaaaagttggcctctctgggggagataagaaacttgattcaaaagttggctctgaaacaaacatctccaggttcgttttatttttcatgtttcctttggtatataatctgtttatacagtttgggatacactgatatgatgaaatacaggatgtcttcacaatcttcacaatccagaagtgatcattatggtaaaggaagatttattacacaggatggtgaaggctggcaaaagaagccttcaatttctgagtctggagctgtgaactcagaaacttctaatattcatggtcacgatcaccaccgtggatctcaggaggctgaaaattcaggttctgggttacttcctcatggcaagcttgaagggcagcctttgctgccaatgttagatcgaagcaataaccaggcccaggtaaatccattaatttctacacctcttataattaatagtttcggcatattgtatatacaattacaaaatttaattagacgagtttctacttgataattttttcttaaaaaatgaattaatagttattttaaatgtataagtgagtcaattaatataatctaaaataattttagtttttggattgaataagaggacatactatcaaataaaaataataattactcaattcctatatttcaagaataaataatgaacataaataatacttcaaaaaggtatgcaaattttaataagcatttatattttcatttacaaatgatacagcattaaagaaacacataaattagaatttcatatgataaaatattattagtagattataaagtttaattatacatgtttgatgtgattattgaaaaagtacaatttatttaggcaatttctatattttatacagatgttttagtgaaaaagaatgatatgttatatctaagatgagaatcatagtaattattaataaaattcagatttaacaatctcatctaaaaaaagcatttatttgatattctaagtatactaaaatcaaaagcgagaacatagatacacacctccaccatagctgctttgacctttaaaaaaaatgccatctttcaccttgaaaattatcatcagaatagttagatgaagatactatctgtactgcactcaaaaaaacttatcactgaactactcagccccttttattcacaatacatgttatatcatatgctaaaaacattactaaaatgaataaataatcattttagtaagtattgaattgggcttttggtgatagtttaagaaaagaatgtatgtgaaccaatgggctagtcacataagattgtagagtgtgtccaaggagaccatctatttatttagaaaaataagaccatcccattatggtctccattatacaccaaacaaatgtggttgtttaacaatgctatatatgtttatacaccaaacaaatgtggttgtttaacaatgctatatatgtttatactagtccacaaaattaattccaacataatattgtcttttatcattgaacttttacatagatcaaactaataattaaattgctaaaagaaattctcaagatcatcttttgtgtctcatttttttaatcatttactcttaattgtttttcattattatattgtcatcattttaaataatgtgtcttccataaaaaattataataagtacaatgccaatagtaatgaatcacgcaaatgcttatcaaaaggattgaccaaagttgaatcccaattttacagaacattggtgggttgtgagatgtcttcgtaccactgagagaatgcaaatcatttttgaaacaaaactcatcaaactctcttaacaaatccagtgaccccttgacaaaattacttcgctaaagtctctcacaaaaaaaaaattaaaaggtagacatagtttttctaagcaactgatcaagttttgaatatataaatacgtaatacaaattttgtaaggaaagaagctagaacaatgaaattgtacttctcaaaatttgtggagtacaagagaaatgagagaaagaggcacatagtacaacaccaaagacatccaaaatctttttcttaagaagcaactaaccaaaatataaagaaaatgtcaaataaaagaaatggaagaaggcggttatactgataaactgtggaaagaaaagcagtgcaagagcaggaagtagagaagggagatgtcagaaacaaagtctaaatcattgttgtcaaaatgatggaatgctgttattgttttggtaaatgactgtttcagtgcttaggatgagtacggagatccatccactcaatcgcatggcttaatattccaagaaaagtttgccagtctttagtctttagcctttagctttttgttatctgtatgatataaacgatttgttttagtggatgtttgactggacagtaaaattagtcactctttaatatgtgtaggattattaatttacagtttgaatttacctgagtttttgtggattatttaccagcgagcaaagaataaggagctggccaagcaaaaagccaagcaattgcaggaggaagaggaggagcgaagtaagaagcaggcagccagggctcgtgcaaagctggaagaattggataggcgaacaaaagcagtagaagagtcaactcagaacctggaaaatgcttctagtggtattgtccagaataagcaagaacaatctcagccttctggtgaaacctttatagctgacaagagctatgggccaccaaagacagctttgggctctaaatcaaatgtagttgctcaagttaacgagagctacccaagtggagctgaaaaagcctctttaccgtgcgaactacctttagaggctccgaagggtgtatctggggaacctccaaggatgcatgctcaatctaagtcctcgcagcatgaggttaatggtgcttttgctgctcatcacagtaatgttcctcaaggtcttgaaagtaatgtatctaaacagaagcatacaggttttaagcaaaagcatgccaccacactggaggtgccaaaaactcgggcagctgccgagagtaatgatacatctctttgtgttgtaaccaatgatgttctcccgggtggtgggtcaactgtccctgtaaatgcaagtgccagtagtgattcctctctacatccacgaaagaagaatagtaagaatggaaagaacaagcacaagttagaagatgtttcagttgtgtctacttcagcaccattgggatcaaaagagaaccctgcaaatttgtctcttggaagttctcagccgaaggcatctgaatctcagttggatcctagtgcagttcagttgcagtccgtttctagagatgtagatcggcctttagagcaacacccatcttcaccaaatgaggactctcatagtcatggaagagtaaacagccaattgaaacctcaacagtcacgaaggatgcctagaaatcctcaaggtaatagacctgcagaaaagcttcatggcagtgatgcagttgtctgggcacccattcggtcacagaacaaagctgagattactgatgaacccagccctaaaaatgcagttgatatagttggtccttttgtcaagtctgatccccaagtacagaataatttgaaaaataaaagggcagaaatggagaggtatgtcccaaaacctgtagcaaaagaaatggcacaacatggaggtagtcacattgtgacttctgaagtcaatcagactactgtcgatgaatctactgcaagagcaaatactgaaagtactcacagtactggaatggttgctgggaaattgggtttctctgtggatcctcgaaatgggattggcaggcataataaacaggggaaatcacagggatcatggcggcaacggatatcaacagaatcaaccagtactcaaattttgcaagatgcgccatcatatactacaagtcatatccagaagaagccaaaatcaaatgaacatcagcatcatcaaaacactgatgcaagctctgtgcaagagcaacaaaagtgtactggtgaatggggcactaatgatggctggggcatttttaatgaccctagccctgttgaacctgtctcagtgtctaccattatagatcagggagttgcagttagaggaaagcgacatggttttaagggacacaaaggcatggggaataattgtgatcttgatcaaaatcaaaagaaaagcaataatagggagaatgacaaaaattacactcaatcttcaaccactgagatgagtaaggtggaggtttctgctcctgctaaagaaaatcgaggtattggggaacattcagtgtctcattggcaaccaaaggctcaggcagtttcaactggtcatcatcagcggggtgtcagacataatattagtcaaaatgctggtgctgaagttgcttggactaacaaatcacaatccaatcgacatgatggagtgttgccaccaccgactcaggacaaagttactaataattcttcaggccagattcatcgtgatcaaccagtttctgaaaaaaacaacgctgaggatgcatcacatgctaggctacaagagcctagaagagagaggaagtctgcttcattcaagggaaacccccacatttcaaacaaaggtcctgcttatccagttgaaccaccttcagtgaaagtggatgttcaacaggaacaacacatgtcgtcaggattccgcaaaagtggaaaccagaacaggcgattcagcaaagctcaagagactcgtggagattggaattattctggacaagataacaagcaaaataatccacctccaaacagggaaaaaccaaggcaaaattcacattatgagtatcaaccagttgggccctacaacaagtctagcagttctgatggacctaaagatggtaccgacaattcaggtgctagggtccgggggagggggggccagaatcattcaagacgtggtgggggtggaaactttaatggacgacaaagtggagttcaagttgatgccggttatgagtagtagtgtacctttatggacagcaaagtggagttcatgtagacactggttatggttagtggattatacaagtaaaatctcaactctcaaggccttgttttgttgataaaacctgacttttgtggtttgtagtggcggcgttttgatcaattttaccaggtacttacgaaacgatatatttgctggaattttctgatgtttatatttgtaaaaagcagaagggtggtctgacaaaatcctatgaaactgaaacaggggtgtggagaaggtatgctgatcggcggcaacaacaacaacaacaacaaaacggagagagtattctgagtgatttagagtttgggggtatttggatgtggaatatttttttaattttaatttttaacagatgtatcttaaatgaaaacattgtagttggtcccggcttgtttcctgtggaacccttgtatttagcgacagtatattcctcttttaaaatgttaaaacgctgtagggaggaagggagggggaatgaattagaaaaagtttgtttttttggttctcaatctgatttctgttcaagatggatgtgcagaacctaaacatttgttttttttttcatttgtgtaccagtttcctgctctgtctgagcctaaaaatcctgtaaaaggattgtcttataatgtgtatattatgctgtccaattcttataattttatactttggaggtactaggagctgtagtttaattcctaaacattgttagttggtctggtccagacagttttaatagcttcctaacaagactgaccatgaatggcttggctttattcttatcatgctatgaagtactaggaaagcaccaaaatacttaatgtgaacttgaacactaccaaattaagcttcaaatcagttatttttgctttacacaagacaagaagatagaatgcaaaggcaagtcccgctgtacatgtcgtcgtttactcattgtaaatcaaagggattttacaaaaaaaaaaaaatatggctttaatatatgggagtttaatatttttttgataattttttattttttgtgggtttttatttcttagaagtttctaaccattcttttatcctatattttttatttctttattattttttcttcttttttttttctatttacttttatttcttattattttacttcatttttttactttctttctttcttattgttttctttggtttatttttttcttcttctacttttcttgttattattcatctttttattttttttttcatattttttgtttcattgtttttttttttctatcatttgctttctctattttcttttgtctctaaatttcatttatttcttcttttgtattttcatttttttaatctctcccaccctctctagtttttcttatctattattcctttatttgtttgttttcacaaatgtaatattacataattatattaatggtacgtttactatacattattcagaattggaataaactaacggagaaatgtaattgaataaatgaaaaataatcgtaatcaatatttgtaatatattgtttactaaattttttcgaaaatagaatagttgtgatttatcttgtttactttactaggaaatgtaatcagaatgcttaaattgactaaattgcctttttaggttacactatattatatgatagttattttgtaagatatattttaaaagacaaaattatcaatatatatgtaatattaaaaaataaaataaaaataattaaaatccattacccttaatgacattccttacataattggtgaagttctcattttttcttcttttattaaatcaagctctccctttcttagttttaataatgtaagtaaacaaatataagggaatgattaccttactattaattcctactactttttaataaacataccataatagttatttttattattatatatttttacagttgctcagttgtaattggaggtacaattgtaactacttttaagattcacttatcataagaccttcatactctaatattagtaactaattacccaaaatattagcaattaattatttaagatagcatacccaaaatataagtatcttattatccaaaatataagtacctaattacctagtattactcataatataataattggttatctaagatagtacatagttgcctaaaatataagtacatatatcacccaaaatataagtacttagttactcaaaatataattatctagttacttaatatataagtacaaagttgccaaaatatatgtaattggttacctaatatagaacctattgttgggttttatgcc

SEQ ID NO: 16036 - DNA, 10631 bp, Cannabis sativa
aatatcagaaaaacaacaacacttacaaacttcagctaagtaacaagcagtcttatccttgtaaaattctggtgaaaagacaaaatagccctcaagtatcatgtgggtaagtccagtgaatgcccaccaacacattaaccatctttctaaagttgtgatcttttttgctttacctgttcatacatagggatatttatacaatcatttcagatttgggaataaaaattgagaattgggaataaaatagaaaaggggttatttaccagagaagatccaaactatggaaacaacaataattgaagctgcagcatagattccaacaatggtggacataggaagaaccaatggaacataaccttcgattttcaaatctctgggtatgtacggatgatcatgagatccctccatttttttttttgcttcttcaagctctgaaaataagacctgtaaagttgaaaattttgggaaagatttgtaatgttaaaaagactttctttttttctttttgagagtgagaaaagtcaaaagtttgaaactttttgagtgaataaacaaaacccaccaatcagatttgaacacaaaatgaaaaaacatgaatagatctaataaagggtttttcttaattttaacaattttgtgtaataatggtgaattgagaagaaatttgtacctggtaatggaggaaattgactttcaaatgttgctcagttcagttttgataaaccaaagattcaaactttatcaaatctgattgtataagataatgaaaatattgttataaattattattaggatctatggtatggtccacatggaaattttcctaaactatcatcaaaatattaaattagtaaatggttaatttagatttttatccgttgaattttaatatataataaattatatttctaaacttttaaagtggttaaaaaattctttcttaattattgaaattataaattaaaattacagggacataatttgttatatgtcaaaatttaaagaatataatttgttaaattcaaagtttgggaagtacaatttagtacatggagaattgccgaattagtaaaattgaataaaattagacaaaagtctataatctaataatttcaatagtttaaggaaaaatgttcaggagtattatttagtacatgtaaaagttcaagcagataaatatcctaattagtcttaaatcatattgaattaaatttataatgtgttgctataagatttgaacattgtaaatttatggagcaaatgattatttgtaattatttacctagtgtaattttttatcgctcggttaatttgttaataaaatttgttagagtattattattagatacaatattttttataggtgtcgttttataattagttagcaatattatttaaaatttattttttaaaatcatacgagatttgatacttaattacattcataaaaatagtatgatattttaaaaaaatgttaaacactaataatattttttaataattttcaatttgttaaaaataagaagttcttttgctaataaatttttttaatgtacaatgacattatgttaattttagaatataaagtaactcattactcatttggttatatgattacctttactttattttttttatatttttaaagttttgtttcatgaaacatgtccttcaattaaacaagttcaagtaattctaattgctatgcacaaacaaaatgaatcagaaatttttaattaaaataaaaataacaaaatagcgaattaaatatcttaattaaaacaaaaaagctcaggcaaaaaacacagttgtcacgatctaattggccaaattttgttgtacacagagctataatcgtctacacacaataccccaaccctttccgaccaccgcgctttatattgtaataccttaattaccccccaacgtacaacccttaacagcacaaattctgaaaccttagaaaaaagaaagagaagaaatgttcataattttcatttagatcccaattcagatcttagcccccaaaatcttccatttcactcaaatccctaattctctctctctttcagatcccaattcggaccttcttcttcgtcttcttacagttgaattgaatctttatatatacatatagatatatttatatacagtggtgacaaattgtaacggcaatggcgtgtataaaaggggtgaatagatcggcgtcggtggcgctggcgccggatgcgccttacatggcggctgggaccatggctggggctgtggatctatcgtttagctcaaccgctaatcttgagatctttaagctcgattttcagaccgatgatcgtgatattcctgttgttggtgaaacaccgagttctgagagattcaatcggttatcgtggtcgaagcctactgattctgggagtgagaagtttgggcttgggcttattgccggtggacttgtggatgggagcattgatatctataacccactgtcgttgatcgggtaattgacttgaatttcttttggtttgattctgattctgttaaatttggagattttgaggttttgtttgcgtgtttagtggaaatgttggaattgaatggatctttgttgattgattgtgattgaaattgggcgtaatttgacatttgtgagcacattttgtatatgctaactttattatttaggctgagaattgatgatttgatgattgtaatgtaacgtaatggaaatgaaatgagtgtgtgggaattcacgcgagtttagttttatctggaatttttctgtaatcttgctatatttacgagtcgcttccttctgttgattcgcatctggctaagttgagggacgtggggataattggttgataatttcatttgtgggagtgatgctttgtttactttggctttctttttaaatgtttagcagtagggaaatagtggtaagctgatcgaattcctcttagcttgtgtgtctgtaatgtggttgaatttctcttaggtgatcgaattcctcgtagcttgttttaagttaatctttttatctatagaaagtaatgtgctttgttctcctgtttggttatttgggtgtagttttgtatgcttaataatgtgacgttaaacctatttgcttattggatttcttatttgttcttacaccttttaggtccgagcctagtgaaagtgctcttgttggacatctctcaaggcataaggggcctgtaagtttttctgtttacaattatacacatgccctttgtttatggtagtatttttgaaacttagagcttgaaggtaggatatgtcagtcacattttttattgtgatatgatcatcaggttcgtggtcttgaatttaatgcaatggcaccaaacttgcttgcatctggtgctgatgatggcgagattgtaatctgggatttggccaaccctgcagaaccttctcaatttccacctcttaaggttagtagttatgacagcgtataaaaaaatcattctgctttcttcaaatatgcacgcctgtaaggacaaatttattgaaatatatgattcagacgatatatggttttcatcagctagtagatctttatcaccctataattgtgtcttgtgtcatttttaccatagcagtttaacttatagtcatgataacttctatctgaaagcgtatgaaagtctcaaatagaatttaagagaacaaaataaagatgatacatttattcattttgagccatattcgttttgtgggcattttgatattttgataaggaacttatattattaataacaagaatattattacaaaattgtgtccttgttatgtcatgtgttaaagtagttaatattgtaaaagattttgctctctccacgccttttatttttcataacattaattagtgaaatctgtaaatacctatacattctttgtggctgtgattggatacttgatccaatcttatctaccctgagttgtaacatttagagtagttaaggaaccttttaaacagttgaacacacacactagaagcaatgtggaacaccagtgtaccaacaagggctccctcgctccatctttctagttggatggatagatggaagtttaaagcaactgctctttgagtttcagctgctaaggagcttctaaaatgcggttatatttatttagacatctaattgtgttctattgtcaaacagggtaatggttctgctgctcaggatgagatttcattcttatcttggaatagcaaggttcaacacatattagcatctacttcatataatggaacaacaggtagggaattcttacttacttcaactgattgtgaactaatacttttctgtttaaatctggaatctcacgtcttctgttttttcagtggtttgggacctaaagaagcaaaaacctgtgattaggtaactcttcttctattctgtggatttgtttacatattattttttctcttttatgtaattgagtgccttctgtaatctgaaaactctgtcaactggcagcttctccgattcagttagacgccgctcctctgttttacaatggaatcctgatgttgctactcagcttgttgttgcatcagatgaggatggttcaccagctttaagggtattgactttgtagtctctttaagataatataatccccccaagacacacacacacatacacacgtaccaaaggtaacaagataatcatttgctttacttttaaacagctttgggatatgcggaatataatgtcaccagttgcagagtttgttgggcacaccaaaggtaacaagataatcattttcatctttctttctattttatttattttatgtgtatgtatacatgtttcctgaacatctctctttcctgaactcaatttataatcttttgaatttttgctaatgctcatgttgaaacactaggtgtaattgcaatgtcgtggtgtccgaatgacagttcatatttgcttacttgtgcaaaggataaccgaactatttgctggaacacagttactgctgaggtgtcatatttttcctccttccattagctctataattttttctcccctttaaattgacctatcacccctggtttatgtgtttccatttattagataacacaactttatttaatttttgtgtagattgtctgtgagttgccagcaagcaccaattggaacttcgatgtgcactggtatccaaaaatacctggagttatatcagcatcttcatttgatggaaagattggaatttacaacgttgaggtatttcatgtcccacgtaattgctaactaataatgttctgccttatatattacgtttgattaagaattatattggaggtggttggaattgatcgagtgttgaattttaaaatggagaacaataatgtttttatttgatttaatactttgatggttttctttgattcagttatttgttatccttgttgcattatgcttattttctttaaagaggacacctgatctcttcattgtattagttttctttttcatttactattgatttctctcacacagggttgcagtcgatatggtgctggtgacactgcttttggtggagcaggtaatgtagattatagttaatagttataataaatctgtaatcctggagttatcacataattcattggctagctgtttgtttgatctttttttttttggggcagaactatttttatcttatagtaatattatgttgtaaattaatgtttgatggaccttattatgtgcaggatatctgaaagctccaaaatggtataaacgcccagctggtgtgtcctttggctttggtggcaagcttgtttcgtttcaaactaagtcgtcaactggaggtgcttcatctgtttcagaggtatgctttactggtgcaatgcataccttcatttaaaatggactttgttttttgattgtcttcaatgtatctaggtttttgtacacactgtggtcactgaacacagtttggtgagccgctcctctgattttgaagctgcaatacaaaatggagaaaagtccttattgaggactttgtgcgagaagaaactagaagaatctgagtatgacatctaactttaaaatagctttatgataattttattgacaagacatttttgatctgcaccctatttgctattgtattcgacaaacaattaatgctctttctttctcttgctttctgttactttcctaatagatctgatgatgaacgtgaaacatggggtttgttaaaagttatgtttgaagatgatggaactgcaaggacaaagcttctaactcaccttggcttcagtgtccctgaagtagcaaagcctgatgtccaagatgagctatctaatgaagtaaatgctattggacttaatgataccacagaagagacagctggatttgaaggtgggaaagatgtcaccgctttccctactgacaatggagaagactttttcaacaatcttcctagtcctaaagctgaaacaccattggctacatctggcgataagtttgttgttgatgatactgttcctagtactgatcaggtgcaggaagagtcagatgtaatggaggagagtgttgatgatccatcatttgatgaatctgttcagcatgcattagttgttggagattataagggggctgttgcgaagtgcatttcagctaacaaaatggctgatgctttggttatagcgcatgctggtggtgattctttgtgggagagcacacgagatcaatacctaaagattagccgctcaccttaccttaaggtagattttgtttccatcttatgctctcagaagcagtgatgttttcctttgaatctgaaattcagctgacttatgttttgcttattttgcattctttcttctctaaccattctgaattatgcttaactgtcaggttgtttctgcaatggtgaacaatgaccttttgagtctcgtaaataccagacccctcaaattttggaaagaaactcttgctcttctttgtagtgtaagtattctaactccaatgttagatatggttaatcatcatcagtaactgatatttatagttgaatgcattgcatggaatttttctttcttggattacactgttatgttgggatcgagctcattaacaacaaacttaagttactatatttactaacttgcaaaattgttttcatgatgaatcaacagtttgcatcaagagagcaatggactatgctttgtgatgcactagcttccaaactgagtgctgctggtaatacgctggcagcaactatttgttacatatgtgctggaaatattgataagactgttgagatttggtctaagagtttgtcaactgagcatgagaaatcttatgtagaccgtcttcaggttagtttttggtgctttgctattgcatgggaacatgttaaactttttattcacctgagctgaaacattgcatgtgtttaggacttaatggagaagactattgtccttgccttagcatcagggcaaaagcgattcagtgcatcattatgcaaacttgtagagaagtacgctgaaattttggcaagtcaagggcttcttaaaacagcaatggaatacctaagattgtttgggtctgatgaagtgacacccgaacttgagatcttaaaagaacgtattgctctttgtgaatctggtatggacattgacatttgcattttcttctacttaattccctaatgattgcaatgcaaaattacctttttttctgctatattttccttgactaattgcctcaacttgtattgtatgtttaaatttcttcactctttaaataagctagtagtattgtttttcattaatattttattttctatatttctactagtactgtaatcaaagaaaaatctaaactggtctattggtgatctttcatggttaagtgtaaagaatattgatgtcgtcagttgactgttatggtttttgcctgtcgctagtagtaaaaataaaaaagcgcttgtatggagatttatatgtttgtattggattatttccaccaagcagcaattggaggaaccgagtctgtagtattaataaatttgctatgatgaaaatgtataccattatagctgctaactgtgcaagtttaaggtgaaattccttaccatggccaaaacattagtctcactcatttatcctctaattgactcagaaaaacatgtagagcaaagtgcaccagtgcaacctgttgacgttacaccttcacattaccaggtttttgctctttactaaagtccctatctgttttttcccctggtatttttattgtctccaaacatttatctcaaccttagctatttctatatttcttgtttattctaaaactttgttattgctctttcagcctaatcctgtcaatccctatgctgagcacaatggacagaattcttcttcgctcagatatgttgctcctcctgctcagaatactcaaatgtttgtcccgacccagcttacacctcaagttcctaaggtatgtgttatagtagttttttggatttcaactgtattttttttaatctgttttccttacttgtagagtctatttgttttatatttttcatcgtttaggttttactgtttggtttaactttgccattccccaacttattagattctatataatcatatattagatctttaattaaaaaatctctttatatgtgaatcttcactcaccaaaccttctaatatttccaattttcgcatttaggtgtcatttatctagacattaacacggtctcttatttttgcttttaggacaactttgctgcagcaccagcctctattcagtctagcatgaggaccttcgttcctacaaatcctactatgctgaaaaatgtggagcaatatcagcaacctcagacatctacattgggttctcagttgtatcctaatcctaacaatgcatatcagcctgttgcacctcccaacaccacttttcagcccgtggcacctcctaacaacgcttatcagcctgttgcacctcccaacaatctttatcagcctgccccacctcttaatgctcctcttccacctcaaccaaagcctaatatgtcattcagtacgaatccctatcctcctagggaatttacacctggacctgttcaagggcccggttcaatgcaaccacctagccctactactaatactgcgtcgatgcaaactcctgctgctcctccagctccaccacctacagtacagacagctgtcacctcgaacgtacctggtatttctatctggatcttatatccactgcttcattttgatacatctacacttgttgttttctaacgagcttttactggtttcctgatcgttggatccacagctcacctaaaacctgctgttgcaaccttgacgagacttttcaatgagacatcagaaatattgggaggttcaagagcaaatcctggcaagaagcgtgaaatagaagacaattcaaggaagataggcgccttatttgccaaactcaacaatgcagacatttctacaaatgctgctgaccagctcgttaagctctgccaagccctcgacaatggcgatttccccactgccctccaaatccaggtatattaatagttaccaaattttcgaacaaatggaaaccatgataattgacaagtttcccttttaaatatttttttgtttccttctaaattcaggtacttcttaccgcaagcgaatgggacgagtgcaatttctggctagctcctctcaagcgcatgatcaagaccaggcaaaacgtgagataagggcaacgaaaccatatttgattactggctcggtttggggggaactcataaattggttagtcactgcttttgtacaacacaagatggcgttttcgtcatatcatttttaaaggatttcgatcccttcccttctctcaatccgtttcctttggtttggtttttaatcaacactaccttcaaaaggcaaattactgagttttaaaaaaagcagttagtgaggggcattaaatagaacactatgtttcaattttatatttgtagtgttaaaagatagccttttaatttcaatgttaattttttttttcacttcttttctttgggtttaattttgtttttccagctcatgtaatgctcactgagctcttaccatcgttgttggcttatgtaggtttttgtagaatcattgtggttttttttttttttttttgatttatatgaatactcaatatttgaataacaaacaagacttcaattttgttcatacaaattcttctgatgaatgatactaaaaataatttttcaatgagtttaggatttcccattctctggttttgttttttgaaatgtatttgagattgtattgtaatatttaggaaaaattatactgcacttccttaaaaggtcatttcagtaatttgcttgtcaattagaaaaagggaaatttaaaaaactatactttaaaaaccctaatattttattcttaaagcaatacatttcaaactaaaaaatatgacacttttatcaaaaattcaaaaataactctcacataactcaatcctatttttttcaacccgcacatgcatcgaacccccccatcagacccgtcggaccccccatcggactcgttttttttttttttt

SEQ ID NO: 16037 - DNA, 3859 bp, Cannabis sativa
  modified_base (2846)..(2854): a, c, t, g, unknown or other
aagtttaggggcaaaaatcctaattagccaaattaaaatagaaaaaaaaaggagattaaataattatagagaataaaaagaaaattaatgatgtaataaaaaataattaatgatgtataaaaaaaattagaaaaatgaaaaattatagaaaataaatagagatagttgaaagaattttacagtgtttcgccatatatagaactttttgtcacgtctacacttttgggtgaccttttgtaattcagaagttccttgtattgacacatcagatgagagagatgatgttaatgtttgtgtgatgcaaacattatttgtataaatagactaatagagagggtgtagtttcatcaaatagataagacaatagaaaaggaaagaagagtagagaatgaaaaacaatgagtacagaggtcacgttctagtggtaccttaccctagccaaggccatatcaaccctctccttcagttcgccaaacgtttagccttcaaaggcgtgaaggccacaatcgcaacaactcattacacggtcaagttcatttgcgctcccaacataggtgttgaatcgatctctgacggcttcgacgacggagggttttctcaggctaaatcagaagaagtttttctcaagtcatttaaagccaatggctcctcaactctatcccaactcatcctcaaataccaaaacacagaccatcctgtgaactgtgtagtatatgattcgtttcttccttgggcccttgatgtggctcaccaacattccatatacggggctgcattttttaccaattcagctaccgtctcctccattttctgccgcatacatcatggcctgttttcactaccattggaacccaagaacatgccgctctgcatccccggcgggcctccacttgagttccgtgaccttcccagctttcttaggctgccggagagttaccctgtttacctggccatgaagctaagtcagttctctaacttggaaaaagctgattgggtcttcggaaacactttccatggattggaagctgaggtgattgctatattatatattatatttattggaactttcttctatgggggcttgagaaaagaccccaaattaaatatgtcgcacttatttattggtggttggtgtagtgtgatacgcatgattatttgaggttattattatttttttttttgaaaagcacaaagatgcctaattttttagagttaatattaatatatatggtatatatatatatatatatatatgtattttgagtagtagaggacgagaaaagcaactagccctcgaacttactcctcttaatttcattatgtaattacggcttagagaataaggggttatcgagagctgagatgtgatccttagccatttacaagttgggaatacggctggaaaggagataatgttgagaattggtcggaaaataaatggaagcgagagcttagtgtgggtcttggtgaaataatggtgataatgatgattcctgtagtaaatagcttaacgaaaactccgtcagtttctggtagtaagggctatcgtggatgatgaccacaagtgggttgccgttgccggaatgatttttctggaacctctcccactgctagatctgagttattcaagaaaagaaatatcgttgcttttacggagaaggtgaaaaataattaaaaatagtcaaataagtattttgcgtacttgttattaaaaaagtacgttgcacactacactaacaacctatttttaagtgacgtggcgtaactgaattcgataaagaaaaacaccatatgtgcggcctttttctaagaaaattcctaccacatacaattaattttggcacaactttttaggctatcaagtagtgttagcgtatcttatactaggagagcagagtctaaaaagtttaggaggagggttaactattattcatattctcgatctttattactgtaaaaagtgttcactattattcatattctcgatgtttctggtctctaattaataactaacatgtccataaacaaatgaattttttctaatacatgtcgttttgctaaaaataaattaggtggccaaagaaatatgcaaccattggcctggaaagttgatcggtccgatggtgccttcaacatacttggacggtcggattgaaggagacaaaggatacggagctgatctatggaatccactgagtgaacaatgtatgaaatggctcgaaacaaagacacccaactcagtaatctatgtgtcgtttgggagcatggtgtcgttgacggaagagcaaatgggggagattgcgtgggggttaaaggaaagtggattttactttctttgggtggtgaaagagcatgatcggataaaattgccaaaagggttcatagagttgtcaaaagatgagggtctagtcataacttggtgcaaccaattggaaatgcttgctcatgaagccattgcctgcttcgttacccactgcggttggaactcgactttggaagggctcagccttggggtccccatggttggcataccacagtgggccgaccagttgaccgatgccaagtttgtggctgacatttgggaagttggggtccgacccaatgaggatgagaaaggagttgtgagaaaagaagagctcataaagtgtttgaaggtggtaatggagggaaagagaagccaaaagatcaggatgaattcactcatatggaaaagtaaggctttggaggccattggggaaggcggaagctctgataaatgtataaccgagtttgctacgtttctaagttctaactaaacttcgtacgagtgctagccaaaggaagttgaataataataataataatannnnnnnnnataataataataataatttataacttttataactatataaaaaaaagagaatgctcttttcggcctttctatagcaaattacgaacatatcattggtgttcttgttaattatcataaaataatccttctatttaatgacaagaataatgatagtttttctaatatgacttgtttatacaaagagaagatcattgtgagcatagattagagagctacatttttaccgttattatttttaattttttttttttgaacaatatcattttatattattattttaactatgataataaaaacataatattaaattattcaaatctccacataggaaagagaatttataacataagtttattaaatatgatcaaacaatattaattattaagtaggataaactgctgtatatttttctttatgaatttatggcttttttttttttttttaattttgatttaccgcattattaaaatatttgtaaaattagtttcacctctttaattaattgaaatacggttatgatttcttttttttttttttttcttgaacagaacaaatattaatcaacaccaacaaacttacaaagaatgggaaaggttagccttacaaacaatggttaaccaatccggaaaagaattgtaaaaagaatgggttaattttttgtcaaggcttctcttagctaagctatgagcacctaagttatggactctttttacatgattaaactttgtacaatgagaaaattctgggtgtctcttaatttggttcaccaccggcttcatgtcatcaagggagttgccattgtgaacgattgcatccaccagtactttgctgtccgttctgatctcaaaaggttggtgaacactcttcggtttatcttgaagagcagctgccactgcttgagcttcagcaatattcacattgcagtaaatcggtttatacttcatacctgcagagagaatattacccttccaatcttgccagacatagccaatccccaccccttct

SEQ ID NO: 16038 - DNA, 4829 bp, Cannabis sativa
taaaaaaaaatgtgaagtttgaaaatcttaaacctattccaccactctcctcaatactcctactaacacactcctccatcttcagccgccaaaaatctccggtccaccacgccagatcgtcgccggccgggattcccgcgttgttatcggtgactgggatcaactgcagtcgtccgtggtgttccccaggtaccacaagttatttctactcttttggttttaggtctgatctgattttggtgtttgtgattataagaaacttccataaattgattaagcggtgatcaatccactgccaacttatttttgttttatgatttgcgaaatgaagattgggcaatggtagtggtggtagaagatagaactgaagtaaaagaaagaggaaatgaagataaacgatatataatagtattattgtagtagtgggataaggattagtggtgtggtgatgataattcttgaacgcaaccaagtttctgttgggttaacagattgctctgtgaaagtgatacagagatgagacttctttctttgtttataatgataatacagtctatttcattagtgttactgtagagattttaggttatcaatttattatatagatgaatatatgtaacactagtgttctgcaacttcaaactttcgtatgtataatgtatttatttggctttaagatatcttgtctttgtccatttggaatgttaagtttatgttgtcttaaaaatatgagcccctctttaatcatactcttaatcttaatttcaagcttcaaaatgtaagtttgattatcctgttcactttatccagagttaaattttaatctgagtttatattactagtcttacttttagcttacagctttctattccatggtagttattttcaactttgttgttcataatcgtagtcattcgatctttttttgttagaaagaaacaaaacaataggaactttcatgatatggatagggtgtttacaaattttaaaaaaagttgagttttgggtagctgtgtggaccttcattgcaaaaaattatttctttgtataccttctttttgctctaagatattggatcctttgggtaaaattttagatcttctatcattttctgccttcaaagatttttcttcttatcatcttctgcaaacccttctctctaataaattttctcgttcttatccaccaaaaagataatgaagatatgttcttcaaaaggaacaattaatattgttagacttgatatccggtttttgaatagttgttgtaagagttgtataccagacaattgtatagatttgtctgaaaactttactaactaggtgtagaagaatttagaatgaatgagcacaaattggctgaattacacgaaaaccaatctgtttgatattaccagaggccaaaacgtgtgcatatatttgtagttttgtgttgctaaacttgctttgcttttggcatgtgtggaattaacttttgttcttcctaaactcactcatattggccatccctaacatggagactttattcttctagaacccttattgagactcattatgctcctctgaaagctttcatagtttttatatctacgcaacgctgcgaaagctttccagtttgataggtaactgtgataagagactgcattttcagtcactaattattgactgatatttttaaggtctttaatggggtagaagtaatattaattttatttaaagttacttattagatcttattgtttgatttccttttatttttttttttaaatttcatctatattggttttgttaactttatatattctctttgttgtgtgcttggtctgccgaaaagacattttgaaggtgaagaaccgaaatggcagggaatgctgcaaaatctgtggtgaaggcagttgcagaataccagtatccatggcgtgagaagttggtaaagtataagaatgagctatctaaaggagtttggggttactgggagttgggagcgtggaagccgcttggacttagcgcacgtcggcgagctcgactccggaaggaagttctcctagctgagcaagattggcattatgatccagagaggaaagaaatgagaaccaagaggaaaggacacaaacacgatagaatagctgccgagaagcgagaaaacacagctagattgatggagaaaatgccacaaatgttgcttgactacaagaagcgcaggtgggagaagaagatgaaggaagaagacaagaccaaaccttgattttgtgagtggctgtgaaactttctagttgagagttgagacaattttgttggtagttttcatgaacttgttactttttgccatcacttctatgctcgtaataacaagttggctcattttagactgtataatgtcaaaacttcaatatttaatacatgttccaatttcataaaatcaaatattctaactttatgtttgtcaaatgtgtatggatcatttttacctttacctagccaccatccactattttttgtaattctaagaaagtaaaataaacttgacatctttttgtagatggtgaaatgttcatattgaattttcttgctaagaagtcatgttcgagttcaagttagaattaagagattttattaattgtaattaaaaagaagaagaagggagtttataatacattgtttttaaaaaagaatttattgtgaaaaaaatagaattaagaaaatttaataagattcacaattaagttttgaatacgtctttaggtttaatttttagtgatattatttgtaattttgctcttttattgttgctaactttatttatttttctaggatggtttagttattgagattgtattttaaacattattatgtatgagatcatttgattaatataattttgttcttaaaagatgtttagggttttctttttaataaaaaaactgatttaattaggataatatgaaactaaaagagatactgatttacttctaattctttaacgtacataccttactgatttacttctaattctttaacgtacataccttttcctggttgctacagtgaaaacttcaaattctatagtcctgccagtaaggaatcacccaacaatacataaacgctcacatcaaatgttaactagtgtcctcttaaatattagcataatcatcttccaaatctcttattgtatgacaacttgataacatgattaagaataatgagaaacaaaacacaaaaggccaactaaaggaaaatctctaaccatgtaagaggacaagacaatatgtagtgaagattaagtaataagaattaatatattatttttttaatagaaacaaaatattaaaatttctaaataaaattaaacaaacatattatatttttctattacctatataaacagaaaacgacattctacttcagatttacaagacaaacgacacatagtcgtacgaaaacgacagcactatttttgtcataacaaaaagggtgtcgtttcttttgataatagtaagaaaaaggtgtcgtttttgtactcaaactgtcgttttcattgtcataatgcctttttggtcttgttatttgtgtactgaactgagtcttaaaaatcaaagaataatatctacaaaaattgagtcgtcgtcttcttccccaaatccaatttcttttcttaaaaattctcttaccatacatgtaatatgatattgtagaaaaatctagggcaaaaatcaaccttcaaattcaacatcaaaaccccttctttacacatttccaaaatttgactctatgaacttcgaaattatccacttccgttccgtaaagtaacttgcttttcttcactacacttctctgcaaagtatcaaccacctagccaatttcaatggctgccgtgctcagatcgaaagcatctaaggaaacggcgtcgtttacagtttctcagttccggtactttcttctcaatcacatgcatgctgggagaatggcgagctctcactgtacgcaccgtacaaaattggatgacctttatatgaatactccttatagcttcacttcgttcaaacccgtttcgcttcgcggcgactttgtcgataagggtactcaattatctaataatctgagagtttcccatgaagctaatagcgggacttgtgatgggaattgggatgagaaagtaggtagaaatattaggcgacgttatatttcaagctcgtatggggaccctcctgaggtgtggtccggtgatggccttgtggttaggtccggttcgaccccgaattcggtccgtggtggcaggggaggcggcggttgtggtggttcgaactctggttcggctggtgggtttggttccaattcgagtgatgattgttggggaggatccaatttggggagtgatttcccaacgcctaaggaaatttgcaaagggctggataagtttgtaattgggcaagagaaggccaaaaaggtgaacttgcaacatctctcaagtactttatttgataatattggttaattcaattcaagcatgttttagtattgaaaattttgttactttttactttttatgggatggtaatgtttagcttagccaagcaacttgtgtaaattagtttcaagattttattaaaaaattaagctgcattttgaagttgttgcaactagtaatacgaatcatatagtaatttagacttcagttaaattatcaaagaaagcaagtgttgttattctggtgtatgccataatgttttgcagtcataattgtgttttgatttcaggtgctttctgtggctgtttacaaccattataagagaattcatcatgagtcccaacagaaatggtcagtattcatac

SEQ ID NO: 16039 - DNA, 3104 bp, Cannabis sativa
caataggaaaggtaacatttcaagattactaagttgctttataacaacacttgtagttagaatcaattcaaacctgatttgataaactttgccaacatgacctcttaaagtagcaacaaaatttccagtaataccgttccatatcttgacagatttgtcatatgaggcagtcgctatccattgcccgtcaggggaaaagcaaacttggtttataacctgttaaccagtaaaagaattcaactccatctgtcattacttgcaatgtttggagaacaagaaagaactaaaacaattactatatagggatctctaggtgagactatcatgaaagaatggcagttcatgatagaggatttgatgattaggaaagagctcaaaattatatatatagttctaccaaaaaaactaaaaaagtatgaccaagacaaagcaataaagaatcttacctgttgatgaccagtaatacgagttttcggttgtttgctgacaaaaggttcccacaagaacatagtcctatcatcagatcctgaaacaagcaattcaggcttgttgcctttcattttgttgtacctctccaaagcaacctgtgcatttcaatcaatttaatacaaacattttaaccaaaaaatgaaccaaataaaagaatgcttagaagaaaaggagtccattccatcagtaacaattttccttcacaagattttatgcacaagaatgtaaagtcaagacaaaacagtaccaaataaaagaaaaatcatgctcaaaaaggagggcaccagatgttgtgtaaacaagaaattactgacatttttttctctatatatcggaacatctaaaagtacttttccaggaaaagacccacctaacattttcattaaaaatgaaaacaatccagttcagagagcaaattgttaactctattaactgataaaggccacacatttctagtgaagaaagaatttagtttagttccgatgactaaactgatatagtacaatagtaattccttaataatgttattatcttaggagtatattttagccattaatctatgaataggaattaagttagaatcctatttatcgggtttaccactaaacttgcgcatccttacaaataaggaagaaaaaaaaaacaatgccatatgtatggaataagtttcacaaaataattcaaattctaactaaaagataagaattcaccttcttcatttcttcagcagatgagtattgtttaccggtgtgatcgaaagccccagtgtggaggataaaatcagtgctcaaagaaatagagttgatccgatgtccatgaccctttcacaaaataaaaatacaatacaactagtataagaagaaagctaaatacataaagaatttgatttaagatattaattcatgttggtaatcttgtgatggtattggaccttacataacaatgatttttttttatatcctttctcatcatcaacacacttggttaatttagaccaagagtttccataccaagagatccaaggttcaaaccttgatctcatctcaattcccaactccctctcaccacaatcaaactagtggcggcttttataaataaatatgttttagtagcaagacaatgaatcataaaaaggtaaattccgaaatttgcaatacgaccattttagttctaatcagcaaagcagattatgttaacctgaatatagaaagaaatgctttctaattcattattatcttgtaagaataataatagtgtgttataatgcatcattaccttcaattcacgaatcagcttaccctccgaagtttcccatacttttatagtacgatccaccgagctgcaacaattataaagaaaaacaaaatttacttcctctcacggggtttgaatttcataatgacaacacaatggaatcaacagaaaccaatttaaaaacaatatgaggttcctttcatgttcagctaaactaacatggtgtccatattggccaataaaccaatttatgactttgatgatagttgattaagatataaaggttaattaaataaacaaaagctatttcctaatgaaaaaaaaaagcatacccagtataaatcaccccatctccactccatttcacacaagtcacagaatcagtatgtccagaaagggataggagaggtttcctcaatactatatcccatatgcgtgcaacaccgtccttactaacactaacgaaacgtctacatggagcagttatgtgcactggttcccaagcaatggcattaacccaacttttgtgaccctaaaataaaatattgcaatatctgaaaaaaattacaaacaaaagatagcaagtactaacttctagcattggataaaatttataaaataaagtttaccttgattgtactccctaattgttttcctgttagtggatcccaactcaaaatttctccagatttacccccactcacaagatgcttaccatcaggtgaccatgaaacacaaagaacatgacttgtatgtcctaggtcaaaaatcaatacaaaagtctaatcaattaaaagttaaaggaaagaaagatataatcaatctaacaacttgcttcacggatgcaatgcaacaagtgcaaattaatgaatatatcgaaattagttagagttcatcaatttatacattatgaaataaatgaagaatgtagagttgaggtgagttagattccaaagtccaaacctttacatatatacaatggtgtctgtgtattaagatcccataatcgaacagtggtatcacccgaaccacttgccaattgttggccatcaggactaaaggcaactgaaaccacagcatcttggtgacctgcaatgtcaaaccaacccaataataaatacaacagtaaattcttcctattcatcatcatcatcatatatatatatatgagctggacaaaaactcaccagtaattgtcgaagagcaccgataaattggtcgtacacgaaaaattgcttgcggttgataaactataataagggccttctccaccgaaactgtattttttgttatgaaaaaaaaaaatgttgtgagaaagaggtttcatacctaaaaatagaggcaataataataataataat

SEQ ID NO: 16040 - DNA, 6150 bp, Cannabis sativa
aaaaaaaaaaaaaaaaagacagagcaagattaaacagtactacaagtttcagtagctcacacaaaaagctccagcttttcacagctatggcttccttaaccctacccttcactctctcacaggtaattcttcctcatcttcttctcagaatgcgaaatagtatgagtaaagtaaaaccctaatttttttttttaaagaaattacttttgagttattcgaatttgttttctcctcaaatgttgcagaggacggagctcagggtggggaatttttcaatgccttcgagtaatttctcagtcagaacacaggtgtgattaaagtttgtattttttttttttgaatttcaaaattaggggtttttcgatttagtttgtttatatggctatttgttttcgatttcagattgtatctgtaatgaaaaaggataataaaggtcgacgagtatggaggcgaagaaaattggtatagcaagaattaatactaagcctatttttattaattttctgtttggatatatttgagagtagtatagtttagcttcaagctcataattaattaattctttataacaagtgatgagtccattgtgttcttttgtctttagactaaactcaattcaactataccttttatatgattttatagtatgaattttagtaatatgaggggaattattatctgttgattaatggatgtgttcaagactagttggagcttgaaactaagaactgtagtttggtgttctttgtacttaattgcttgtatgtataaccaaattagtgaccaaataatgtattgagctagctaaatgtacacttttggagcatgaaacttagaattgcttagtgcttttttttggtaataatattatttgtatcagaattgggaacattagtgaaatgagtgttagaattaggaaacttacacaaatgagtgaccaacaaatcgtgtatttttctgtctatatatagagatttatgggtacagaaggcaaaaactagttggagagaaacccaataaaatacactacttatatcaaataaatggattaggcttggtagattaagtataacaatcattatagttttcacttctcatttcaaagaccattctatgtttttcagacaaagaaagatgagaagttgcagtacaatctggaaagagtaccttttctagaggagcaagttaggaagatacaggaaggaggaaagctcctgacaatggatatcgaaaggctacttttatcagaagataatcggtttgattttgttaatgagatagcagccgaggccaccgagtatgttgtcaacgacagtgattcgtatggaggtcacaggaaagcaatccttcatgtgataagtaaccgagtgaacgatgctggtttttacagaccagaggcctatgcagaatcagacccttataagccaggaccttcttatttgaaagaagaatttacctaaacagattttgagcttttggtgtaaaatcttcgagtgttgagaattttttcggcattttttatattttaattgttagaattattctgctgagttgcaatacaggtttttaaacaggaattgtggctgatatgatctcaccaatgaacttacagtgcttcaatgtatcctctaatttttcaatcaaaatacatgaaagatctatacaaccaaatataattttatcaatctttccaatcaagtttggtgtctttttttttttttcttgatgataaatataatgttttaagtgggaaatttgtcaaaataatatcgatttggtatgagaaatgctataaagcaagttttgatttgtaagaaaatagctagttaagtatgatttgtattgtatttggtgttttagattagaaactccatagataatacttctatttacacaggcaccaatagacacaacaatccctgtaattattttcttttaataaaagaaaaggttatatatatttgttctttagtcatttttatgtatgttttaatcttcaacataatcttaaaataaagagtatatggaatctcttcacaataagtggaataagactactaatatttaggataccaagcctcactaaaaaaaaaaataaacataagaagataaaatttgaaaaataataataaacaaacaaacaagctgtattacttgttttgatcaattcttctataaattattatagtgatgtttatatttattattattatttttttctatagaaaatatatatatttgaagctctcactaagtggatcccctcaactttgggcattcaacacttataaaataaataataataaaataaaaaataaaaaatacaggcttccaaccacaagcccctaactgccttggctaaagctgattaatcttttatgaatcataaatcatttcaaaaaagtgagttcaaacttcaaaaattactttcaatgttaatacatagatttactatattaatatttttatgtaacttgttataataatttatcaaattcatgccctcaaccaaataatgtaattcaattaacagtaatctaacttaatttttctatacacaacgaaatctagttataagttttcaaataatcatatttattgttttattattctaattaattaaattattttgaatatcttatactaaatgctccctaaagttttttatatctatctagaaaatttagttgtaagactttcacaaacgaaacacatgtgacgagacatgaggggatgcctttcctgtaatgtttggagtaacaatactagtattgttaatacgagtcagattttttgatacgacacaaaatcgacacgagttcgaaaggttcgagcacgagcacgaacagacattaatatatatgggcttgggtacgacacgactcgatactacaaattgacacgagattgcacgaataatatgagcttaagcaagatatgacataaaaaatatagacttaagtacgacacgataaactagaaaagtatgacacgtaagcatttcaaagagtgattacgttttaatttaacaaattggtaataataataataataataatttggatgataaaaatttaagttttaataattctaataattttttttatatagttttatgtgaaaaattgttgataaaattatgtaaaaataattgaagttataaaaaatacatcattaattgtaaaaataaaatgtggaaaagtagagtatgaatttgagcctgtataagaaaattgactgatttaagtaaaatacgacacgaatttgagtacgacatgactcgatcctgtattttttttatgccactgcacgatacgactcatattttttttacgagagttactcgtagagtagtctctgccacatgtacagttgattaatattttcaaacttacttggtgagtactattgtttatatttggtcactaccatgtgacatatacttattattattatttttttaataattactttatcacaccaacttattatttaaaatataatatgtaggatcataatcgataatttttggagttataagaggtaatttttataaaaaaaaaatattaaatcttatttaaatgagagtgaaaataaaaaaaataatattttaaaataatgtaagtacttttaacaactataaatatgcccatattgatagtagtttttgtactagcaaatataagaaattgtactatacagttagaaactatcaaaaagtgagtggcctttcttattttacttacaagaaaacgaaagccatgtcaccttatgcttcttccaattccacgtgtccaaatcaaaccaatggtcccctgccacgtgtctatccatttgtttaattatatatatatttttttaaggagacagcttaagaaataatttaattttattgcaataatcccaaccgttaaatcagttagaggcagagcttcactctcttatcatctttgaaaatccaaactaacccattcctcactcactcactcccccactgattcacccaatctccaactcgttccgactcgggtctccgactcagtcgacccagccattaaccatggctttgttaagccaacaattacagaggttcctcctcaccaaattcctcgactgcccctctttcaagtccaactccaccagatcaacaaccagtgtccccccaactctgaaacccagaaccagaacttgctccggcgccatagccatcgatgctcagtcttctccgttggctgacgtcgccggcgtaagatggggttcgaccagtttgcagggcccgcgagaggagatggaagacgacgtcgttttacgctcagatgggcttgatgggttttctttcgctgctgtctttgatggccacggtggatccgcctctgttaaatttctcaggtgaagtgattaggtttgaatttgaattggaattgggtctttctgtgattgattttaataatggttgatttgtttcagggatgagctttacaaagagtgttgtacggctttacagggtgggcttttattgactgaaaagcatttcaacaccattagtgatgctcttcaagaggcttttcaaaaagctgatcaaaagttgttgaattggtaagcaattaatggaactgaacatatatggtttgtgtatgtatgtattttggtcatgttattggattgaaggattagatggtgtgtttttgtaaaggcttgaattgaatggagaggatgatgaatctggctcaacagctactgttatattagtaggaaatgatatgatgttcgtttcacacattggtgattcatgtgtggtatgtatacaatgctaactgtccatatactaatagatcaagtgaaagaattgtgtttgtatggtgagttgtatttgattttagatgactttgatcgttacaggttctatctcggtctggtaaagtagaggtattaagcgatccacatcgaccatatggaagcaacaaagtctctcttcaagaaattaaacggatcagagaagcaggtggatgggtgtgtttttctgttcttaattttctttgcaactttatttatgtctttaatggaaactgttgtaatgagtgatgtaatctctagtgtaggtttgatatcttgttgagattcatggacttaaaaccaattgccaatgagttatagatgtatattgttatgccttaatattagtctcactagtatatctcattggaattatggaggctgaaatgtcaagtccttagtggatgtgttcaatgtttcttaagtttgtgtctaataattaagactgtttttggttggctagttaggattatttgtcagtctagcctataaattctgagagttagtcttgtgagaaggtggtgaattttatttacattatttagagtaaactattattcagggaatataccaagtttctcaaattatttgggattttgtatctactcctgctcttattactaaactaactttccatatttctttcgagaactgaattgtgcacaagtgtgtatcatatatacatcgaattgtgggacactcttatagaaaccaaagttaaaaactgttggtaagagatattgttgtgataatttcattaagcaaggattttggagatgagtttgatcatattcaaaatgacattgatgcttgaattatttattgtattgtcagtcttattatttattattccttttctctattaaacattgattgaacattgcaacaaagcctctcttttttcttgtagttcttgaagaaacctgttgagatcactgtgatctgtctttggtgcttatgtaccacagaaaaagctaactgtaaattatgtttgatgtctaaagattgtcaatggaagaatttgtggagatattgctgtatcccgtgcttttggagaccagagatttaaaacaaagaaaaacgagttagttctactaatctctgcttactatttctagtgcataacatattcccatcgcaacttatgatcttattcatttacacaattgaataggatgctgaagaaaggtgttcaagaagggagatggactgaaaaatttgtttctcggtatgtcgcaaaagatatagattagtaaatcaaaacactattcaatcctacccatttgaaatttgtattgctcttaacaccttctattg

SEQ ID NO: 16041 - DNA, 3359 bp, Cannabis sativa
ataatggctttgatattagagggcgcagttagataataattttatagccatcgagagtgttttatttctttgttcagtttccattaaatgactgaacaaaccggagtctgttctgaaatgttagtcggtcttcagaaaaagaatgcaaaacccaataaataagaacagaatgaccttctgggaattaatcttttcctggatagatttctagcatattaacccccatccctaaatcattttaattttctatgatcagatctctcagtgaagcgcaagattgaaaaacaaagggacagagtacttcgccatgaaagtttgctacagaagaacccatttgttaaacctgtatcatcttcaatacctaagaaattcaataaaaagcttaaaaagattccaaatgcaaaggaagctttgaaggttagctagaacttctgagatttatacatgaacatctaattttcttctggctatttgtttttttaaaaaccaagtgtttatttattaacttttttttggcatctcaggaagagtctgccacagcttccgacattattgacatatgggacaagaaaggttttctccacataaattgttttgcaatgttacttacttactacaatgagtacatcagtagttttgtattccttttcacagatctgatagtttgtcttttaatgtacttgcaggtgataaccatggcaaggtcaaaaaggtaatttcatgtagttcatatatggacctggttaagttcataaagatgatcttgtatgtcctgttggccattgctctgactttgatatcgaaagaggattttgacattccttcagggttgtttatcttgcatgccaagcagggttttgttaattttcgtttactgtactcgttgtgcttattagtgaacttttttgcaggtagtaatgccttctcttatacctgctgtagaggttgatcatccagggtgctcatttaatccctcctttgacagtcatcaggtattcttttgatatgattgcctttacaattttttccgtgggaggactcttaagtcatttggacatatttgaccatctttttctttttttttcctattcaatccaggatgtgttagcttctgctgttgcagaagaaatgcagaaagtctacaaaaaggagttgggacctcaaccagttccattgacagttttaggagaagctatgaatgaagaagatgtgagtcccttttttcttcttttaatgatgctaaggtggcccccttttgcttatttgggtggatacgttttcccacgacccttataatttattattgcatatctatataatattttagatgtaaataaccacatttttttcaaggtctttgttatttattgttgcattttctagttttgtttagatgtgaatacccacatttttcttggactttttttttattagatgtattttattgatgctgatgatgggagtgatgatgatatggatccagagaatgacggtgagactgaggatggtgcagctgagaaaaggttaacttcatcttattgaaagggatgtcattgctcacatttttttactactgctcttgaaagtttgatcgtgcaaattgatttcctaataattgcatagaggattgtgctgatgaagattgttccttagatgttgctcatgtggttattttatgctatatttgaaagtcttctggaacagtgctcatttaaatttcttttgtgtcttgttttgcctttctatttgtcatctatggcacagtactcctgtactcatctgtttgaattcaccctgctataggtctgctaaatctaagaaggtgacacaggttgagctaaataagagagctagacgtaaagaacagcttaaaaaggatgcagagtcagcaaaagttgtgaatctttctcgagaaattgacaggtgattctatagacagtttgtcaagtagccttgtgaagagtacatattaatactgtttgctcttttgatcagtgtacaagatatccttcaagaaatagccaaagaagatgaagagaagcaaaaaagacataccaggcgtgttgtagctaaacaagaaagattaaagtcatgtccacctcgcttggggaagcacaggtatgtagtttcttgtgggaaattttgaatattttgaaatttaagtagtggatggacttcttcttccattaacttatgcagatctacattttcttcgggtgcttggattgtgaagtttaagtgtaatattattgtttatttccatttttcttactatcttctcggtcacagataagattttttcaaactagtttctgcatgaacacatgaaatttgtaatgctctgaagattgctgtgcttaatactgagattttaactctcttggtattttctttgctgcagatttcagcctgcccaaacgcaagtcttattatctgaagaaataactggatctcttcgcaagatcaaggtacattagatttagggcttcagtaaatatgtacaatcaaattgcgatactagttgaagaattctgattttttttttccttttgcacaaggcgtgttccaaccttgctaaggatcgctacaaaagcctggagaaaaggggtctgattcctccaagagccaataacggaaggttagtaacatagctgaatcttctcttctctcttggtttttttttttttccagaattctttataaaacacattcaagcctctgaagtcaacattgatattgttcttcaatgagctttgtttacacacataaatgcacacatatatcagtggaacctgtgcttggattttgattaatgacttgttcttggacaggaaatagagtggtcttgcttcagcttacaacaacatttctttgttttcggaacctactgatatcttcagatgattcatgctttaatatttttcacttttttacagcttctcatatctactataggtggtatgagacaaattttggaattacctttcttccttctaaatgtttctatttcttccttaaaaagaagcatagtgtaattttattttatttccaatgataatttcttttacatcttaaatcactgattaaaatatcatgtcctataattataatatatttcagaatattgtcattataaatgtatttttaattgttgctgtaaaattttgttatttttgacggcctctactttaaggtgtagttggtacttgattgactgttaaatgttaaatagattattgaaaatttagtaaatgtcgttttttttttttttttcgcggcggatatattaaatattttaaattatacataaaaaataaattgtgtattttaattaataataataattacttaataaaatt

SEQ ID NO: 16042 - DNA, 2767 bp, Cannabis sativa
tcgttgactcagaactattactccgccggtgtataagaatcaaagtcttctaattcaatcgatattcccaataaaaataacattattttctctctcaaaaataataaaaataaaaataacattataacattattttcaaagcactttcctgcctataatgaataaataacaacaataaaaataataataataagcaaactagagcgttgaaacttaatcaccacataaactacatctattactctatatataatttcataacatcatgaattagcacctaaacacttattaattttccatttgctctccagccatggtcaccttcttccttttcttattcctatgcttctttcctcctattgattcactccacttccaaaaatcacgctttgacgtaactgatacaaacatggtatatcaaggagatgccttgcctacagtgggagctgttgagctaatcaataaaaaaaattatgcatgccgagttggttgggctacatatgccgagaaagtgccgatgtgggactccaacgaccccaaaaaggtagctgatttcactactcacttctctttctcaatcataatagaaggctcaaactatggtcatgggcttgtctttttccttgcccctgctggattccaaatggtgcccaattcaagtggtggatttttgggccttttcaataccacaactagtgattcctccctcaatcaaatagttatggttgagttcgattctttttccaacgaggaatgggatcctccttatgagcatgttggaatcaacaacaattccattcactctgctgtttcaaccccttggaatgctagtttgcatagtgggcgtaacgctgatgtttggatttcttataacgcttctaccaagaatttgagtgtgagttggagttaccaagctacctcatctccaaaagagaacactagtctctcttacacagtcgatttgaagcaagctttgccttcatgggtaatggttggtttctctgctgctacaggaatatatggggaaagaactgttcttaattcatgggaattcagctcaagtttggatgtcaaagaagtcaaagaatcagatgcaaaaagagtaagactaatagttggattgacagttgccagtggtgttttaatagtttctttgatcttgtcacttctattgttttggagaataaaacaaaagaagaaggagaaacagaaagataaagaaaaggaaggaaatttactttcaataaacaatgatgaccttgaaagaggagcagggccaaaaaggttttcatacaaagatcttgcttcggcaaccaataacttctcagatgaaagaaaattaggtgagggagggtttggtgctgtttacagaggctatttaccagacttagatgcctttgttgcagttaagaaaatttcaagagggtcaaggcaaggaaaaaaagaatacctgacagaggtgaagatcattagtcaattgagacacaggaatttggttcaacttatgggatggtgtcatgataggaatgagtttgttcttgtttatgagtttatgccaaatggtagccttgattctcacctctttggcaagagaacacctgttccttgggctgtaaggtacaagatttctcttggtttagcttctgctcttctctatcttcatgaggaatgggagcgttgtgtggttcatcgagatatcaaatcaagtaatattatgttagactccaacttcaatgtcaagcttggtgatttcgggttagctcggttaatggatcatgagcttggtccccaaacaacagggttggttggaacattgggttacttggcacccgaatatataagcacagggagagctagcaaagaatctgatgtgtatagctttggagtggtggcattagagattgccacgggaagaaaagcagtgagtcatttggagaaagatcatgatgaaatgggaagtttggttgaatgggtttggaatctttatgggaaaggaaagcttataacagctatggatgagaaaatggaaaaagatttcaaccaaaaacaagtggagtgtttgatgataattggtttatggtgcgctcaccctgatcggagcatgagaccatctatcagacaagctattcaagttctcaactttgaggccacgtggcctaatcttccgatgaatatgcctgttcccacttatcatattccggattccacaccctctgttagctccggcgaccctttcataagtaccagtattgaagctggtcgctaaggcttgaaattattaattaattaagtactaatatgagtatattgcgttgtaagtttaattcttcttaaaacgttatggttgagttgatcatgtaattaaaaaaaaaaactagtataataaaaagatataaaatctaattcaattttgtcatctgttttcttaaaatatattaaatttaattctaatatatatccataaatttagtctaatgtaaaaacaaatatttacctaattttaataacacttttacataattaaatattttaataaataaaaaaaaaatttgaatattttaaataaaataatcaaaaaaattatttaaaaataattaattaattaatttaatagggtgttagttaataatttattatattgaggtacgaaatatgatggttggtcaagggagaccaagaaaggcgaaggaccccatcagcactctttgggcgggctttgggcgacgaatatgctttcggtgagtaaaagggtgctctcttcacgtcc

SEQ ID NO: 16043 - DNA, 6333 bp, Cannabis sativa
tctctctctctctctctccatttagtaagttctctgtgtgcttactgcagggtatatggtggggaatgattattggagttcttttacaaacattaactctaataattttgactgcaagaacaaattggcataatgaggtaatgacaattatcatcattaaatattttattaataatttaccagaaatgcattaaatttgatgaagggtctttactaaatgagtgtttgatgtgttgtgtttataggttgcaaaagctgctaatcgcttaaaggcttcagcaaatgaagaaaactctgaattgattatcagcgcatgaaagagttgtccaaactatttctagtaatttggctatgtaactcttcgtgctctcttcctagtttagtttagattaaaagaccaaacattggcaattttgcttataatagaatggaatatctctccaccattaatgaatagtcaactaatttctttttaccaaactcatttttttttcacatcagcactgaacatactgttggttgagtacaaataaatcaaatttctaagaaacataaattatatacataatattaatacataaattatgatcagtaaataatacagacaattgtaacatcatcaaaactttgtttactgtaacgatcagagcaaaattgatatgcttaaatgccactatggttctatggaacggtttcattccaatgtacacactctcaacttatctcagttgatctggtgtggtgtgtgatgactgtatcctaacattcacatatcagcagattttcagcaaatgcaatgcttcgaggctttcttgattatcaccgatttgcctttgttcatcataattctcttcctgagaattagcattcgatggaggaacaaattcattgtcactaagaccaccatcttcatcctcatcctcatcgtcactatcatcatcatcatagctagtaaccccattaactctttgttcaatgcttttatgatcaacaagtcctacaagttggttagcttcaatctgttcgtcctctgtttttgccaaagacaaaaggatgttctttgctttttgatcgggaggaagcccacaagcttccatttccttgtaccaatcgacagcacttccaaaatccctatttctgccatacgcatccataattgtggtcaatatcttctgattcaattttacaccgtttaccttaagttcctcgtatttctccatcattttctctatatcatttgtccttgcgtaaccttttatcaaggttccatatgtgatggcattgggttttaatccatcttgttttagtctggtgaaaaacttttcagcaccctccatatcggaagcattcacataagctgataacatagttgtataagagcaaatatccggagtatacctgcaaaaacaatttatagaaatgagggagttaagaataagtaaaggacaaaaaagatcataagaaaacaaacagagagacgtggacattatctatcctccttttcctttttctctaatttattttttcagtaattatttaccggcatggtggcccctaagaatcgatcccagattttgtaagaacaaacacaaactttactatccaactagccattcaaggttttcactacaatcaattattggaaaattctttggtggtgaacacctttctgtattggcatatagagaagttataactccatttttttgtatgacagtattcattatagttttaggacatccggtaagttttcaagaaattctaaattatttattgtgtcgaaattagagtccaaacagcatgtgcacacgcatacaaaaaaaaacagacacaccgtgcaataaaatgttatgactctgatttcaacaccctacaaatttagaatttcctgaaaacttgcagaatgtcctaaacaattacaatgaacatttgtcacatatgaagtaattataatgtagattctagatttttacctgtctcttctcatactcttaaaaacagttcgagcttgctcaaccattcctgatattgaaaatgcatccagtaatatgttataagctttgtgggtcggcctggtaagagacacaaaaggtgtagcgtcaccattatgatttgaaagttataacaagaaattgaaatctcaagctttcgtagtaacaaacagaagtaagaaaattggaagcttgcacttctaagaaatggagacaagaaatcaaaacaatcaatgaccattggtcggttttaatcggttttcattagcaaatagtctcataaaagcaatcaatcttgtaggcacttgttatccaaagcaaccccccaacacctcccttcatggaaaagtgatggggagtaaacaaaatatatcaaaacattaatatctaaaatgaatataccaattagacaaacaaatgccttttgctctcttacctcactgccttagcagtgattatgtaacactgaagagcaataaagagaacttgtatgtagatgatattccacataagtttatcactatttaccatttagaatgtagcatgagccccatgactaagttggcttctattaacttgttagttttgaatcaaatgagttgtagtaaataaatgaaccagttcatgtcagaaaagtatcttttgaaacaccaatgtatgtataaccaaaacaaaacaatagcgttacacacctaacaccagcatcaagcatctcctcgaacacagcaagtgcttcttcttctcttctagctttaccataagcactaatcagtgaggcatagctcaccacgtcaggtttgaggccagctctttgcatctataatttgaatattttattcataatgtcagaaatttatactggtttcatacaaaataaatgagactgtcatcctttcgtactcatgaaaatcaaattaatgatgctagactttaagctattccaagactataaagccgagtaataaaaacataaaagtatcatcacgtgtggtgccatttattctattcaatgttgaatattagacaaaaagaatcggactgagcagaaggcagctcattcgttttggtaagaactgaaagaagttttaaactagacaaacaaatgaaaatactgattattcaaatagcaaagggaaccccaaatagaaagatattcatttagaataatagattaatgaacctgaaaaactggtcaggcaactattgctgcaagctagtagttcggaaaaataagaattattatttagcaacctaccttaatgcataaacaaataatccttcaaccttacctgatcgtatatcttggaaacttccttgtaatttgtttcaaatgacattaaactattgtaagtaactgttgattgctgtactcctctctcagccatcactgcaaataatctgcgagctttttcataacttccagccttcttatacatataaatcatcatgtggaacatcctctgatctggcttcagtggtggattcttgccgttcaaaagggtctcgaaaatttcttcagcttcattgaacttgcatccctggagtatcaccagttacagttataacattggaagagagacactccaagaaaagcatcatggtgcagtaaaaaatattagtatggctacagaaacttattatttaagtcagaactgcaacattctaagtttgataacttctatagatttttccttattatactatttgctataatgatggagccacatagtgatttgggggctcaagccctgtcaattgttttcccttgtaattttttaattacttgagaaaaaaatatttgtgtaaaatgcagaaaataatagcatatttaatacacagttagcctcctaaaaaagctccacaatccgtcaccgattggctgtttgaactttgcttgtaagaaaataatatgtatagtgcagatttatataagaagttccactgagctaattgagttgaattttcagaaaggcacctcatattctttacagaaccgaactgcataagtttatatcatatgtaaaagtgatttggatgaaaattaaagctttagtagactaacatctaaagtgaaaacagtacctcaacaaatattttaagtattatttgataagtcagagccgacggttcaggacctgaagatttcatccttcgaaatattgcttcagcgttattatagcggcctcctttaccatatgcttccataagagcagtgtgggatatcacacttggcggataacctttcttattgagcaaacttaaaaccttctcagctcggttgaaatcccctgtctttccataagctgttataagcatcaagaaatccatttcactaaagttccaccagctctgagtcctgagccattcaaggatctaaaaggcaaaagaaataagcttgtaacaactgataagggaatccaaacactaacaatcaataaatttagggacaaaaagacccatttcactaagacattatctttttctattaagataatgttcaggaatttcttgaaagtgggttatgtctataacaaaatggtcaagtgactaattatttgcagtatctctaaacaacaagtcttttgatctatagaattaaaatatatccatcagatcatatgtaactcgaggaccaaatagtgcatctgtacaacatacctcaccaacaagtttccatttcttcagctgcttaaacctaaccaaggtacctagcacaagatcctttggtatctcctggttcttcattctttctcttctaagcaccgcaactgcggaacccgtctcttcaatttcattcatcagtctcctccagttcttttgatcaatttcatcagcagcatctttaaaaacctctactttctttcttttccgcaagaacttcctcggcgaaagcattcccatacaaacaacctccatctttctctgcattttaatgttggcatctatacaatttgtgtgtacattcgatttcctgtggtgaagaaaacaaataattacagtatcccaaaatcataaaggccaaataaacttgaactaagctatcttcactgccaaaaaaaaataaaagaaacattatctactactagaaaccataaaactaaacccgaactgcaaaattttagttcaagataagataaatgacaaaataatgcaattaggtagataagaaatacatgccccctataacccaaactacaaaccaaacataaattcattcccctctatgtgaactcaaaacaaggcattattcattcatatgattggagtgattggatgcagaaacagaaaaaaaaggaactttcccagaacatcccatttgcagaactacaattctaaggcccacactccatggtatcctcaaaatggggagagaagtaagaattttgcccaaaaaatatgtacagttgattgtagtgaaaagggtttaacaagggtttaacagaaagaagcagcattagataacaaacctccagttatgaagagggaccgaaacaaagggcttcaagaaaagggtttgtggcattgtgggtgtctgtacaaagatggagagcaccaaaagttttgaggagtgtgtatggagcaaaccaattttttatatttcaggtttggaagaagaagaagaagactgaaaaaggaaaaatcttatctgttatgtggcgggacccgctcagccttgaaccggacttgactcgtttggatattaaaaccggttcactgagatgagatcattacaattacggtgtttaacaaaatttacaaagtgaccgaataaactgttcaaaataaacagacgaaaaaaaatataactcaaaacattacaatgaaaatttaaaatgtctaatgaatatattgataattaacccgaattaaataaatttatatattttttaataaatatatataatatattatataaattataattaggctaattaggatttttggctcttgaactttgacatgtactaaatcatgcccctgaaccctaaactattgagattgttagatttaaagacttttttccaatttaagtaaaaaagtctaacatggaagaaagtccagaggccatgatttggtacatgtcaaagttcgagaggcatgatttgatagatatcaaagtgagggagcatggtttagtatataaacaatcactaaaatagtaaaattgaatgaaaatagacaaaagtccttaaatccaacaatctcaatagttcaaggagtaaatttaacgaccttaaaaattcaggtgacaggatttggtacatgtcaaagttcagggggcaaaaatcttaatttggtacatgtcaaagttcaggatttagtcaaactattttgtatttaa

SEQ ID NO: 16044 - DNA, 8103 bp, Cannabis sativa
ccgacttcagcaagctactagaattgcccattcttctcctactttacgactaagttgaaggcgaaacttgttgttgtgttaaacgcttgcccagccaaaagtgatgatggccacaaattggaggtccttattaagtggaaagatctaccattatttgaagatacttgagagcactttgacaccatcaagcaacaatttcctagttttcaccttgaggacaagatgaaagaatttgcaggtggagcgataatgataggcaagtgatacacttaacttggaggacgaaaatagtaattactaattataccggaaagcaacaatttcttagttttcactgaagacaagatgaaagaatttgcaggtagaggggtaatgatagaaatgtgatacgctttacttggaaggggaggaatagtaattaccaattatactagaaagagtattgtgagaagttgtggtaggggtggcggtggtgagatgggatgggaattgactttgtagtgaggtgagggagcttagctattggattacaagtctcataaataaagttaaccactcatcaaaatgtgattatcaaaatatcaaatgttactatatttgtatgacattgtagttaagtgatgttaaagtttaattagttattgttctgtatatattgttatacttgttgaatattattgtatctgtacaagttttatcaagaaattttatatttttagacaaatatttgtgacaaccataaattatcttgaaatttccattgatatcgaaaatatctctaatattttcataaaattatagcgtcaatattttcatccttgaacagtagataatagaagaaactaaaaggaacctaaaggaaaagatgagaaaacaaacatcaatacaaacaagaaaacaccatgtgaattcaaatatctactttatctaagaagaataacttacattcaacagcttgaggtgatcacttttgaattctgcttcactgtatgaaagtagctggcgcaaaagccaaccaccttcccacaatgtttctgctgatatatttgaacgacaaaatagactgaccaatgcatcaagcacctaaaaacataaccacaaagtaaaaaacaaaaagttgaaccatcaaagtatttttacttctattgatcattacacgtaccccacagaaaaagtcaatatacaatgtacggaggacaaaaataaagcattggattcatgatatttttaaaactctgtacttggaatacagaataacagaaactagtaagttataataacaaaccaagccatgtttgacttaaaaataggaatggtactaagattggtttacaaataatgtttggtggtgacattaatatctttttctttcctttgttctctcctttattttttcaacaaaactaattgtatttattgattagggtaaaaatacaagaagagagggtaaaacccatctatacagcccagaaagaaaagttatgataagaaactgcaatctcgcagccaggccaaaaaagtaatgtgaaaaagaaaaagaaaaagaaaaatcttatcatcgtgcagtgcacacagtgcaactttctgttttaacactaccccacaacctttcttcaaaacctccctcttcttcaaagattaatctatttcattccaccacttgcaaacattttagctggaatacaccaatataacctgaatattgctatattgctataaatataactcagatcggaaataatgtttggcggggacattaatatctttttcttgttttttttccctctccccacagcatgaagctatatccttccaaggacttctacaaatcttcttatctactgacttattattgcccggattggtgccttacctattcctttgtgaccccaatttgctctattcattttgtgctataatgaaccctttctcctctgaagtctccattaccattttcattaatagcacattattccttagtaacaaattcttaatttctaaacctcctttacacttggttttacacagactagatgatctcctccatgatcccctgctttccccccaaaaaaaggtttctcattaaccttcccatttccaccattgaaataggagctttaaataatgaaaggtaataaattgccaaagacatcaccggctgtatcaaagttagcatacttcctctttaaaagtaagcatgtaagccttttttacaaaccttgtgttagacccgagatatgggtagtatatagataatagggtacatgggtcattgtaaagggttggttgatgagttagaacagtatttatatatatatttattctaactgagccttggctcttggagagtactctgggtctctcgaatacccagctgttctattgttttgtttattattttatcatctaatagcatatggtttctccatcgactagatcatatgctttttcaaagtccactttaaatataactctctcctgctgctgcataaaatcttccagtaattcattaacagctagaacaacattaaatactttgccttacagctacaaaagcaaccctttgcttttgcgattgtctcacttaacacttcctttagccttatggacatcaccttagaaattacattgtaaaggcttgtcacaaaacttgtatgtctaaagtttctgactttatagttattttttctatagtaataagaaacaggaaaaaaggaaaatgcatcttgtcatatttactctcagctttgtactgtatttattctaatcatataaatcatgttcctgtgatgggagtcccattcttgggttttcaattttgtagggatccaggcaacataaaactctcaataataccattgatgtcactattttgaagggggtgagggtctgtaaaaaagcacaggttagagaacatggaatttaaaacatcaaattcactttctcagttctttcgttgataaaccttcttccccctgttttagcctttctgcattatttgtaaaactcttttcatatttacttggtcacatgctcttcaaaatcagaaatactcatttggatgtttcttcaggatggtgtgtgctatgcagaagaactaaccaggaattagctgaactttagcctatttagaatgtttataaagtttgtgcagtaaatggattatgagaaggttcatggttttatgaggattcgggcttctttttgttgttgttcttatttcctttttacctttgtctttagtaattgatatacggtattacttattgggccattatattcacaccccaacaccccaatattcaaaaaaaaaaaaaaacttaaattaatttttaaaattttatatattttcttgttttaattgtttttgtcttagtaattaaaatattttttattttatatatgtactgtttagaaggtgagaacatataaaaaatagaacaaagtataattaaaattatatattttagggtaatttggagcgaaacccctttatgttttaattttatacacttaacaccctgattttttttcttggtggcaataccccttaactttatttctctttgtaaatttgaggcgccaggtatatcccaatgttaaatacctactacattgtcattgtgcacacctgtatttgcgtggcatgtttttacaggtatacccagtggcaatctcaattggcagttaacagtagaatttaactagtggttcaaatttacaaataaaagtgaagccaaagaaaaaagatcatggggttaaatatatagaaattaaaacaaaagggaggtttcactgccaactaccctatatttttacaaaattaaaataataaaatgggatacttataaacctttgggtgttaatatagtgctgcttacttatttccgtttaattgttttcctggactctctgtctttgacattttgggtttcaatccttcttaagatttaataataaaaggaaagatttaataataaaagggaaagttagaatataaagtgtgagataagcaatcagattgagcagaactcctcattaaacatatacaatacctgaaacctgtgtacatgaggacttgcaacatcccggaaagaacactcgactccatacttctcctgttagacatagaaaagagcaggagaacgtataataagacagtgctcaacagcacatcaatgactactaaaaaaaatcttcacaaactcttgattaaacctattcttcactacaacgtctacggtcttcaaaataaccttctcatatagcaagcaatattataaactaaaaattaaagaaaaacaaagatcacatttccggttttgtaagaacttgtccaaaagaggccagaaaataagctataccttgagctttagtagataccgatctagctcactaccaatgttttctctcattgaattactttccaaagagaacagctgctcttcactagggccttcacccaccaaagcttcctgaaaatatgaaaataacacaatatatgtccatcctatagatattagatacaatcaacttcatcactgaaataacaactaaaaaggtctatgactaaaacaacactttgatatttggtttaacatcacaattctttttaagaaaaaataaaaataaataaacttccttgtattgatattagatcaaagaattagcagaatattttattggagttcaagtttctcttgcacccttctaaccacattaaaatccctccccaaacaccacttctcaccacaaaaggacctcagaccagaaaactcgtcccaaaaatctaaccatccactgttttctcttgggtcatgcaccctcaaaaaccaccacaaatccttcccgtcagcttggatgagtactaacatagaaaattttccaatgagagaatcacaaattgtaattcttctccttacaatacatcctctcgatctcccaaaagatggatgcaaagtccctgctctaaaacaagatctccaaatactacctacaaatctcttatctacactcatttttacttcttgaaggacaatcaaatctgaaataatcttgcatattgttgctttaatggccctcttttccacaaacccattgccccttacattccacgtcaacatcttcattattgtcttcccgactcccctttccaaataaaacccttatcataatttctcttcaaaatttggaagtgactttcctgatctagcagtgatttctaaagtgaagaatgagagtataaagaaggtagcagttgacaaggggttggtgggtgggtgggtgggtagagagttggaatttcaaatttagaaggaatctattagagcgagaagttccaagccttatttagctactgcagaaactggagcatgtaaaagcgctcaatattatggatgatagtcgaatttggaagccggatccatcatgggtgttttcatgtaaatcggcttttagcggatttacctcaaacccaactcataggggtttgttttggacaaagattttatggaaaagctgcgtaccatcgaaagttaaagtattaggctggcttgtgtcgctaggcaaagtgaacgtccatgataagttacaaaaaggagatcttatctctacatttctcttggctgatgtgtatgctgcaaaggaagtggggaagatttgggacatttattcttctagtgcagctttattcattgattatggattaatttgctggaggaatttgagctgatctaggttatgccaagatttgtaccacaaacgatagttagcaaattaatgggcagcagaagaagaacaaaattatggagaacagcgatattggcaacaatttgggttgtgtggctggaaaggaacgctagaatctttgaaggggctgagagttctaagtcggatatgtggtaaaaagttaagttctggacagctatttgggtctttaaaaccaaacattttgatggtttgtcattcttagatttaagtagagaatgtaaatctatcatgtagtggtatcaaatatactgtttgttttttgttggttgttgtaggcaatgttttgattgtgattaaacttttgtagggccagtctaagacaagtggtccctttctctttttccaaaaaaaataataatttctcttcaaaatcactgtaatacccaggtcactcattgacttaaatatattaagccatatcgcacaatctggaagaattgaaactgtttctacctaaagatggaaacaaagtaaaaacctcatcctcttagcaattctaattgtgccaccatacttggacaaagttaatataacatacttatgtctagttctgaagctccaattctattcctactttgtccataactagtggggttatggagtttttcaccaccataatcggtgggttatgaagtttttcaccaccataatcagtggggttatgaaggttttcaccaccataatcagtggggttatgtggttcactcaaaattcaaaacacttcaatagccattaagacaaagaaaacgaaaagacataacaagtttctctatatatagaaaaatctaataatgtaaaagggaatgagaagttgccttaaagaggatcaagtatggggaaactggtgtcttctatgaaaaggatgttcaggattttccttatttcaatagcagattcccccaccaacccccaaccccctctcttttctttatgccctaccctatttctaccttctaacgcaaaataattgtcgtggcaaagattgtgctacgaatttatagcatataagtcccaaccaactttttctttgttaatcttaatcataagacatagtaaaggatgtttcataagtcatgacataccaacaggagtcgtttatgttgtttgcgttgtggaagaattccaagagcatctagcattgattcatctagttctgcattaatcaagaataatgagagaataattacatgaagcaatgtttacagaaatgattagcgcataactaattgtaatatgtataagacatgcaataatcaagttttgaaataacaatcatgaaagataagatttgaaataacttgatgatcaaaaatccctaataaccataattataagatgtcccatactacaattataccttttgtctgcaacaacgtagccaacacgcacaaagaacccaaaacttgtacgtcatccccactagttacatagtatagcagagtctccctacatgtatcacaagttccattaatagaatacatataaaaacatatattacctcgttatagtgagaacaagacgcaatatgaaaaatgaaaagggggaagtggaagagaaataacaaaaagttattgtatctttgcaatacatgtactccaaattcatcatatagcataaaacaagattacaataaaatttagacacttgaaaatattgaaatatagaatttctccaaccagatgtcctaaagaattaccactacaacacacctacacaaagtcttcatagaagtacctatataatcacagatccaacgacaacccaaccaactacccttcctactataaccccatttccaatatacatcaatgaaaagcctagatattaaaaccctagtcatgaattagtccaacttttctgcatttttcaggcacaaagtgcaacataaggcagcaatgacttgtgaacagtctaaaagataaagaagatatgatatggcactataatgaccaaggttgtgaaattttcaataatttgtaattttcaaacagacagctagagagtaaatattgtttatatttcctaattttagggattttttggtttaattgtgtgtggaaaagccttgtatacaataagagatattgaatctcgtgagatattgtatacaagatatgataggtattatcttatttcaataagagatttggtttaattgtatacaatatctcacaagattcaatttctgtttatatttcctgattttagggattttttgttttttgctaactttagggattgtttgtgctaatctatagatttttcaaacctctgtgaactctatatagcctgtctgttttcttcagccaagtgatagtaaagaataaaattctc

SEQ ID NO: 16045 - DNA, 6252 bp, Cannabis sativa
  modified_base (1931)..(1945): a, c, t, g, unknown or other
aataaatatttattatattttttaatattttttattatatataaatgtaattggattggatcggtttttaattagattttgagattgacatcgaataacctatcaaatccaattagaatctaacttttagcatccaatccaactttttgtaattggattggattggatcggttcggttcaattggattggattggatgacgcccacccctaataccaaaggcaaaaaaaaattactaacaaattattaagtattacttcagtatgacattgaacaccttaaagtctcaataacaagtacaaaaaattatttactaaaaatagtatataaaaaaaattaaatgagagaaaggcaagtggtttttatttgttttattgtaacatatatttatatataaatattataaatatattatatatttaaatagaataattaatatttttgtcttttaaacttttggcactacttgattttacctcctaaaatatgaggcttgttaaaaattcttcttaaaatataataattacataattatgcctcttttgttatgttctgtttcttttaccgttaaaagttagtattttcacctcctgaacattgatcaatacaaaattttactttcttttattataaaaaaaattattttaaaaaattataatattctatcttttttaaaacaattataatattctattaattcatacaaaaataataaaaattattaaaaaaaattagataaaaatattaaattaataaaaaaaaattaattttacttaaaaaaaatcaaactttttatatatcaatgtatcttaaaaaatcaaatcaaaattattaaaaatctaatatataatttaaatgaactaaaattttttgaagaaaaaatcagacttatttatatttataaactcataccttaacaaataaaaaaataattaaaaatttaataaaaatataatttttttttaaaaaaagttataaaataaataaaaaaaaaatgttaagtttacttaaacaaatttatattttttttgataagaacaaaatatattcaagtttgttcattaaaaatttagtttctacaaattaaatttttaatatatttgtttaatatctaaatgaattttctaataaaaaaaaataattttttatatcgcgtaattaattttaaaattttatttattttatttatttttttaatttttttaataattaaaatgatttttcttaaaatctaaattaaatttttaagatttactaaaaaaaaatgttgaatctttttcatttttattttgagggggtatgatttgatagttgtcaaagtttatggggtaaaattgttaattggtaaaaacatattattatttaaacagaataattgaacggaacctgattgactaaatttctataaatgtaatagtttaagagaatttttaacaagtcgtatattttaaaggctaaaatcagtattatcaaaagttgaaagaaaaaaattattaattattcatttaaatattagaaatgttttataatataaaaataaatttggatactttttcataaatttatatgtgaattgcactatacctttttatttttatttagttgaataaattattaaaaaattatatataattgaagaagacaaaagtatatttatactttacaatccatataagattttttttttttttttttgaactggatccatataagaatttgacatgtgcaaaatacaaaaagcaagggtcaattataatgaatattattattattaatatataaattttcttttgaataaattattaataataattttgattgatggtgagggcagaatgggtgtgccagtggcagtgccacaatatgaatgtcatccattcacgtaaactattcttctagaaagagtagatcaattattattattattattannnnnnnnnnnnnnnttattattattattattagctgtatatactatacatatactatagcattggcaggggcgtgtctctttgctccatccaaggcccaagcactcctctaaatactggtgtgcagggctggattgtgtcgtgtcggtccataaaaaataggaaaattatttcctatattaatcttttaatttttttttttaaatttgtggtttaagtttctaaagtaatttctgcgataatttctatgtaagttgcaatacaaattttggttgcaatttaagttgtttcgatagttgtaataaggatttctatatagaattccataataaaaaaaaaaaaaaaaaaaaccgttttgaaatgtaaaaataaaatagctcctaaaaaatatagactctaccgtgctgccaatttttcaaaagtaggttcagtacaatatgtaagcctaacatacatcgcttctccaattagagggatagagaagttaagcactttggaagccgcccacaaaactgtctccttatgactcctaaccaaagccaccatgcacatcgaatcacaaccaactttcatattaaaattgattttggcccaatcatccgggggaggggaccaagcaagagacttagatgtcatcagagaagttaacaaatataaccataatccacgtaacacatatagatagagtcaatataccgtttaatattacatatagaattattatgtaccttatcattatgagctttctagattgtgttgactgtaattgaagcatacaggaatagctcttgaatgttcacacctctagtctttagactcaagagaaatttaacccaatcccacattcgtgcaccagattccaaaactgaaaaaacaccccatgggaaagatctctaaaggtgaaaggcaaagttgcaatagagaaaaatgtgttccatcattttatcactctctccacaaaaaggacaggaaacatcctcaaatatgcaaccttttagccaaaatggagcgaataggtaaagctttagagagaatgctccaccaaagcaccttgtgacgctccaaaatttttgaattccaaattttattccacatattcagagcaacactacagtgaggagcccgattcagggccttgaccaggtaggccgatttagtagagaataaaccatttgactctttagtccaaattcacctgcccgtaccctgacctctaggtttacctcccttgataatgtcatttgtagtttcaggattaaacatagcttggagcttagttaatttccagtctccattttttgttagtaagttcgctactttctccaaaccctccacccgagtgcaattcggttgagggtagaaatcatggtcatgcataatccatggatctccccagatattagtatctttcccgtctgtagtgattttacaggcaccctgtttaatgatttccttactttttaccacattcttccagaaccaagagtccgagctcttgtaggcataattcaagaacgatcctccctttaggtacttagcacttaggaccttactacacagtaactgatcccgagtaagaagagcccaaccccatttttccagaagagcacgaatcatttcttgagttttcatgaagccaagaccacctctggactttggcagacaaatatgatcccaagccttcaagtagatacccatgtttccttgctcacaaccccactaaaaatccctaaccataccatcaattttagaagcaagcctattagatagcttcgttgtttgcatcatgtaaactggtaaggagaggcctactgatttgatcagagtagctcgacctgctttagagagcaatttcaacttccacccatgtagcttggagactaggttattaagaataaaattaaagactacatctttatttcgactacgaaacagtgggagccccagataattaaattttcagcggcaatgttaaggccaagttctttcttgatattacgtctcatcccctcgctggtattcttactaaagaaaatggaaattttcaatttatttatacattgtctcgactagtcacagaactttttcggacacctccaaatacccttagcctcctccaatgtggccctgcccacaagaataagatcattcgcgaagaataggtgggaaatctgaggaccattcctactcaacttgattccttttatggttccattgtctagttccctttcaagaatacgcgatagaatctcggctgcctatatgaacagataaggagatagagaatttttttgcctttaatcgcattcaggggtgagcctaataatctgataactattcaggcatatattaaacgaggtcgtggatatgcattgcctgacccagttacaaaatattttaggagcttcaaagtttcggagcacatgatcaatcaactgctaacttagtctattataagtttttacgagatcaattttaacggcaaagaagccctctttttcttttttgagcttaaatgtgtagatgagattttcaattatttaaaacttctcactaattttcatgagattttcaataatttagatactaaaaataaattttaaaataatttatctcatacacatataaaacatgttctaaaacaatttatcatgtattttggacatcaatacaaaataaaattgtaatcaatgtatatatgccaaaaatctaaaaatagttaattttaaaatttgttttatacacatataaaataagttgttttaaagtatattttatcataataataaaataatttagttataatttttgacccaaaaaaatattcccctaccaaataatttttaaatatgtaatttttattatagcaacaaaaaaaaattatctggtgcattgattctttttctctattatattgattctacccttctagaacatcccccactactttttctaatccaacccttttttttatttgtttttaataataacgcttttccttttcaaggtgtcaaatctaacgtctcttactctcttacactatttttttttcagagaaaacttgcgagatttttttcttctttcttttccttgtaaccaatcagctactgcaactgcgttcatatatatataattttttcttggaaaaagcatggaagtgatgaatattactaatagaaatgctgtggatttgtcttccttctttctattcgaagtcaccggcgattccgagttttgttctaagttcgattctgaagatacctcggtttctctcgatgaagacgatgctgaatcgtgcagttggggtatatcagccgacgatgatctattatatgcgtcaattggttatgaacatgattcaatcggcgaagaagaatttgtaattgattatttagaagaagatgaagatgacgatgaagatgaaacgacgtcggatccagcttaccgaaaatggagtagtggagaaataaataatattggtaagtcaaaagagagccataataaccataatagtaaacaaaaatcttgtgtctctgtagattcaacaacgaaagagtttgagtctttgaatgaaatggagaagaacaagctcttttgggaaacttgtttggcttcctaattttcttttggttttttttttttttctattgggatgttaattgttaattaaatatatccaatattatacaattaaaagtttagcaatgtgtaaatatagtaactttttagttctttaaatgaataaaaccatattgtgtttcatcttgggattttcttcaatattatttgttacaaaatcaaagtaagttaatactattaattttttaattgaaaaagtaacttaaagtttttcttttattattattattatatttaatttgaagggcataaaactaaaatgtatccaatttgctaaattacaagaatctgccccttttgataaatctttctcactttatttttctgggtatatgagtctttgattcgaaggatatctagtcggatgtttcctgcttttacttttttggatagtggccgttgtgttttgtattttattttttccattggcatctttctttttaattacttgcatattatatagttgaagtagctcttcaattattaatgatgaaaatattagttgtgtgtagagaatttaatgtaagagtaatcttacacgcacacaaaaattgttcacttttaaccatgtgttttgcaaatagattagatcatctatttgttaaatgataaaatagacttcatatttttttaaattgtacaaataggaccttgagttcaatttttaataatttttttttttt

SEQ ID NO: 16046 - DNA, 6158 bp, Cannabis sativa
tattgaactgaaaatatcattcaactataccaactcgaccttaataatgacaacaatatcagaagggagattagactccgaaaaacacacaatcaacatgtaaccaagacactctagccacaaggtgagcgtttacaatcttcaacgacaccaccaaaagtggattgcaatacattaaaatttcgaacgacttgcaccaacaccaaacagtcagattcgataacactaacacccgagaaatcacacttcaaccatgagaacacttctttgagagccacaacttcattaataaaataaaagttattaaaaggggtgcaaataaaactctggatacttctacaatgcacccttaaaatgggtcaatcgatgcaccccttatttattttgatatatgagagaatttttaatttaattttttttcatggtcgtctacgttgtagttatttaagacatactgtaaaaaattaagagattcagaaaaatttaataccctgaaaataagtttaaatagtctattgtacacaagactcttttattttatatacgtgtgaaataagttttttgaaccttattttcagcgtgttatttttttttcgaatttcttaaaattttataaaatatactaaataactacaacataaataaccatataaaaattagattaaatttttttcacagatgccgaaacaaataggggtgtatctaaaacctccttcatctattctctcaaaacttttctttattccaattttgccctcaaacatagggcgagagacagacctcttcctcttcttccactcacgcagcctttgcttccttctctctactctcttttctcgccgtctctacctccggcgacggcaaacggcaacggaagtgactcctctaacaacaggtttctctacgctctcttctttcattctattcaaactgtttctctttcattattattgaatgaattgattagagacttaaaagagtgaagattttgagaaaaatatcttagaagtttcagtggatgatttgattaagcttaaactagggttagaaggatgtatttgaaaggtttgatctttggtaaagtagccatgaataaggtttcaagaatcaatggaaggagatttctttgtagtttcgccatttctgcacctttgaattattcatcggttgctcactcttcaaggcctttaagaaactttaataaagagtttgagagttggaattggagaggcattcactcttctccgtcgactgagctgatgagctatcaatcagctaatgatttgatacttgcttctgaagatcaggctgaggaagaggaagatggcgtaattaacgagttcttgtctcgattcgtttggataatgcggggtaagctcactgattcttaccctgattttaataaggagactatagatggtatgcttttggttattgttgagaaggttgttttggagatcgaaaagggtggtgttgagcagatgcttggttcttcagcggaatctactactgcttcgcaggagtttagtgaagatttgtggataacagtttgggaggtgagtaatatggttatggatgatatgaaaaaggcggttaagaaggagaaaatgaagggttttttgcaatgtgaagaggttaaggagttgtgtaggtttgctggtgagattggtattagaggggatatgttgagggagcttaggtttaagtgggctcgcgagaaaatggaagagagtgagttttatcaaggtttggagcgtcttagagacgaagctaaagctcaagatgaacaaggtgaagaagctgtggccgatggggctgaagctgctgttgtggttggggcggaagaggaggacaaacctaaagctgtgtctcttcccaagagacgagggaagataaggtacaagatttatggtcttgatctttctgacccaaagtgggctatggtggcagataaagttaatgaggctgcagaagtaatttggcctgaagaaccaaaaccaatatctggggaatgcaaacttgttactgataaaatagtttcattgactgagaaagatgatccatctccacttttggctgaatgggcagagcttcttcaacctagtaaagttgattggaccaatttgcttgatagattgaaagaacagaatactcagctgtactttaaggtaaacaaacattgcatatgacatgtattatgctagtagtaagagttgtgagtttttcttttgaccatttttggctaaattccatgtcacactttgtgattactatttaccttttttcttttttcacaacaattttgcattgtttatcaccagctttaactttatataagtagcaatgacatcagactgtaaaagactataagctaaatatatctaataatctgattctgaatcatgcaaatattataattagttaatatgattttagggtaagaagtgggagagaacagccttggtaagtaatttagtatgtttcattgttggctcttaaataattctgatatcattaggtttcataaaaaaatttctacaataaaaatcatgttctataaagtgtatattttgtcgatttgcatagtaaggtatctttgttctgttttgttttgctgaagtgttcagatttcttcattctgtgtttcagtttaaatattatgtaaaatctaacactgacagagtcatttacgtgtgtacataactatataccatttttatttagactaaaaacatataaaaatctcaaaaaactgacttttgttctgtacatgagttaaaaagttaacatcttattctgttttttgctattatttaccgatccgcaaataatgtagtctagcaaacattcaaattttgaatgcactcttttttgtattagagcttgaggtatccctacttatgttattaaaattttttccttttatgccgagacaaatctgatactggacatgttttgtttatgtgaactgtatcttcgtaatttctgatgtcaaacgggatttgttttgtaggtagcagaacttttattaagcgagaagtctttccaagcaaatattcgtgattactcaaagcttatcgatgctcatgctaaagagaaccgtttggaagatgcagagagaatcctcaaaaagatgactgaaaatggtatcatgcctgatattttgactgccactgttttggttcacatgtacagcaaggttggaaatcttgaacgtgcagaagaagcgtacgaaagtttgagggcccaaggtttccaactagactttaatctttacaattccatgatcatggcttatgtcaatgccaagcaacctggaaaagcacataaaatagtgagggatatggaagcgagcaatatcaatcccacagaggagatgtacatggctgtgtttcgatcattttcccataaaggagattgcattggagccttaaatatttccagttccttgctgtgtgctgggtaccaagtaaatgccgagacttgtaaattgcttgtcgaggcatatgggaaagctggcgaatctgttaatgcaaggaactactttgaccacttaagaaaacttggtgaaatgccagacgacgagtgcactggaaacatgatttcagcttatcaagtgaagaaccaattgggtctagccttggaacttttgttgcagcttgagaaggatggtttcgaaccgggagtagctacttacactgttcttgtggattggttaggaaaactaaaactagttgaggaggctgagcaagtggtggccaaaatttctgagctgggtgaagctcctccgcttaaacttcatgtaagcctttgtgatatgtattcaaaggctggaattgagaaaaaggctctacaagctttggggattcttgaggctagaaaggaagaattgggtcagggtgagttcgagaggatcatagatggacttgtggctggcggctttcagcaacaggctcgtaggatggggcagttgatggaggcacaaggtttccccatttccgagccactgaaggtaaagttgatggcgaagcaaacttttcaaagcaccggacaaacttttcaaaggaccagacgaacccgggtatgacataatttggattcgtttaaggctttttagttgctatgtttcgatagttcactcaaacttaatatttaaattatataaatgtgttttgatgtaataaatagagagaatctattattagaaaatggattaagtagtaggaaatttttgatattttatttaaacatttactaaatatttctgaaatttcatcagaacacttctaaatttcaaaactttgttaaacaggttttcattcactgtcttcttgaattgattttgatcatttagaatgtcattttctctaatttgaactttttaatactaatcaacaatttctaaaggcaatcaaggtagctttacaagattatctaagttgaatctaaaactctcatttcagtttctccatctcttttctcaaaagatataggcttataatgcttagcacaaacaacaaataatccgaaattgagtgcagccaaagcagctgataagaagtaaaaccaatccaaatggccatcatttaggttaggaggaacccaaccgggtttcttcccatcactcgaagatgtaatcctcatcacgatacttaaaatagcgctagcaccgtagctccccatggccgaagcagacaacgacaaccctattcccaagctctttaacccgtcgggtgcttgtgaagcaaaaaattccatccgagccacatagacaaacgcgtccgaagctcccactagaaagtactgcggaatttgccacaaaatgctcaaagagctagtctcctgttcgagggaaccaatggcgaatttcctcctttgttgctcgacgaatccagctaccaacatggctagtgaggcaatagcgagccctattcctatcctctctaaggcactcggaagctttggctcacgttttgttactttaacatgcaaagggaatacgagtctctcgtatagtatgatgaagagcgatgtgaagatgaaatcaaatacagtcatgcttgcaggagggatatcgaagctaaagactcttcggttcataaccgcgccttgttcaatgaaaagcgaaagcatttgaacaaaaactacagaggagaagattgtgcaaagccatattggtaataatcttaacacacattttacttcttcaacttgagtgacagtacaaacatgccatggattttgtgtgcttttgccttcggttgttgttgtgattagtttcatatcttctgtcataatgattgcagcccggtcaagaaacctatatgaaagaaaatatcattaaaaatctcaacattttaaaatagaatagcatcaatttaaagcaaagaaaagcaaaagaaattaagagcaaaaatgacatttttaagaacttaatacttacaaatattactatgaaaattgtctttgatgtattaaaataaatgggaattcatacttaggattacaaaaatatatgaaccaactaatagtttttggttaagaaattctaattgaaatgagaaattatatttaaataacgtacgattttgactatttattatattgatatatagtttgaattaactaaaaatcataacatacatacttgaagccattactatgaagaatcctcctcattccatttctttcactctctttcaaatcaacttcataaagctcttgatcaccattcaagggcatcttgagattaaattttctaaaagaggcaacaataacttgagaaaacctagagatgggattcccacaaggcttaaaacgcctatacctcaaattcccacttaagagaaaaccataagcaacaatggaagataaagtacaaatccgaaaagccaacacccattgccccatgtcctcgatgtaaaccaaaatcgtctcggcggctagggcaccgaggtttagagccaagtaaaagtaggtaaagaatgaagctttggattgtctttcctttggatcttcctcatcaaattggtcagctccaaatgcagcaagtgcagcctcagctgccccatttcctaaggcaattaggtatattgatgtgtagaataatgctatttggaatggtttgtgagcctcacatggctcaccaatctttccac

SEQ ID NO: 16047 - DNA, 10838 bp, Cannabis sativa
  modified_base (4819)..(4820): a, c, t, g, unknown or other
  modified_base (4977)..(4989): a, c, t, g, unknown or other
ataacaataaaaaataataaaattataaataatatattaatatatatttaaattaatctaaaataataataataataatatttatatatttaaaaaaatcaaccctactaatcccgttaaatttaacaaaatatttttatatttttaaaatattattgttaaaccaataaaaattgtttattttatatataaaaatatattttgcttaataaaagatattactcgtttaagcgattcaaaaaaatagatatatattactacatgtaggagtagtactatagtgtatgaggtgaattaattatagaaatcaaaagggattaggaatatggtatgaaattaatatgtggatgtggttaccgcaccacacgcaatccattccacaaaaactcatctaaaactataatcttttccctttcctccttctctctttctctttcattatcttccatttcgtccttctcgaaataaaaactcttctacgagaattttccacaggtcagtttctctctaactctaacccaatgtattacttttttattctttttttccttttcttgtttcgccttcgctataattttgtaacggagaaacaattcaaatttgtcttctttctttcttcaaagatttccagtgacttcactctaccttttggttcctgtaaaaggaatcaaaaattgaaagtttaaattcttgtacttttcctttctcactttttatgttcatattggtaaaaattgttcttcctttacttgcaaattaaagctttttatttttggggaatgttattaattttaaaccattaaagtaaagttttctggtttgatgtaacctattgtaaacatttatgtaatgattatatttgtgtaatttcttttggcaggaaaggggaatttgagatgttatggtgcctaaatagtgtgtgtttagtaaatgaacttttgttaaaaaaaaatgaagtcaaatttacttgataacatgccttggcttagaacccaaacaaacaaattgaacaatgatatggttgcatccattgaatccaatactagtgatgcactattagtagaagacacaaagcaaaagacttctcttgatgtaaaattttggaagtggtcttttatctcctttgttccatgggtgactccccatggtaaaaagacaccaactactataaatagagggctgagaaagcgtgccctgcctcgagggggagttgacaatgagcttcggggtgccccggtgcgctttaagccatatgtgtcgaaggtaccatggcatacaggcgtgagagcatttctttctcagctatttccccggtatgggcattattgtggacccaattggtcaagtgggaaggataatggatcgcttgtttgggacaaacgacctattgattggttggatttttgctgctactgccatgatattggttatgatactcatgatcaagctaagttattgaaggctgacttagcatttcttgagtgtcttgagagaaagaatatgactactaaaggagatgttcatgttgctcatctttacaggacaatgtgcattacaggtatgcgtattgttacaaaatcataggataggatgactatggttatgctatgttgcattgtcttttttgtcccaattcataaaatgtactaagaatatgaagctgtatttgacttttttgttgttgttactgtttggctggttcattattaattgcaaataggtgtgaatgagaagccatagctcatgaatttatgcttctgatgtgacgtttattttacatgaattgcaggcttaaggaatttactaattccataccgaactcacctactaaagctacaatcagcacaaccgctaattcagtttggatggctaagcaatgtaggttggaaaagttggagcgtccagaaatcctgatttatagttctggaggcccaaagttagtacttgataaatacccatttcactttagaactttaactagtatattctccttgttattagccttttgttttccaaatatcttgtttctgttagttctgtgtaagagaagaaagtgtcatatatttgtctggcgacttctcaaattagtcatatattgtatataactttgtttatatttagatttcagagcttatcaatggagccttgctatgagtatttatatctaattgtagggtagtcgtaatggttggtgtaaatgtaatcacataaaaatgtacagagactttatatgtgtttaatttattatgtaaacatatattggtatatatgtgtttaatttattatgtaaacatatattggtagaagattattaggaggccagcaaaattagcaaacctatacctttgttttgctgcttttacagtcatctgtaaatgtatatatagttcatcttttcattttcagtggtattctttttagtagctagacaccatatttggatgcacagacggacctcttttcattatgttccttactgctattttgcttggattgtttgatcagcttatggttttgcatttaacaatttgaacataaatttttgttcaccatttccttaactttgcatatcatataaggtgaatatatatatatttatatatatatatatatatacacattgatttcttttgcttgatactataagttaagagtcaacgattacatggtatctgttatgactagcataatcttcttttggctttaaatgattttcagttcttatttgttggaattactgaccttaacatccaagtgaaaaacaagaataccacagcttttggcatgatggcagttaaatgctttttttagttacacagctttcaagtttctccctcgttaaggaagaaacttttacactttcattgcacgtgtacaattttttgccttcttttattttttattttttctcttttggctatggaagaactaagatggatcagaaccagtgcctaataaggatagtgatgaccataaactgataaacctattctagttgagatttgtatattcaatcatagaagttatctttgctaaacagttcaaggtaaaataaatatgctaacatattgacgatctttttacttctttataagattttggcattatacgtgtgttttggctgtagttagtttatatacgagcaataaatttgaaactttctccaactgcaaagattaagaggatatttagctccataattaaaaaattgttttaactttttaaaaatagaaaattgcttttaaaaactaataggggtgtttggccaaatttttttttttttttttttgaaaattgagttacaaaagaatctgaaaacatcaaagtgttattttctatttaaaaaataacttattttttggtctaatatatatgctttttacattttgtctcacttactcgggtctggggccgaggttgtggttcgagtccagggtcgtgggccaggcttcggggttggggccaaatctagattcagggtcgagttctggggacggggtttgggtttgaggccaagtttgggtctaggtttgggtccaggtcaaggtctaaggttcggggccagagcgaggttaatgtccaggatttgggtctaggttcgtggttgaggtctagggtcgggtgtctacggtccaggatttgaggtcaagttggagtctgagatctggatatgagtctgaggtttgatccatactgataagaattagcttatcttcttattaattaattaagttgttattatgttggttgtaatcagattgttacagtctctctcttactagcattaggaccacttctcaagtttctattagtgcttgtaaactttactcatgtataaatagaaattgttcccctcagcttcattattacaatataaaaatagtgtaatgtttggtatcagagctaaaaaaggactgcaccaatgtcgtcccattctcagactcctcaagtcaccaccattgttgcagcaagtgtcgtaagctcatctttcccaaccattgtaccaaactgtacccaacctttaaagacattgaatcaaccctttcctctgaagcttgacaaaaagaattatgtattttacaaaactatggtatctactgtcatacgaattcaacgatgatggattcgttagtggcactcgaccgtgtccagcagagtttgttccaactctagcaacaattgaaggtgaatttagttttggagtgactatcaatccaaaatttgagcattagattgtaagtgaccaactattaatggattggttatacagttcaatgactgagggaataactactgaggtagtaggttgtgaattagttgttgcattgtgaaaagctctcaaaaacatgtatagagcacactcaaagtcgaaaatggataatactcgagtgctgattcaatcaacatgtaagggttcaacatcagtggaggattatttgaagcagaagaaggcctggtcatattcactaacattgacaaatgaaccttatccaaaaaatcaaatcatatgtaatgtaacattcgttctagatattgagtacctaccaattgtattgcaaatcaagtctcatccttctactacttggcaagaactgcaaggaattttactagcttttgataacaagatggagcgcctccagaatctaagcctcaatagaaacaacaagtctactcacttccctgtttcaccaaatgtaaatctagcaaattgctcaaacacacactacaaaaaactgctacttttagtgacaaattttaagtcacaacaaaatgttatttgtgactaaaatgtagtatttagttacaagttgtcactaanntagttttagtcacaacaagtattgtgactaaaagtacattaagtcacaataaattgtaatttttgtgactaatacctttagctacagaccttttagtcacaacatatgaatgatatttataattagtcacaattttttcacttttagtcacaagttnnnnnnnnnnnnnaagtaagattttttgtagtgacaagtggtcatggtcaaagtagcaactatcattctaatcaaagcaactatcattcaaataaaaaaaattcaggtggtggtcgtggcaactattctcatggtggtggaagtaacaatggaagaagttgtggtggccaatttaatggatccaaaccaacttatcagatttgtggtcaatatgtttattcgacagctatttgttataacagatatgatgaatcttacttgggatctgatcccaaagttggtggtcaagccaatcaaaaaccaaatcagcaagcaatagcctatatcgcttcacttgaagttgttgacggtgtagcttggtttgtggatagtggtgcaagcaatcatatgattgtagatgagaacaacatggtggaaaaacatgagtatggtggtaaggaaatttttttataggtgatggtatgaattaaatatttctcatcttggtattagaaagtttcatactaataacatatctaaaccactgttggtaaatggtatattgttagttccgaaaatcacaaagaacttaattagtgtattaagtctgacatttaataatagtgtactttttgaatttcaccctgagtgttgttttgtgaaggaaaaaatcacaaaggaggtgttgctggaaggagtgcttagtgatggtctctatcaattcaactcataactcaacaactctgtcattagccaaaagcaatctcagtattaatctggtgtcttaagtttgtcaaaatcaagtgttgctcaggtagccagctttcaaatttctaagaaggatgtgtggcataggcatctaggcctactagagttcttaagcttgtctgcgttccaacaatgtaaaactttccaataatgaaaaagaaactttctgtgaagcttatcagtttggaaaattacatgcttaccttttaatttgtctacctataaagcttctaaggtacctgaattgattcatactgatttataaggacatgcccatattgcatctaacacaaacttcagattctacatacatttcattgatgactttagtagatgcacttggtgttagcccaagatatgttttcaagatgggagggtgaattggaaatttaaactagttttacaaatattcaaatatgttttaagataattcatgcaaatattcaagtttaatgcaataacaaagataatcacaagtataaacaaataaccaactagagtttagggataaaaattgtaaactctcaatttttattaggttcggtataactaagccacctctgtccttggtcttcaaagttatggatctagctttgagtttaactatcgagccaagttaacgggcttgactaacccttacaatcggggaattttttaccaaggtttttcccaaacctctcacaatagttttcttccaaggactatcaacctcactagattgttcaagtaccaatctcaccaaccgagttttttttctaccggtgtcaacttcacctcaaccaatagttttccaaaggactatcaacctctttggattattgaagtgccaatctaactctcagattgttgtagtgataatctcactcttctcaagttgtttataaaactggtgtcaacctcacctacaaccgagttatttttctattattgtcaacctcacctctcaataaaatgtatatgtaattttgaaatacaaagcaaactctctctaataagatgaaatacaatgtaaaaatcctagagagaattgcaagcacaccagagtagataagaacaagtttgggtccaagtgtgtgaaaagtatttacttggatttaatacttataaagagagaaaaatatttttaatatgttttgtatactcaataaatgcttagccccattttaaaaaatgtgatacaaatgagtttatatatagtttgggagaaaactagtcttttatagctgttgtgcacgaaaatccatgcaaatttaggcttaaacggttcaccttttcttgggaaaaacggttcaccgttttccaaatggtaaaccgtttaggcacagtggcaaaatacaatatttttgactgaaaatgcgcataactcttagctcgtttatccaatttcaaaaattccagttatgttctattagttaaaagattaataatcttaaaatccaatttgaaaaatttatatgtcatttttgaaaagtaacttgtcgcacaagttagtgagccatactcttaacttataaactttaatgtactatgcaaatcactttaacaagactaaagtaaacttatacaatttgattgtgtgtagtcttaatatagatgagcttcctaacttgattttcatgttttgatccaagttgactttcttgagagttgactttgactttgactttgacttcgggttgacttttgactttgagcttatgaagccctcttttggatagggtcttgaattcttgatctcttgatgaagctcttgctcttatgaaatacgtagctgatatacttgttgaatccacttctttgattatgtttgactttaccgagtaaatattgatactttgtgaatttacttgcaaaatgatcaagaaaagattagtaacaaataataatcaaatatttgtttgtcatcaaactaagttagtgattgactttaggtcaatacttggttgtaccccttgaaacaaaaattggatgcacttaatgctttcatatatttcaaagcttttgttgaaaattaatttgaaactaaatcaaaagtattaaatgtgattggggtggagagtattaggtgtttaaaagtttagttagaggaagtggtattcattttcagcactcataccctcacacttcagctcaaaatagaagagctgaaaggaagcacaagcacattgtagaaatggggttgacccttttagctcaagctaggatgcctctctaataaaggattgatgcatttcaaacttcattatatctcataaacagacttgcaacacccattctacatgacaaatctccatttgaaatactgtattgtagaaaaccatattataagcaagtcaaaatatttggtgttgcatgctatccttgcataagaccattccaaaattataaatttcagttttattcattaaggtgtgtgaatttgggttataatgattcctataagagttataaatatctaagcaccacatgcagaatgtatatctctcaaaatattgtatttaatgaaaaagaattcccatttcaaattcgttttttaaacactcatgcacctaaaaaaatagattttcatccaaaatgagtcctggtcacaactaccaaatgtccactttagaaaattcagtacaatgtcacaaaacactgctaatcttatgccatctcaagcacctcctaactcatcaccagcgacaacatcttcataatattaggtaagtgatcaaaatccctcatcctcaaactttgacactcttgatcctgaagtaacatctaatgttcaatacattgctaagcaacaaataccataagaacctccaagtgagaacatggcagatcatgatagcaataataattgtaaatacaacagaacatgcaactactactcatgcctcaagtatagctccatttcatcccatgatcaccagggaaaggattggtattttaaaaccaaaaacttatttcagtaatgcaagatggaaaccagtgtgtgaagaaccaagcaaggttacagattctctgaaacacaatggatggaatcaagttatgggtgaagaaattacagctctcaaagacaacaaaaacctacacccatggttccaaaagttgatgactacaatctaattggttgtaaatgggtgtccagagtaaaaagaaatgcagatggttcctttcaaaggtacaaggcttgattagtagcaaaagattttcatcaaaaagtctgtctagattatggtgaaaccttcagtccagttgttaaagctttgactatgagaattgttttgagtattgcaatttctagaaattgagaaataaaaaatttgacataaataacgctttcctaaatggtcatatagaggaggatttttacatgtgtcaacctgaagggtttaagaatctaacaaaaccagatcatgtgtgtaaactgcacaagtttacttgaatgatattattgttacatgaaacaacaatctcagtctaaacaagtttattgaacaagttaacatgcatttcactctcaaagatcttggagagcttcacttcttccttgggattgaagttttacaatatgaaaaaggcttgtatttcaccccaaacaaattatattgaagacttgctaaagagaaataatatgttgcatctaaaatcttgtccaactcctacaactgttggtaaatctctgccaatctctgatggaaaagagatggagaatcccacagtctacataaattttattggagctctgcaatatatatgccacacacaacgtgacatcaattatgttgttaaatgtctcagtcagcttctaaaagctccaacaatactcattggaatgcagccaaaaagatcttaaggtacttaaaggaagatagtactcaagttcttcacatatgttgtagtgacaaaatgtacatcattagcttctcagatacagattgggatgttgatgatatgagatctattggaggttatgtgtgtatttcggtgatactcttgtgtctttgtcatcaaagaaacaagttttcgtttctagatcaaacacaaagtctgaatacagagctcttgctcatgttagtattgaaataacatggattgaatccttacttaaagaaatcaaattcccttagactgctcaaccaatcacttagtgtgataatatgagtgctagtgctcttgcttcaaactttatctatcatgctcgtactaggcatatcgagctagacatttactttgtccaagacaaagttctaagcaagacattgaaggttagatacattccctcaacatatcagattgcaaattgtgacaaagggtttactcactccaaatttcagtacctgatttctaaactcagtgtgaagatctaaccctctcgtttgaggggtagtgttaagaattagtttatgttcttattaattgattaagttgttattatgttggttgtaatcaagttgttacattattttcaatattttacctttttgttgttaatggtctctcttttaccagcattagggtcacttgtcaagtttctattaatgcttctaaattttactcgatgtataaatacaaattgtttcccttattagccttcattgagctaagaattacaatatcaaaatagtgaaatttaacttgtgctgggtttgggttcgtgtcgaaatgtgggttattagagtttttttttcttagtaaaagaaatataaaaaaaaaattagaaaacatcaaccaaacgcgtattgtattttgaaaactataaaaattattttttgttctcacaccagctaaatatttagatccatggacacccacatctagattgattgtccaacactatatgtgtgcatccttaatgatgtgtatttcaccactaatgttatgcaaattcagatgttatcacttattatagcataaagacctactatatcatatggatcattatgaaatcaaaagtgtcataatcatactacaaaaatgttattacaccatagtaagtaagtagacagaaattcctaaggtttgagggccagtttggcacagctgtgctgtgagaaaaagcagctgcagctgtgctgtgagaaaaagcagttgtagcaaaattgtggaaaaaaactgagttgagtg

SEQ ID NO: 16048 - DNA, 9035 bp, Cannabis sativa
taccaaacgacacctaaatttttgcatttaacaaaaagactaaaattactaattaacgaaaatacgtcaagtagtttagaggccatgcaaatgatttagatatggagaagcttaaacctttacagaaaattaagtgaattaaagtagaaaacaaaacatgaaattgtggctttaagctgacggattcaccactttgaaattgaaagagatgccattgcctaaaaaactagttcagccatgataaacatgatgtattagctcatattgaatacaaataaacattataaaatatatgcatcctgacctagggttttagttttcgggtccgtcttattgcaaatggatcaaagtttgtgcttaagcatgaattagacatgtcacgaacatatttgatgcatcagaatcagattcgtagcacttttagttttgagcactcgtagcactaggtgttctaggcacctagcgcccaggttgacatactatcaacctgaggcctttccaaccaccatacttgaagagctatcctgagcattttcttcgtcctcaaccaaaatgaggaaataagtgcttttgatggagaaacatagtcacatagaggccaaaatggggacccaatgcccaggtttacacctggtgctcgacccagcgcccaggttaacattttgtcaacctgggccatttccaatgagtttttttagaagacttccagccatattctccgttttcgtcaaggattaagatattagggaatcaaatggagtcatctggtggccaaaaattggaactagcgcccaagttgacacctggcactcgagtcagcacccaagttgacattttattaacctgggctattttcagacattttttcgaaaaagtgttccaagcattttttccgtcattaggaataacgaatacacaagtaaactcaaggagaaaacaagaatcccgaggggccaaaaactgagcccatcgccaaggttgacatggtgttaggcccaacgcccaagttgaaaatcaacctagtgcattggtttctgtcactcagatacaaattccgctccaaaaattctctccgacatggtctaaaatagggtaggagactttgtccttgattttaaagaccttggaatcattaaaatgacatcccgaaagctcttaaaagagcacccaacgcccagattaacgtatgacctggtgccgctggattctgcttatttgattctgattccgtctcgagcatttgtctagttttttacagcaaacgagagatatgaactcagacaagtcaaattcaaaatttcataatttcactttttttgacaaagtgacttagttgcaaaccgagcagttttgagtttcctaattccgttaaataacaacatctctgagaattagtgatgacttcaccaaaataaaaaaaattgactaaacgatatcaaaatatcacttaggcatcaaaaaatacatctccagcacgttttcccattcacttagtgttcaggttggcatcaaatgtcaacatgggcgttggatgtcaacctggggctggtataagagtagccttcagtaaaatgaccataactcagttaataatgatctaattgacgcgattcaacttgtgttttgaaactattttaatgctctatcaagtcatgtctcacatctcaaatgtaattttgaagatatctagtccaaattttatcctaaaaaagttacgaatttcaactacaacttactcgaaaaaggtctcacgggcgcgattcaagcttcgataattgacaaccaacctcgaagtcaatttcaccattagatcatcatcaacggtcaaaaactgttgaatgtattcacattttcttaaatatatttttattattttaatgaaacttccttgcctataaaatgagagctcacctcatttttcacattcagattttagaatatctctctctagaaattagagctttctcacttagtcaattctcttgtaatttttgtgagaaataaattctcgaagtagacgttgttctattactatcgcgatatgggaagtgaactaattttgtatactctactcatcttttattttatctcgtcaatctagtgtgcgagtattgatcactttttagcgtcaacaagtaaagaggataataactttcattttgtgttttgttttattaaaataaaattagaaagatgaagaggaagaggaagttaattaataaaattgtagtatgtgatatatttattttctttctcttaaatcatttcaaaggtggatcttttttaggatttaaagggagaagtcttctctttttttttttttcctctacctaacaattgattccacctcccccttttattctatacctccacccctcttaattcatccatctctcctctctaccgaacatagtgtaagatacccaaaaaaaaaaaaaaactcaaatattaaaatggcgtttggcttcataatttaaaaattattttctgttttttaaaattgaaaacagttttttaaaaactaattgaggttgttaaacaaaaattttttaaaatagttttttaaaaattgagttttaaaaaattagaaaacagattacatcacaatgttgttttcaattttcaataatattttttttgtctaacatattatgttttatattttttctcacatactcggatcctagacctggaaccatattcgggttcatttcatggtatgatgttaaaatattaatttttttagtcaaaaaaatctaaaaatagtgttaaaaaatttgtgtcaaacaacattgaatttttaaaatgacaaaaaactattttctattttaattttttgaaaaaacaattttaaaaactgaaaaataaaaacatagccaaaatctaaggctttgattaggcaatttagctttctagtccaacagttttattccttgataagttaatatttgtagcttaaaattatttatgaaaaaaaacctatagtgacaaataaaagtttagttgtctcctttttaagagaagcaaagtttattgagaaaagattagctacaaatataatctatacagtttttatagaaattaaacatgcagcaaaatctcccatatcattagtgacacaaacataattagtttcataatgaactttgtttcgtattttaatttataaatatggatgaactgttcctacctacttaaaagatcacttaagccacttcaagaagtagagcgactgttaaaagactaaagacacaaaaccttcgaaccaagaaagaagagagtacacacagcaagtatatcgagtcccaaatataaacaattctatgtttatcttctatgccaaatataccaagtaatatttattgataaaccaacaccgtacatggatgacacagccaactaaatataagagtcaagaataccaaaacgaaacaaaggttcacttctgcacaaatatgattacaaaggctaccctcgaagcagcttgccaccagtaataaatggatgtagatattacataatcaatcagtatttcactaatcacgaagggacgcccgtggaacagcaggtaaacccagttcatcatccgcctgtcacaatgtcagatttaaagaaaaattattaaacactaaaaaaaaaggcacacacacacaaactcatctactgctatagcatagccaacgtacatgtgcatttgaccgtcctgcatatcccatcggtgctgaaggcaagttgagctctgcatccaaatcggattccttatcaggttgaagataggaaggcacaccatcggactcagtttccattcccatatcagcttctaaagcatcaagctctgcaacgtgaaatagttatggtatgagagtatttatggaagttgagttctaaagatgaagtgaaataacaagatatgtgagtcatatgaaagtggatgctttagttacaccaaatataatttattcagataagttggtaaataatcagcacagggagatgaagaagtatgttttattctattctattaaaaaaatgatattatcaatcgtcaaggcagtctatcaattgttgaggcaatctagagtacgcttcaatacagccacagcataatccctacatatctgttttccaggaaaatcaatagcagctttctaaggattttacttccaagcaacaaatacaaccagcaagaaattgttagtcagtacaatgagattcctctacatagctttttatttataatgatcttaccacccaaaagctcatcctcatcaatatcgtcaggaacactgtagcttctacccagggtatcttgaatttccgaactgacgtccatcaggtccatcatctcgtcttgcaaattctatgcaagtaaaatatatagagttcagagcaggaaaaaaactaaaagaaggaaattcttgatgagaagttacttacatctatgtcttgtatcttcacagttttcatcatccctttcagctccttgttagcagattttagggctgacatctgcaaagattataagaaagcattgtaacaaggtcaaacatctataaagctcttgatatacctctattaagatttaacacattgaaacctaaatgcattccaatttggtataaggcaacctaagacttagattatttggatacttatggctgaatccctcctaatttcatcccctacttctcatgaggtaggcagccgattccaatcaggttactgaaaaagctccgtctggacagccttggactgtgaccctcgagatgctacgaagaaaaaaaaatatatttcaaggtaaaaaccaaaaccccagcacagccaaatttaatagcaatgaatgatacccccaccattgtagatctacgctcataacttaattttcaacagcctctccatgtagacccatgttatggaaatcccagaagatcatgtttcattgactttaacagtaacgagaatgcttactactagatacttcagcagcaaagttaaaatggaatgcatactagactcaaacattaagtacattggaccacccagtttcaataagttataaacccaaggtaacatgttcatttaataggaatgtttgaagaaaaagttctgcactttcaagacaataaaaacaaatgtaactgggtacgagaactttcctagccaaaacaaattacaagaaagcttgaatcacaaaaaataaatatacaaagataaagagagggaagggaggaggagtatctgatacaaattgaaactgaactagtcagccaacatattgtcgtaaacataattaatcacaacaggaattagcttgacattctaaataggtcaacatccctaaaaaaggatataataacaaacatttcaatacaaagtagaagcttacagtttgctgagcatctttaatgccctcagcagcaaatgcaacttgatcaaggttaaacgtttgattgtacatcatatcacgttggccttcatacctgcccagatgtttagtgagtcgagaaatcatgaacgagaaagcaaaacacagtaaagtcttaaatcctccccttgcataaaaagctctcaacttgcaaaacaaataataaaagagatagtaaaatggagaagagacacctacattcgtttttgcttgaggactctcatggctctagctttaacagcttcttgtgcaggaccaggtcttgttttcttaatctgctctttatatttactaagttctacatcaagctttttgatcttctcttcaactgtctcaccccttttattaatctgaaagaaatagaatgcatttagtctcttggagctagctcaaccaactagtcctatttatacttcaacgaacgaattacaacaaaacattattatattatctattaaagagttgattgaaaaatgaaaattgaaataacacgctctcacacacaccaaaaaaaaaagcatcaataatcttcttttgaagaatatacacagatcacatagatcatcaagtatatcaaaagattaccatgaactagcccgccccaaatggaaacacccagtaaaaattgaatatgacgcagaaaatgttaaccgcaattaaattattcagcaaatagataatcaaaataactgtctctgaagaaacatcaggtaatcaggcccgtcatttgttccagtacacaatgtaatagagtttctagtttaaaaacttatcagatggaaactgcttgcactaaaaatgtaccttgtaaatatggaattatatccacaattactaaattacggaaactagtaatacaaatccacacataattaaggaatcaagcacccgggagcctacatctataatccaccattttttcttctttctaatgttccttttcattggtaacaaacaaggtttcatctaccgtcaacaagttccactataactccatcaaccccccaataaagttcaaaaagtaaaacctaacaattcaattgaatcacctttcaaatggaaaaaaagaattagaaactcatgaggaaaaaaaatcaagagagagagagagagaagtaaaccctatcggaggcatcttgaatggaaggagggggctccttgtccttctttacaccgaagaccctcttcatcgtagtattgatattctacttgttcttccttaaaacagtaatggattgaagatattggattcaatctctgtagtatgaaatggaatgaaatcagggagaccggattttagattttgatgggcgtatttcttgggtacgaaggatagatttatttctctgaataaaatctaaacaaagtcgtatagaatattccacttatttacaatgtaagttctcttatatgagccactaatttgaattgggtcttttttttttttttttttttttctttttgttaaaagtagatttttatcttgtttgttaaggtttttcattcttaaattttaagtcgtcagaggttgtattttttctttaaccaggcactctccttctgcttaagcgtggattggtcggggtttgtggtcaggtttttattattgcgattaattttatctttgtaacatggttttcagtgtcttttgtttaggttactgcaattaatcctgtctttgacataattttattttgttgttggttcgtcttctttgttctttgatagctcgtcttcacatcactgttagtggttggtgttgtctgcattttcaaacgagagacatgtggcatgaaaagagaagtacgactttaagtagccactagccaagtcctcttagttgaactatatcacaaagaagctttgtggatccaggaacagatcaagaccgtagaatacacagagacttatcttgccttacgatgccattcgggatgcagaaggcctactatccctccgagattcggatatgaccaggcttaaagtatgtccaagcgacacttgaaagattactcgaagggcttatcacggacactaactgcccaaaagaagttggatgtctaccatgaagcgacgattatacctattctgacacacgtgtctcctatgttagaccatggtagtgcgtacatcccacacgcctttttgccttacgattagtccaggcatttactttgtaaggtgaaaccttttggggacatgtgtccagtgcacacaatagtcccaactatacagctacctcttttcacgggcaaaaaccttctttacggcccaataatcagctccttacatgtattttaccccactagtgggattattgcaagaaccctaggccggtcatgggcatgaccatacccgccctttagtctataaatacccttctatttccatacgaagggggattagaaaaagagatagttgaagctctgccaaatttactctaaccttttttcttcttcaagagaaatcaagggggcagagttagggtttcttgcaaacactattgtagaaacattatacaagcctcttaaggccaataaactgactcatagactaaggcttattaacgtttaaattacgtaaaaacccttcttctttattactgtattttattattacttaagctcttattttattagtttttaaaaaatttggtaaacagttgggaataacaagttctttgtggttgaaagggttgttaatggtgcagttacgtaccttacacaataattgagtgctcaaattaatgggttgaatgaacttgctgcaacaaattatattgttgtgtcttctgaatagtggaggaaattgaatatatgtatttttaaggttaactatgatgctacaattttttttatctgattttattttagtttcttttgtcaaatgatttaggaatcagacgatcgattggttggctcaattttttattctaatcactattattttagttgatggctattaataaaattatatagattataaaaaaagaaagagtttttttatttaataaatattttaatatcgctaagtctcttcatttattaatactcagtttatatatataaataataaaaaaaaaactccatttaatatttatgtttttttttttataattctgttctttttaaggtaaatgtaattttgtatttgtatgttttgcaaaaattattagttagactatttgttttattaaaaagaaaaagttgaccctgtattttttaaaatgatacaaaatagtacattaaactgattttttattaaaataaaattaataataactcaatttaaagttgttataacaaaatttggtacattttcaatatctattcgtgctaaaaattatcctcaaattggttatattaaatgttgtcatgtattggatgatttgagttaataaaattgcttctttactttcaaaagaaaaaatataaatcgaaaattgagctcatactactattttgtatcatttaaaaaaataaagaatccaatttattattttacaaagcagatgatccaacggataatttttgtaaaatacaggttttaaaatattataaacccttcatttattgagagctcctaaaatcttatttttttttaattaaat

SEQ ID NO: 16049 - DNA, 3307 bp, Cannabis sativa
  modified_base (26)..(30): a, c, t, g, unknown or other
ctactcggcataaaacttaggtattnnnnncgcaaattactctaaataaaataaaaaaaaaactgtgaatcttgaaaaagtactatggaatcaaatctctaaaatcacaattcatctcacttagttttcttaaaccactcaccagggtaaatataagaaccaacagtatcagtggaacactaatttccacacagctaccagcttgcggaaagccataactaaaaaatgctaaacctactgcagcaacagttggtgcaaccactatagggtttatcaatctgcaagaaatcatatggaagaaaaaccaatatattagcaaccatgcctatatatgcaaaaaaacctttgagagcaatcagattcaaaaaccaattaattcttaattactattctatttcaattatataaaattctaataggtaatactttcacttacctcaatacaagagacattaaaccagtaaatcccaggaggctttgaaatattgatccaataattatagccccttggagttctctcatgatatgtcgaaatttctgcagtcaaattaccactgataaatgttgagcaatggtaaaacttcaacaaattctaaaaagtgattcatggagcagaacacaagtaattctgatagattaatgtgaaaaaaagagtcacgggatacaatatttttctttttttaattcgaaattggactaaggaacaggaaactatagcatttgctatggaggtacttgggaggaactcgaacctcaaatcttgagggagcaaaccacaataaaattttagaaattcctgcatatttcaacattcctcagaccttatgcaggaaattatacatgaaatacaatatgaataggaatgactctaagatgtaatttgaccaaaaaaatatctcgtgcgtggagtatgcgttacaaccctgcagaaaaggttatcaaattcctagaattttgacaggcctacagaaatagtaggcaactaatagatcttttatattgtctgaattaacattgataattgaaataaacttacatggtctgtaagatttctatattcctgagcatttataataaccaatgctggtgccaaatatacaaatgagcttccctgaactagtgggagtcttgtgccaaagtatgagtgcagtattgttgtaactccagaaaccagaatcatcgttgaaatcactgtggccgtatctttctgtcatcattatgaactgagacaagttaaaatttcaacaacaacaaaagacttgaacttccttcttacattgcatcagacaccaaatactacagacaagatacttacatccgtgccacccatagctggaacaataatcaaaggaatgaatataagagagccagccaatgataaatagtgctgcaggccgtaacaaattagaggtactgcaattaaaaacaagcattcaagatgatgtaagaatgaggcactgatttgttatagtttacttgaacaaaattttagagtgccattccatgttttcaatatataaaattcatggaacttttaaccaacataaaatgtttgttttctcaactgtcttcaaattagtatttacaaagaaaatttgaaaagaacataaataatgccaaagactcattttcacaaaagggtctcgaaatggaaaaatatggtaagcttaatatactaagcaaataaggcataccaagacacaagtcatgcaaacaaaaaagtgaaaataacatgctaaagtttacaaggttgagtgttacttttgcttgtgagtctttaaatttcgtaaatacaactaagattactaaatgctaactaaacttcgttacacctaagtgggatatggatcaaatttaattgatcgagtttcagtatgtaagatcattacattttgctaacttgttacctcttaccagttccatttagtagcttacacgtgttctttttccccactaaatagaaacccctgacatttttccctcattttacttggcttcgaaaaaatcatattagttcctaattctttcaaagctgactaattttcgacgtataatcttatgaaaaaaaataattaatttagacataggtatagtggtctaaccaaaccccggattgtctctaaggccacacttgattcctgttggcctgccccatcctccatgatcaaactcttcaccatctggaattgaattcatttctacatccacttcagctttgccttcatctctctttggctcctctgcttgattaactgctgcaactccaactccattcctattcccatctccatttccattgccaactctattgacattcctatctgcaatatcattccctttccaattgccattgccattgtcacttccattcaaatcaactctccttccattatctctaccagcgggttcatccctaatccttctcctctgattctcatctctcaacccccaaaccccatcattctcattcctccttactccattcccattcccagaagctggctcaatctcagcccctacattaggcctagtacggcccaaaatggggtcgatctcgattttgggagacgactcatctgctctatgaccatgacccttctccaaatcaaacccacccgagctttcattcctctcagtggcactggtctcggttgagtaattagagacaaacccagttcgcttcgcccaagatctcagctctctaggattatagtggtctgctcttggcacaaaagggtcgacgtcaggaagcctggagtcctgtttagagccacggctacccttcttccctttccctctctcggccttatcttcagaatccaaggatgaccttttatccattcgaataagctcttaaaaactataacacagactgaacaaaaagggaaagattttcactttccttctagtgggggaaaaacacgaagaaaaaggtctacttcattaaagaaaaaacataagaccattcgaaaaatggaggagggattagaagcaaagcaagaaatagtgaacgtagtttagtaaaggtgtgaagagggccggagcctcaaaatggtgactgctactgctactgctacaagatggtgagagagagagagagactgaactatgaagagtgtgttttctatagcaaaataattaccattttctgctcgtcagtcgccatccacttgcaattactgaaatttcactcttaatcggccgttgagtttcaaatgagagagtttagagggacatttcggtaattgcaatcgacttgcaactgctcctaataccggcagttttatttgcatccgacaaaacaaaa

SEQ ID NO: 16050 - DNA, 6590 bp, Cannabis sativa
aatcatccatgctttgttaaggtgagcatgaacaccttatgatgtgttctaaaaatccagtagtgttggttgtggtgatttcatataacctagtcatttgcatattctgatcgaccctccatgctttgttaaggtgagcatgaacaccttatgatgtgttctaaaaatccagtagtgttggtgactattacaaccatcaaaaccaaaacgatttttatatccaaaaccagcggggtttaaggatatatcttcccctagccagtagggccagcatgcaaaaccggtcaatctagtcatttcgcatattctaatcgatcctccatgctttgttaaggtgagcatgaacaccttatgttgtgttctaaaactccagtagtgatggtgactattacaaccatcaaaaccagaacgatttttatatccaaaaccagtggggtttaagattatcttccccaagccagtagagccaacatgcagagatccttccatgtccatttggacgatgaaagctagggacatgcatgactttccctctcaaaagaaagagagaagagagcatattacaggagagaaattatgggattacaaatcaagaaaactagctacaacttctataagagttgggagaaaataaattgccaaaaggagtaaaaagattattttgagaaagaagataatttggctagaggaataaatattattcagtaaaaataaagttagaagaaaaagattattttagaaaaattaaagttaaggaaaaaataaattatttggaaaaatagagtttgaagaaaatgattttacaataagaataaaatgattattgtgagaaaatacagaatttggtttaaaaaatgaaatgttatttggaaaaatttacttaatgaataaaaaggttattttgagaaaataaagtatttggctaaagtattgagaaatttatttggaaaaaatagagttaagagaaaatatttttactaaagaaataaaaaaaattaaaaaataaaataaaattgttggcttcatttcgaaaaacaaagttaagagaaaatgattttactaaagaattaaaaagattattttaaagagtagatgtatagctaattaaatgtcttaaactacctctcacacaaaacaactctgagtttcaaggtttaaagctagaaacttgagtttttttcactcaattcctgtcattacccgctgttgggattgataatctcctttgtttagaattgatccacattcagtctcgattcttgagatgaaatccctagcactcaacaactaatggaatagctttaagtttgcatccccttctctggccatttgctaacttcacccaagtgcttctttcttcttcaatctcaatttgctgccattctattttgagccttcttctagtgattgtttttttagttgtttactccctacttctttctaattccattcttttatttttcctttcactttgtagtttctccatgaatctaaatcccaaccaccctcgaacttacacattgttccaccataatggaaactcattcttaaaattcttgagtttctaccacatgttttcaaaccgaatgggagagggtccccacgatggcggattcaaatcgagaacaatagagcataatttgacacaattctcaatgaacatcttatataataagaaagcaactcattccacttgttggtgactagaaatctatccaacatacgttagatggggttttatctaaaatttgaccatgtgaatcaaccattattcgacttgggatcaattaacctcaattttgtaactagctcatcaaagagcttcatgctcttagtgttaatacaactatttagtttctcttgaacttttctagccaactcatcaaacttagtccagccaacttgctctttctttatatttacttggaacatatactcccttaaaccaccatggtatctttccttctgcattaaaactgaaatagagaattcacctactaacgagtctattaccttgattgttcttgtatcccaaactaccaaagttcctctaaatctccctaatgatggtaatagaatccaagctttgaacttcaatctccaaatgcttcttacaaacctcctatcttacaccatcccttttaacttcttagagaacaattattaaatcagggttccaccaaactaccaaagttcctccaaatctccctaatgatggtaatagaatccaagctttgaacttcaacctccagatgcttcttacaaacctcctatctacaccatcccttttaacttctaggagaacaattaaataaaggttcctccaatctacaaaagttcctccatatctccctaatgatggtaatagaatccaagctttgaatgcaaatgattcttacgaacttcctatctacaccatccctattaacttctaggagaacaataatcaaggttcctccaaatctccctaatggttgtttaatagatctcttatccactccttactgccccgtcacattccaggatagaaccttcacataatatccttcgactccctctttgactccaaggctatatcataattgacattgaatgcaaaattattcagctctattcctctaagctcttttcatgattatcgtcatcccctccatagcttgtgtcaagaataccaactccgacttattctcttatttctttattggtacctattgtctttttttgtttgcttgttcttttgtttcccattcacattcattcaataggttccttacatatggcactagctcttcaattccctccttgaatttaatgaaataataatcctcctcagagctacaactattttaacttgtgtcatcaaagtcttattcttgactttcttcaaatttactcggtttaatctgacattttctcttcctgattccccaccttcctctaattctaattctttgcctccatctctgagtataggctgtttatttacatagtttgattgtctccccttctcaatttagtaattaattgccctttgtagccatcttcttcaacagccagagtcacttttgatgaacccccagtcatcataggtgtttgccttaccttcttcctttccctggttcgttcaaaacaaccaattgtgcctttgttacaatccccttcctcaacatctcttcccctcagtcttctccatctgcttccatcttcgtattgcagtgtcttgataccaaataatccatgaaatttctagctccaatcatttagtttgaaaagcttaatacaatctttaattttcatatggcaataacaaatattcaggtacaaagccctgatcatctccctacaatctaattcttaaatgatgcaaaaaattcatctcaatagtcttcttgtcaacatctgataatctactacacatagctccaattttcctaagagttttcatattccataataagttcaagagaagtccttcaacaccaatttaaaagtgttgaattgaaacttgatccaccaccttcataagttgtgattggttgtccatgggcttatctttaggcccaacacctacgtcacttaagcccataatttccttgagtggagtattattctcacttctaattattagagggcatgtcaaacttggatctaaaatgaatctttacgctccaatctgccccattaagtttcgaaccaacacttctatagagggacacttatttaacttatctcttcttttattggagcatgtgttcagttgcggatgtttcaaaagcagccctccatataatcgtttaaaaattccttgtaggttgatcatattctccacttgtgttggatactcaatgacttgaaggctcataattgtgaagacaatcaatctcgatacctgcacacccttatttagtaattaattgcccttcatagccttcttctccgacagccagagtcactttcgatgaaccccccagtcatcataggtgtttacctatctcttttcccttagttcgttcgaaacaaccgcttgtgcctctgttacatccatgtcctcagcatcgcttctaccattttctcttcttcgtcaaattctttccatcttcctattgcagtgtattgaagaatcatatggcagcgataaatacaaagccttgttcatctccctccaatttatttcttaaatgatcaaaaaaattcatctagccagtcttgttcaacgtattatagtccaccacaaatagttccaattttccttaagagttttcatattctataaattcaagagacaatcgtatttgcccctggaactttcatttgatttatcttcaatacgatttcattttcctcctcactgatacaccatattagtgttctgtcatcaaacatctggctgacatctaatttctttcccaattctcttgtcaatttataaaaaaaatagcactccaaggcattttcctattgtccctcatcaaaatcgctgacattctccaatcttctttcaaggtataaattctttggtctaaatgttgaattgacttaattgcaagtttctcccctccgattcttccccctgattaatttaattgcaatcctttatttttttccctttgtggtttcaatgattttttcaccatgtttgcccaagtttgtgcatcctcttttctttttcaacctggtcttctcgttgtactactttttttacatgtcttttcccatgtttttaacccactaatccaaacaaatagttaacaaaactcttccttttgaatctctttcttcaggtataataaccattgtcattttgattttgtcagcgacctttacaaagtacgaacattccatttctattttggaaactctccctgatcatctccctccaatttaattcttaactccattgtcatttgatttttcatatggcagcaataaatattcaggtacaaagccatgttcacctccctccaatttaattcttagatgatccaatttcctttttcagccttgtactactttttctacttgtcttttctcaagtttttaccccactaatccaaacaaatagttaacaaattccatccttttgaatctctttcttcaggtatgataaccatagtcattttgattttgtcagcactaagacctttacgaagtacgaacactccctttctttctattttggaaactccatgttcatcatctccttccaatttccattgtcatttgatttttcatatggcagcaataaatattcaggtaaaaaggccatgtccaccacacatagctccaacttttcttaaagagttttcatattccataaatttaagagaagtccttcaaaaccaatccaggaggcattttcatcaagatcactgccattctccaatctattgagttggtttctgtttgcttcattcttctttggttcaaatgctgaattagtttcaggtaagcactcccatctagccagtctccttcaacatttcaatctccttaaacatcttattgtccaccacacatagctccaattttccttaagagttttcatattccataaatttaagggatgtccttcaacatcaatccaggaggcattttgctaatatccctcataaagatcgctgccattcttaatcttttgagttagcttttgcttgaatatattcatagaaattcgtttgcttcattcttctttcgtccaaatgctgaattagattcaggtaagcactcacatcttccaagtttgttgcaccctctttccttttccagcctgctcttctcgccgtactactttttctactagtcttttcccgtacaaacagttaacaaaatcttccatccctttgagtgtacctcataaagatcgctgccattctgcaattttttgagttggttccatccctttgagtgtacctcataaagatcgctgccattctccaatcttttgagttggtttctgcttacatatattcatagaaattcgtttgcttcattattctttggtccaaatgttaaattagtttcaggtaaccactcatatcgtccaagtttgttgcaccctctatccttttccagcctgatcttctcgccgtactactttttctactagtcttttcccatacaaatagttaacaaaatcttccatcccatggagtctctttcttcagtcgtaccactttctactttagctcttcccaagctactccatatcgatcctccattccttgttaaggtgagcatgacaccttatggtgatatcttgtagtcgacctagtcctttcgcatattatgatcaatcctacagctttatactgtgttctacaactatcaacaccaaatgatatttatatccaaaaccagtggggttaaggatagattacttccactggccagcataaagatcgttgccattctcctctaatcttttgagttggtttttgcttgcatattcatagaaattcatttgtttcattcttctttggtccaaatattgaattagtttcaagtaagcactcacatcttccaagtttgttgcaccctctttccttttccaacctgatcttctcattgtactactttttctactagtcttt

SEQ ID NO: 16051 - DNA, 8366 bp, Cannabis sativa
ataatactaacaagtatcctttggaaaagaaattgacaattcatatattcaccatttatgcagacaaccacaaacgtagagagcaaaacattggtatatatttgaaaaattgtacagtagatgggaaaaaaggtgtaaaagggaaggtattatacagactgtctcccttgctagaacttctggatcttctagaccccttggttgtttacatccttcagcttcacaacaattaaccacttggacacacaaatgcttcaatccttctaagcactgcaccatgatcttttccagatgtcagcacactccatacctgaccaaaaagaagaaaaaaacataacttccatcgcataaaattaaagaaaatggaaagaataaaagtattaaaacatctgataaaatccatcaccctatgtctaattgaaaccctttctataccttataatatacatagcactaatgaaggtaacaaataaccttccaccactgaatttacagagtttactttgtggctaatttgttgtcaacaataaagaccatgcaaacgacacattcaacgctgcacactattagactgcttagcaaaacaacaaacttctaagtgctaagaatttgtactatatcctactcttgcatgtgacagagacagaggagtcaaaccagcttccttgttgctacataaacttaaaaatgaaaaggcaaaggaaaagaaaccttacaaatttgttaaaacgattcaagtagtcattagcaatccaacattctccctttcctcatatatcacagcaacaaacatgcaaaatggcaataccacaaagagccacttgatgactgagataaaactacacacaatgtcctatcatgtaaccaacaaaaactgtgtgcttccttctgtagcctggtcgatcaaaaaagaaataaataaatattcagaaatcagaaatcttattttatatgcattacacacacccaaaaataaaacattacgttttcagtcttctaagaaccaagaacgccagaaaacttctaatccccagaagaaaaaattaactcaaaataccaacataaatttacaaatgcaatgtgatataactgtcccaagaaagtcacgcaaattttaatatatagtgctcaaattgatataattttcacaagactggatagagatctgaaaatctaatatcttcaacaccaacttaatacaagcagcggatcaatgagattgtggaaactaatatgcaagagagtctcgcataccaaagagactgtacaacgatacactccacagtttctatatcgaatatacaaaatgctaaaaatagatcacaataaattgaattacagaaatttggtaatcccagtgaaacgtgaaatcatacaattataatgaaattgttcaagcatacataagagagccagccccaaacagttgcacacaaaaattagaagagagaacctggcgcaatatccataaattggaagtttaactcgtcaaccaatacattttaagcaaatctccatcatacaaaaatgaaggattaaaaaatgaacttaccaatcaatatctaaatatacaaaaatacattaccataaaattgattcaacaacaaaagtagaaaacgcgtaaaatttcttttaaccaccaaaccaagatgaacatttaagcaataaactaacaaactttacatgaaagatgtggatcccataacccaattctccatagccaaaagtcaccattcaaatcccaaaaattgaaaaacaaaacaagagatcctaattcaagcaataactgccatacctgtaatgataataataataataatgatgatgataatataaaaatcgtacctttcagagaaaccataaactgggagagaaaatcatcaaggctggtaatgataacaagcacgatgaaaaagaagactcgagattccccgacatattccgctgatatttttatctcaaactaataaaaataatcaaatataatggacgaagattcttgactctctctcccttccttttaagcaggtgaatgattgagattgattatattattattttaattattatcttttcattttattttttaatgaagctagctaggtaaaataattttatattaattttagcatatcaaaacgaagataaaaattaaaaataaaattttaagagagatatgatatgacggctggaatgaaattatttaatataaattttctactttaggccgattcccatttttgggaagaaaaaaataacacgtggctcgttagttcagttgtgttttcagcaaaaaaaaaatatggggccattcctgtttttcttaaatgttagaaaagttagttaatgtttagcttaactcttctgccatggagttgaaaatttggaataatcaatggatttaggagtaagggacacacactctctctttagtattgcttattatgataaccaaactatttgagatgaatagaataataatagccctttacaaacgaaaactgttgaggtgctaaaagtaataaagggacctgaaacttaataaccttgtttacaaatactagagcattttcttcctaatgtaaatgacacaaaattacaacaatggcttccaattgattaaactgcgaaaacaaatgaggggggtctttcagatttataatttaatgtatttactatctgtctctggttctgtctcggccaagctctgatgatctactattacccttttggttcatctttttgactgaagcttcaacttcttcaatttctcctttgtttgtctttttttccagttccaaaggcaacttcccatctgctcttttcattctctggtgatgttggtgatgatggtgatgatgatgatgatggtgaggatctttttcgcctatttctgatacagttgtgcttctaccggtgttgtctccttttggggacttgttatcatcagtagtagaaccaagttttagcttactaacctgatcatttctgggatttggtgtcgtttttcctctggggatcagctcttggaatgatagtttgttaatgtcgtttgctgccatacttgagcctctctcttgttcgaagtaaaggagttgaacaacggttctcaaaggcagcctctcgtttttcacagcatgggatcttacctctggggacaacttttggcaatccaagattcgacacagtcgttttttctctgccttgttcaagtcaggatgctcctgcttattattaaaaagtaattgaagaatcaatcataaagttcttattttgaaagaatataatatgaaagctttctttaccatcaattatgtttacctttagaaaaatgttaatggccttgtagatatcatcatgattttccctggcaatatctgggatagtttcagctaaagaaacaactttcaataatggcatattgccatctctagcaacaacttgaagataagaatcaatgagtttcccaacttttctcagtgatctaagaaattggctgctttctacagtagcaggtggttgtcttttgcatatcaccaagaaactttctactactgctgaaaccaaatcaatgtcataaaaatgttggttaagggatgattgtgaaggaaaaagcaagtcttctacagttgcctcctcaagttgtagactacatttccttaacaactctgtctttgtcactggtgaagctcctagatagtttgcagtactaacaagcctcatcaagaaaccaacagaaactgatcctttatcagcagggatcatactcactatggtttcaagaattcttctactcctttcatctgattcatcagcttgagacactgagctctctggaggcttaatctttgttgtgtcgggtaaccagcgacgcgcatagacatgcaaagcttcaccaataagctgtgatggtaggatgtttatggttctgatagcagtaattatacacctaaacatgtctatatcaaggtcagatatgtcttctgtccaccaatccttagggacagaatgctgtttcttgttgtaacctggtctggtataagtgtaggaccaactaacctgtaaagaatatataatcaccatttttttattaacaatttaacaatttcaccatcaaaaaactgtttttgtacataccttagcaggaggtgtgaggattttctctacaattgagtcaatacactttctgataataccaagattttcagaccactcaggtaacttcactgtggtctgtagtgcaacaatggagtctttccagccttcaagaatacaagaattgaagaaagcctcaagctttaaaataaagtttcctttctctacagattcagtcattctaaggaacttagcagcacaaaaggctggtacaaagttgtgagcactgagattgattgtgattccataacagaacttagcacataattcaaaagcatcttctcctccaggaatgtcatgaagctctatcttggtatcttctgattcatcagagcttgagcaaagccgttgcaaaagaccacaccttggaagaagtgcaaactgcaactaagaaccacaattattttcaacaagaacaatcacatgcaccaaaataaacaaataatcaaaggttatccaatagatagtgtttttcactgatgaggataattgggcaacaatcaactccttcatcgattcataccttgtgaagaagatagctaatattgttaatctgtatagaaaggtcacttggtatatctgacagcagagtcctgcttagttcaaaagaaagaacaaaaaaattacagttgagaaagaaagaaaagaaaaaaaaaaatcttataataccatataacaaggtcagtaatggcataatttaatgacagattttcttatttggatcttttagaagataacaatacataccttacagcttcttctgtgtagaaagtgtcaggcctggtcccaattttcatgaacttcatttttttcagattgtgttttgtttctatcaaaactattgcacaggtcttgtttttgcccttttaaaatgattcctggggaaaaaaggaaccagaatctgtgtatgtattgttttaggatcaagtatgcttcatccaaaaaaaaaaaagacagagagagggggaaaaagaacaaaacaaagaataagaagtatcacacaaatcaaggtctacagggcttggaattttcaacttgaaatgttttactttcaatgaagaagtaaagtaaggtgtgactgaaaccaaaatctcaaaattgaatttttggaaaagaaatataccctagacatgtgatcattatgatagttgaaaaactcgtcatgctgaggcataaaaaacatacaaaagtaaaaccacaaaggaatcttgtaaaatcagatgttgtggccagtgaaaaaaaaaaagctatatgaaagaggggaagaagagagaggaagagaatctagaaaaaagaaggaaaattgaactcaaaagaggggtgaaagtggtatcctttcgacatgcccagatgaggaattgccaaaatactcacagtatgtacacaatgcaataaaaagctcgagcaaattaaggaaatgtgaggcagaagaagaagaatcattaaagacaggttggattcatcatcgttactttatatgcatgcaatttgagaacacacaaggaaaatgtggatttcaaatactacaaaattattgaaaataggattttgatattattacctctaatttcattccttaaaagggtcccatcatcttgatactcttattctcaatactgtacacatagagcctggcaagcccttcaaatatataggaaatttcacctacagtattacaaacataaaaccaaaattaatataaccaattatgcaaaaagaaaaaaaaaagaaaaaaaatcaatttttttttgttttgttgtcatgaatgtttgatggtttattttatgagagtctcaaagtggcaataacttttgacaatgcgtttcaacctctgctggcaagccatgcaaaaatttgtctcttttatcttttggaagatactgaagagagttaatcaagtggttgaacctaatttagaaggatgtgaaaacaatcactgtgactgactacttcaattgggctcagcatgtgtctgagttttgtgtcaaactctgacacttgtaacagttacaaaataaataacggaccaaaacttcaataggatcttcttttttttttttgacatgtataaaatatgacctcacatgactctgttctgcaaaagcttaatcactggtactagaaaaataaaagtaaaaataagtgaaaaaaagacataaaatttctcacgagaaagactatataaagtaattaaagtaaaccaattatggtttctctgatgacttctattctataatcaattcttctatcactacttttcggtcagtatggaaattataaaagtcagaacactcaaatcttttcgagggtgaaacttcaaggggtataaaaataaaaaattgaaggtggtaagtattatgtatattggaaatagtagtaactaaaaaaggactaataattagtttgattgcattttaaactaaaattcttctgtaataaaggaaccagaaggtaaacaagtttaactaatcttatctataaaaatagagcatttattttgttaggtaaagtaaaagatatatctattttaaatgtaggggaagaaaacaaaatatgatatagttgaggaagaaaattacataacaatatctttacaacggtttgacttatataaagaaaatgggaaaaagttagtgccccgggcgatggaactatgatgaagactttgatagcatgaaaagatggtatccgcaggaaccaaaaacaacaaaagaaaaagaaaaattaatgaaaagaaaaagagagagtgagaatctttttgatcacaaagacaatcacaagagagctaaaagaaaaagaacaaaaaattaattaaaattataaaaacataaataaataaataaaaatagatgagagattttgattatgttagtaggttggagtcctttttatcacaccattgattggttaaaatctgaccttagaggtggtctgtgctttcacagacaaaggtagataaaagagaaaaccttagtgctaatgtggaacaacacccagtacttttttaacagagagcaaaaagcctatgagatttttcttccaagatggaatacataactatattataatcccttgcaataagtcactttttttttaatattaaaagatcccaacaccccatgaacatgaatagtcacatacactcaacacaaatacatataaggcttagctcaaaatttagaatatattagactataaagtaagtgaattaacatgttgataataataatattattactttatattagtataaatcctctttttaattaagaaagaaaaagtatactatactacatcataatgatctctctccataaggatttgttataatctcctttttgtccatattctgttggagctacataattaaaagcatggtgaggtacagtttcctttttatcatttcttttatcttgtagctaagtatggtagaatcttcttctggacaacaaaatgaaaaaagcatgcacctagctttgagcatttactttgattatttcttaataaagagagaaacaattataacaagccaataaagatttctttcaatcaaatcacccctagcttcttccattgatcaatggcttggataatcaacggatttattgaaactaaccaccaaaggactagtgggacacaactattaatgctcgaaaaaacaaaaaatcacagtataaactgaacttaatagtaactataataataataataaaagagaacttaccagaattaaaaaaatatagttgaaagttgttgatgaagatagctgaagctgaagctcaaatacaagccaatagcaccattttggaatgaaaaagctgagaactttacttaccctttttcagaaacccaatagctgaaacatatgaaggaaagaggtatagatacaaaacacctttctgaggtaaacccaaaaaaggagtgatttaatactcccaaacaaacacatacgcatctgtgataattaaggatcagctgtagtcttgtgagtatatgcaacgtgaattaaagatcatgcatataatatatgcctactagccagagagagtagtatatagctggggttgctatatagttagcttctgtcaagcttattaagatcatcaattagtaggagctaggaagcaaagagacaaacaccaactaaagaagaaaagtgagtcctctgatgtgtcactagagactaatactagagagagagagagagagag

SEQ ID NO: 16052 - DNA, 6824 bp, Cannabis sativa
  modified_base (6661)..(6662): a, c, t, g, unknown or other
ccatgttgagtattggattcagtgttctatggctgtttgcatgttttgatctgagttgtctctgatttgatattgctgtagaattctgcagtatgcattataaaaagtgatatggccttgaacttcaatacgtgatacgtttggtatactcatataatatgatgaattttatttggttagagttagccaggaacaattgttgaggagtaaaagcggttagtttttgaatagtaaagtgcttttgaagtggtagtcatatcaactatggatgaagaaaaagacaataatgattggacacattgctatctgcccacccatgcgacctttccttatcttatctccactcataataagctgtacgtcaaatgtaatgcgtggctgatctgatctgatggaagacaaatagaatataaatcagtaaacaatgtcacttcttgtaatttgggaattggtttcgagagtcagattggttggttaactcatatgcagttcaagaaagtaatacaactaaactttttgggctgttctggggaagcatatacatatagaaaatatctgtagagcaaacttcttggtttaaattattggtgtgatcattataattgttctctggtagcttctatgatatttaggctgccttattaacttaggctgaataggtgcccgggtttcaggtttcaaccaattaatatgaattatcaagttccagtcatatacaattctttaaatgctagattttggtaaatgcattgtcttacacaaaataatgtatggggagcttcacacaggttttttttgtctgtattcttgcatattaatcatgaaatgcttgcttgcagataagctatatgtgcatctaatttacagttttcttttggctgaattaatatacagtacagtattcaagcaaaagttttctattcattatcaagaaacaaacaaatatatatatatattttttctgattacaaatttgttggtctatgattcaaagcttgcgtttatagctatgtaatctgtgtacctgttcacttttttgttttctttactatttgaagtttggtagcaaacattctaaggtgctgttaagtaaactgttcaggatcttggcttaaacattctattgtgttgaaattgtttgacatgttgtaaattcagtcagctaattgctttggactgtttggttttaatttagttatgattttccctgacttgtgttggtttttgttgcagcttcctgcttaattcatttctatgcttatatctaattttcttctcactgctttgtgcaatatccgcctataataagaatctgatccatactcttgattttgattttcttttgatttaatttgttcagtgaaattatttatgattagatatttattattatgtatgaatttgtttcctgtgttgtttgtatatggattttaaaataaggttccatgtcttttgttatatggagtgttgagacagttatagtcatcaaacaacgaataacattttttggcttcatgttttctcctgtgtacagactgtacctgcttgtcaaaatctctacaaaaattccttcacctaccactgcctccaagatgaagtaacattacaatttgatgatgcaaaccagtttttaggtatgtattttctctcaatgactgcacattggttaaatggatactgtccttctgtctctgtaattctgattttgtggagcagtcttctgagatttagttgtttggctaccatatgattcccaggattcattatcaaaggattacttataatacacagtgactatatgagtcctaaagggaaaaatgtagattatgtataattcatggttattaaatgtgtccaaatgtgtgaatgaggttaggctggcatacaattctccgtctgttttttgacttgcatttttcaattaactaacaagttgtttcgttatagtcctacaaatgtagttttcaaattctggcttgctggtcccattaaaataataataataataacagcatgattaaacaagataattttcactgaatacattttaaatgtttggcctcaacgctacaacaattgttctaaagcattggacagaaaattttcttggatatgttctgataataatcacgaacaatataaacaacataagggctattggctgcaaagtctcgctgtttttacttccttgatatgtttaagttgatcaactgcataaagtgatgtcactgtcagttactcctcactggttttgtgtggttttgaacttgcaatgccaagatccatttatttttttgttagacttacactttttcttcttgtgtcttccatttcctattaaaaagttgtgttaactttatgtgtattggctattgcaattgatattggaagcttgtaacaagaaaagagaagccaaatgtgcatattgcacttgataaatatgtggagtgaatcatgctattgaactttactaaattgttgtctgtaatttgtaatgctcaattattgtcaaacttaattaatggatgtcgaatgttagccttctgttagagttatcatttgcactttcattttcttacttcatgcttgtttttgcagagcaatgtgaaaaggacaaggctcgtgtgctagtgcactgtatgtcaggtagaaataggtaaggaattactgttgaatcacctttagttatacatttctttcaatcttgtgatttctttttgttcacgatatatatatatatatttatatatatatatatataacccacatgtgtagaatggaataatgtagtgcattttacaacaagcattctggataatatctttaaaacaagggatgcttctttgttttgataggtcgccagctgttgtgatggcatacttaatgaaatctagaggatggaggctagcacagagttatcagtgggtgaaagaacgaagaccatctgttcaattaactgaaggtacacatgtgattttgtcatttgagtttactttttagaaaattgcatttgaggtttaaatttgataagccccaatccctttgtacaaaaatagtagcaaatacaagaacaatagcaagaaatagaacgactttgtgtttgaattgatatttgaatgagaattacataacaaaggacccaaggcacttcagaggcataggctctcaatgatgcttactaagttttactactcaattcatgcataccccttttctctctttaactctcctatatattccatcctgttccccactaaagactaccctcacacaatgagttatacacccttttataagctatagtctacctcatcctaatcatgggatctaacattattgctcatccaaatttcaccttctcctcaaggtgaaagataatagctcccaagttatagccacattttgtgcccgatctttgtcaaagaacggtgtatttcgagaggtcttggatgcacaattggattgtaggagttgcgtctggtgccctttataaaaaatccaaagctggaatcgtactagtatagctccaaagtgccagtctgcaacaatgaacgatatctgtgataaaaaaattagagtagagagaacttgagtacctctctaaagcaagaccagcaagagcaaatttgtcacctgggtgtcactgtgtcctttgtcaaagctgcctttagcctacaacaccaagtccaactcgaaacggaagctaaccctagccaaatagccaccaacaatctctttgaattgcataaattaattccaatgaacacaatcaatggaggaaaacttaaacttaactcagttaaaaaatcgccttaaggagaagggagaaggctgtaaaacttgttgatggtgcatagtgataagcaccatgtaattgttcatctcctattttcccttagttcacatgggaaactcgagaaggctgagtgcgacatgttgagataaacaagtagagtactagggtgaaacacgcaaatggggcgagtctgaatcccatttggtgggcccatgatcgtggaagataaatgggccaatattcatgtcacatgaataaagcctgatgctttggggccaaactggagtaagacataccaaaggatgaatgggtaatgtttgaaacaacggccagtgggttggacttgggcatcaaatgatagggttttattgaactcttgaagaagatcagatgaacgaaggtcttttccattgaaatgacttgcgacgacttctctagctctaataatgtccatctcgttagtggcaacctcatttcaaaaacattgctcgtagcccccttcaattctgttagcagccttggtttatattcggcctgaaaagaaatcccttggcaacatcagaatctatttggttccattgaagattgatgctctaatgccatttgataagctctgatcctcctggtacaaatatagagagaacttgtgtttgaaatgagactggaacagagaattacaaagctaagcaccctaggcattcgaaaggcctaggctctccatgattcttgctgagttttactactcaattcatgcataccccctctcccttcgaaactctcttctactatccttttccccactcaagactacccttatacaatgagttatacaccctttatttgctatacgataccatacctcacccatttcttcacggggtaacaaaatgctcatcacaaaacctaattcaactttgtatcttattattgtactgaaacttaaaacttgatgaatgggattcaggtatttctgaaaatttttgttaaccattcggaatgaataatgaatatcctaattgttaacaacaaaaagtggaattaagtactataatttggctatggcggatgggtagaaaactacaaaattcttataaaaatttgctttgtttgcttcaataaattctgtatactgtgaaggggatgaatcaacatgaaaattgattattcttatgtatgtgtgtatgtataccattactgatattgtttaggtcttgaaataggctggcaagaacttttcatatagtaatttctctcgtttcttctttttgtatttttttttggtagtgagagatggaaacatttcgcaaagatttttccttaaaaagacatttaagattgctcataacttaccaaagatttgtgcacatgactgataatcaagtcaatgtataaggaggcaggcacttgcagtgaacatgagtatttttttctgctattgattgttatcatttgtttgtaatatcattgcttcgtttttgtaactggtttaagtaattatcttgatttatttgctagcttactgagggctgtatatttattggtaccaactgtttaatagcttagctctcccctgatctcatttctccttttatggttgtagctgtctcccagcagttgcaggagtatgagcagaagattttcggatcaatcgataataacactccagcacaacccattttccagtctgttgctgcacctctgttcaacataggctttccaaaaatcaatgatccacccccggttcccactttcaatactgtcagtgctccctccatttttgagcgtcagcctacaagtattcctcctaatgagttcacatttggagcaatcccggctcaaaatgatattgcaggaggccctgccaatgctaatccgccaagttcaactgcaaatgatattcaaatggatagtttatttatttatttttttttgtaacttttagttgctggtattttaatacttattgaagataaagcatggtcagaagttaagtcctgagttctatggatttgaatgtaaagtgggatgtgactgttttggtttgtaaggtttgatgtggtaaaaatccatgggtaccttgatcatctctcattctcactgtcgtctcgtcttacaagggcaagaatttttttttcgactcttgtgcttatacaaaatgtaatttcctactttagaaagttacctcttttctgttcattgtacctttatttgatttttgtttttgggttgatacgatgagttattggcattcttgtataaattaataatgaattaacgactacgagaatcgattatagcatgtactgttcagatatgacttttgtttaaaaaaataaaaataaaaaaaagcctaaattacacaaaagcagtgcgctggtatgttgtagtctatctctacagaaccaagtcacattagaatccagagcccatttagcaacacaatcagcaacttgatgatagtctgtagaggtcttaacacccaacaattgggaagctaaactcttacaatctgcaacataattcacaatggcccaatggtaataatagaatcaattatgggcatctttaatggtaatattttggagaatgttttatgaggcgaaaaatttaggtgacaatatataaagatgctatactattagagataaaaaaaaaatactatttttaaaatttgcagtgataccacacaatgacattattaatgatattttttcttttgcaatatatatataatactttaacaaaaaaaattatttacatatataataatggatgagatcacaattgtattatttttaaaaagtattatacgtttttaaaagtaagattactaaaaataatgtgaaaaaaaataaaaataaaatnnaatattatatttttaaataatgtggagatatttaaacaacaatactattagagatgctggattggattggacaggataatttgtccaatccagtgtttgggcatgttagaagtctggataactaatccagctaacctcatctgtctgggattatttatccca

SEQ ID NO: 16053 - DNA, 9661 bp, Cannabis sativa
  modified_base (4857)..(4859): a, c, t, g, unknown or other
ctctctctctctctctctagattgcacctcttttctctaaaatgggacattgagctttatatagcacaactcatacacaaggaaaggcactatttttaacagttaggatttgagctgtctaaacttaatacaaccggtattataacttaccaaatagttagttatgtttgttaactttttggagaataaacttccacaaattccacctttatccttaacaaaataacagtcctaagtcttgatatttgatgaaggtaatctccctaaatagttcagcaagtaccaatatttagtaagctaagacaatactttagcttactgaaagtgataaccttaggtcccatatcagcagagttgtcacttgtgtacaccatttccaagtttagaaccttgtcttctatcgtctcccttatccaatacaaccatatgtcattatgcttgcttttctcacggtgaactggatttttgcacatgtgtatagaagacgttgtccgagtacacaactcctttgtctttgagcagttccagcttttgtgaaataccttacagtcagattgcttccttaaaagcctcagtagttgccataaactctgactctgtagtagactaaacaactacttgttgttgctgtgatttccagctgatgcagctcttatttacggaaaaaatgtacgttgttgtagaccttctagtgtctgtattggacgcatagcctgcatcaacatatccagttaagaaaactttcccttgattactctcataaatcaaaccataattggatgtcccctttaggtatctcagaagccattctagagctttctaatgctcaagccctagatttgacatgtatctattcagcacactcaaggaatgtgcaatatttggtcttgtactcatcattgtgtacattaaacaccccacaacatctgcataaggaaccttttgcatttccttcctttcagctttagttttaggacaatgttcattagagagcttgaagtgaccatccattggaactgttgtaacctttgcagtgtccaaattgaacttcttgatcattttatcaatgtaacgtctttgtgttagcatcaactttcccttctttctgtctcttagaaattcaatgcctaggattttcctcacatgtcctaggtctttcatttcaaactcaaaattgagtttttctttgatggttctgacctttggtttgtccttgcttatgatcatcatgtcatcaacatacagcaataggaaaattatgttaggagtgtccagatccttgtagtacaaacaagctgaatcaaattttgatctgatgaacccaatctcttgtgcaaaagtgttgaatctcttgttccattgccttagagattatttcaaaccatacaaagacctcttgagcaagcataccatttctatcttgttattttccacctgaaaactaggtggttgttccatgtaaatttgttcatctaggaacccacttaagaaagcaattttaacatctaattactcaacttccagatcaacatcattctaattgtcttgtatttcaccacaggagagaaaatatcaacataatctattccctctacctatgtgaagcctttagctaccaacctagccttgtatctaggtggttctccctctaacatgccttcttttaccttgaacaaccatatgcaagagattatctttttgccttgtggtcttagggaccacaacccaagtcctattctttttcaaagaatgcatctcatcctccatagcatctaaccacttcttccctgacatgcttgctattgcttcttcataagttgttgattctagttcttcttcagattgcattgtagctagagaatatgttataaggtcagcttaagcatatctcttgggtggtttaatcacccttttagtcctatctcaagccaactgatagttctcaagacctgtctgatcagcttgttgatgtcccacctcaattttaggtacaggaaccgatcttgaaccatatcaggtagttgttcctctatgtcagtttcaactggttcagtagggtgttggccagcttgtgtttgacatgccaagcttaatgtcaaactcagataggtctggtctacttttgttgttccctgcataattagaaaacacacatttcttggctctagggtctaacttatcttccttttggtgagcataagttgtgcagccaaaaattttcaagtgcctaagacttggtgccttatcatgcaacatttcatatggtgtttcagtgtaaaaattctgtaggactcttattaatcaaataacatgcagtgactaaagcttctcccagaaactcttccccaaaccaaaactaatcaataaacacctaactttgtttaacaaagtcatattcattctctcaacaacaccattctattaaggtgtgtgcttaacagttttgtatctaacaatgtcatattcagaacatagcaaattaagttcagtgttaataaattctaacccattgtcagtcctcaacagtttcaattttctatcatattgtttctcaactttaattttccattcattaaatttcaacaatcacttattctttgttttaagcaagtaaatccaaatatgtctactgtaatcatctacaattgacaagaattaatgtttacctgaatgagtttctactttgtgagacccccacatgtcaacatgtacatattctaatgccctttttgactcttgtactacagtcttgaatttgagcttgtggtgcttccccaatatgcaggcttcacagaatggtaatgagctcgattcgaactttcttagtaaaccttgtttattcaattccttgataccttgttcactcatgtgctccattctcttgtgctacacctccttttctgattcttgatgtcttactgtgtcagcttcagaggagagaatagtctcaacttacagtatgtataatccatttatcttctcacctttcatcacagtaagtgatcccttatagatcttcatgtggtcattttttgatttgtaattgaagccttcttcttccagcacaccaagggacaccaaattccttctcaagtttggtatgtgcttgccattgtttagtgtcctcactgagccatcaaagtgcttgattgcctccttgcctatgccaatgaccttgcaagaatttccattacccattagaatagtaccacaagcaacctttcgatagtcaatacaatttttaagggttggacacatgtgaaatgtgcaaccaaaatcaacaatccactccctagtgattctttgatcagaaaccatgtacaaatccccatctgatgagcaacgatttgtgtcttctgtaatggatgcaaaatcatgctgctgttttttatcttacttctacttattcttgaatttattgcaaaatctcctaatgtgaccaatcttgtcacagaagtatcacttcctatccttgtggtattttcccttagattttgatcttgattgaggtctgtaataacccttgaaatgatcctcgagtttaacccacaacttcctagttgtcttcaagccttgaatctttcttcttactgtatttgatagataaattataatcgtgtaagatgccaacttttccatatccccaatctcttccttcttcagtttctcagtcaactcttcattgggcttgagtgcctttgctaccttctagtgaaccagaattcctttcaaactttctctccacaatccaaagccccctgttccattgaccttcttaagttcaaatctagccgagctactcatctttgaatcacgatcaatcttggatgagtcttggtctcttctttaggatcacaaacactagctctaatttgttggaaattttatgttaacaacaacgtcaagactcatctaaaacacacacaaattgatcaaaaataaaaacaaatcaaacaccaaaatagaattgaaattaatcaataatgaacaaaaaataaaatagaagaggtagacaagatttatcctggttctggtcctagaaatcaaatcaattcctggccatactccagttgaaagccatcatcattaatccactataaataagtttgagtaagtacaacacaaatggcagagttcttagcagaccctctgaaatcacactagaagaatagtaacagtctttcaaccccatgtgtttcccctttgagttcttagtcacaaagaactctatcactctctcactaatactctctgcctctctctcactagattgcacgtcttttctttgaaatgggacattgagctatatatagcacaacgcatacacaaggaaaggcaaattgtttgtaacaggataaacagttaggatttgagttgtctaaacttaacaaaaccagttttaactaacttaccaaatagttagttatgttagttaatctgttggaggataaacttccatatatatttatatatattctaaatttgtaatagaacaaattaactaatgatacaagttaaaaatcaggtctgaatctttttatccatgctgataattccttacttcttgcataaagcaattcagattttctcgcaaattttagactatccttgattaatttaatctcattaatgtatatgtccaattttaatttcagagtatccttggtttatttagagcatattgtaaggttttttaaaagatgatatgatccacgattgttgggtgcgtttgcattggcatgatcggtttaccttcttatgccctttatgttgggtggcgtttggttagaggtaatgaaatggaagggaatggaaatgaaacaattttcatttcattcttttgtttggttgcatttnnnagtattggaatgtcattccaatggaatgccatttccaacattttggtggaatgactattctattttgaaatggaagaaaataccattctaatgtaacatgagaaaatatttgatgatttttttatcaattatttatgcattttaaaatttattccattccattcctattccttttcccattcccattcctcttcctatgttttcattcctcctaactaaacgtcagtgtttaccaatattagaataactttgttcttgaatttaattgttttacatgttcgagtgaggagttctttccactacccgattgacttttggtttagttgttgaaagaataagaagaatcataactacgtgctaacattgtggtgtgaaaaaaaaaagtgttgaggtgactacagagtacagatagacagaaatctcatattgagaccaaaaaaattctcaatccacatttagttcatttactagtaaaaaaaattgtgtttgtgttatccaagcacgttgatgtggcaagaggaccgagcgacacgtgtctcacatttctgaccctggggaagataaatgttccaaacagcctgcacattatacatcagcatttataattgtcgattacccgagcagggtggaagacagggcatccgaccaggtaaaagtctacgataccgagctacttacaagaagttaattacttcagaatgatcttgtaatgcccagacacgaagataatccctacaatcgtgggattgaatcagagaaatatggcaacctgttctagttttctattttgtgtattgtaattatgtaatcattgtaatttcctattttatgcgttgtaagcaaaaggaaaaccatccctcatgcattaagccgctataaataatgacctagcctcactatgaaaaggatcgaaagaattgcttcagatagagattctagagagttaatagtgatctaagagaattactcagagatcaattgtaaaagctttaaaagaggaaaaacactttattctttctcttaagttaatagaatacaaggagagtaggctattaccacactcacggagccgaacctcttcaaaattcagtgttctttttaatttatcatttttgttctcttctaattatattactaatcacttattaattgactcattgtcgttggctaaaagcgaggccaatatttcgatgctttcattgagagcaaaaacccacgttttttgtcttaagttttgacaggcatacaggatggttgtacaaactcgtagaggccttgctgatcagggaaatccgatggtgatagatcccaacgtatagactcctagaaatacgagaggaccactagggacaaaccccaagcaggtcaatacgcaaccacctactgtgggccatggagtgacttcccctctggttgggattacaccaggcgtgcaagagactgggaacaccagttcagcagctgatcaatccactcctaacactgaggtcccgtctaccactaatgttaaaaggccacttgaagatgatactgaaatcaaaaacctccgagcagcccttggactcatgcaaggtcataataatattttgcaccatgatcaggtggatctccgtgcagctataaaccttgtatttgacgagcaaaaatgtcaatttatagaatggagggacagggagatggaaactctgagggctcaacaagcagccattgatgatcgcacaagataggccaccatactgataagaaaggcctacccagtcaccaatcaacaactggctactacatccagtatccctttgggcaggtcggaagggtatgcagctgggcataccacacaaactcacaatggtcagcctccaatccacggccacatgtccaacctgtgggccaaacgatagacggtcagatcctgccgaaccgtcccttgggtggagttacacacaccaacttcaccccaactaaaatttctggccaacctgtcggccaaacaagtcagaggccaaggccatctggtacttcagtattcgataggttgggcgccgcacatgacctcatgactgacctaaattgaataaggggcatggacgaacaatacgtcccaccagctgtgcagccacacatttgcatacaggatcaagtttaaagagatcccaatgtgacataggtcggtcaacaagctgaacaagttcatccatttgtgcaagcacaactagatcaacttaaaaacatggtgtaaggcctaaccagcccaaaactcaccaatctcaaacttgaccaagcatgtggatcacgcttctccccggagattgaagtccttgaattacccccaaagttcaaaatgtcaacttgaaaaatgtatacatggaaagaagaagatcctttgtcacatctgaagtattttgagatgaagatggatctacaaggggtaagaggtgatgtccgatgtagaatatttcatgccacactcgcagaggccgcctagcagtggtacttcaagctgctccggggaggtttaactcatggaatgccttctcctcagaattccacgcacagttttcctcctcacgtcaacttccctcgcatctagaagacctggtcgaagtaaagcggatatcaggagaaccccttagaacctgtataacagatttatgacagaagctacaaaaagttaaaggggggttaccggaaagaaggaaggttggccgcaatactggggggcattgagccacttagagaactgtagaaggatatcaaaaggttgaccgaggggccaatggcagaatttttggttctagcagatggattcattaagctcgaagaagctgttgggcgcgtggatattgtcggacaaaaaaagagccagcaatgtgcttcctcggcaagaacatccgttcagaatccacagtaccctggcagctcaaatgcaaatgggaagaggtctaataacggtaacaggcaaagtaatagaaagaaaggaaagttcactggcaatgctgaatagcacctagggaaaatgcctcaaaatttactgccttctcagtcctaacagacgacctagagacaatctacgcgacaactcagtctatggtcacgtataagaaaccatctcccatgaagaaggatgtaagtaagagacatacatccaagttttgtcattttcatgcggactacgaccacgacacgaacgaatgtaataatcttaagcgagaaattgaatttttgatgagaatgaataacccccacttacagaagtatgtaaaggccgaccagaaccaaagggcccccaaggagacaataaccagaacaagttgatgcctccaccagtggacgggcatttacaagtcattattgggggtccacatcctgttggagactcgggcaaagctcaaaaaagtatgctcgagccttacagtatgagcaaaatgaaacagtcttggccttggaggagagaaaactaaaaatatcacgggtaggggaaccaacaataaccttcactgaagtagatgcatttaaggtccatatcccgtacaaataagataatggcacgggctatgatagacaatggagctttcctcaaacatcatgtttaaaataacttatgagaagatgggactccagcttaaagatttgatcccctacacccagctcgtatatggtttctccagccagagcgttgcacctctaggacaaatctgcctaccccttactgttggacaagctccgaggagcataatagtgatggcacaattcttaataattgatgttccatcagcttttaatgtcatgttaggccgaccggccctatatgacttaaaagttgttacatcaattttctacatgtgcgtcaagttcccgacaaagaatggggtggggtcccaggggaaaccaaagaattgcgcgggaatgctataagcttgccttaactaaggttaagaaggaaaacacctccaactagagttcgcgcaagggaaaaagcattagccaataggaagtcgcccaaggcgaggacgagaacatggatccccaacttagggaatcaaacacaaatgtagggtcggtagaagaactggaagaagtggaaattgacccaaatatcccgaccaggaaactcaaaattggtaagggtttgttgctcgaaataaaattagctttaataaaatttctattagctttaataaaatttctgagagcaaacctagatatttttcgcctggtcacatgaggatatggtcggtattgatccaactataatgtctcacgccctaaacattgacccaaactttcatcccgtccaaaaaataagaagactactggacaaagaacgagcgcaagcactgaaagaagaggtagagagactgcgtgaaaatgagttcatcattgaagctttctacccggcttgggtagctaaccccatactagtacccaagcctaaaaaataatggcgagtatgtattgattttaccgatctcaataaggcgtgccccaaggactattttctacttccaagaattaatcagctcgtggatgcaatggtcgggcatgaaatcctgagcttcatggattcctattcggggtataaccaaatcagaatgcatccactagaccaagaacatacaagtttccgaatagatatgggtctgtactattacaagggtatgccattcggtttgtagaatgttggaactaccagagactcgtaaataaaatgtttaaagaccagatcgaacaaaatatggaggtatatgtggatgatatgctcgtcaaatccaggaatgctggggggaacataaaggatctagatg

SEQ ID NO: 16054 - DNA, 3027 bp, Cannabis sativa
taaatatttacaccacaaattactttaaacccaataatataacatatcatctcttctctctcaccgtagctcttgctaaaaaacaacattagtccccatcaaagtcacaactttacagtgtcttgtcttgttctcatgcacacctctcattttccaaaagttcatttctagataaagttattaaaaacaagtaactccaaatccaaattcagctagcaccctaaagaaagctactttctttttcttttagatttttgttattttccttgttccttcttttaactataagaatatataactgcatctcttggttcaaatgtcttattcatgctagtaaaagagaaattaattcaccatagctagaattttttgatcaggaaaaagaagaataagattcacttgagaagtgaatacatgggaataatgttaactaacaaacaaatattaccattcaatattcatcagaagaattcaaactccaagtatagacctgatgatgacctatctaagtaaggtgtttccttgttatttggtggcattggtgacttggatgttgtgttgttgtttaagaactctagatcaactggtttaggaatctctggaggttgagtgcctcgaatgagtgcccaattaacactttcaaagaatggatgttgcttgatttcagtagcacctctcttagatcctaatctcttttgagggtcttttactagcagaccacggatgagatccttagcagcaaaactaacattagatccgctaggaaacttcaggggttgaccaacaacattgaatagtgtctcccgatttccattgcctttgaagggtgtcttcccatgaagcaactcatacaagaaaataccaaatgtccaccaatcaacagcacttccatggccatctcctcttatgatctcaggagctaagtattcatgagtaccgacaaaggacatggagcgagcattagttggttctgcaataaggacagggagcgaatctgaattcaacatactcgttcttgttctttcgcttcttgtcttgtttgtttttgaacttaaaaatcgaggcttgaaacaagaaggttgcaagcaagaaggttgtacacaaaccggtaatttgcaggttggatcgatgatgcaggatggctcaatgcagtaagaagagattctacaagatggttctgtagtactagactgaacaagagttgggttcacattgcatcttaatgataaatcaaaatcagacagcattatatgaccatcttccctaacaagtacattttcaggtttaagatctctatacaccactcccaacatgtgaagatactccatagcaagaagaacttccgaagcataaaacctgtaaataagaaatacacagcatggttatacaatttactaatataacagcaaaacatcaaaaagggtaaataagggcttaaatatcaagttttgatattgtaagtgacataaatctgagtttttttataacatagactgaattagagaaaaattataatttagaaacagtgagtacttatggcccgctaaaaaaatcatcagagtttataccgactacaaactcaaaactttcgttaattatgccgctatttagccaattgcattatttaagattcacatcataaaaattgcatttttatttttgttatatgcaatctgaactattccaaccccagaaaaggttcttgttttagacatttcgatttcaatttaagaaactcatagataggtgaataaattataaggaacaaacctagcagcttgttctgtaaaatgcttgcccggttggcgttgacgaagtgtatgaagatcaccaccactgcaaaactccattaacaagcaagaaaacttctcagtcttgaaatgtgaataaagagtcggaagaaatggatgatccaacagacccaatatgtctttctcagtttgagctctcaccaacttcttcctcccagcaagcatgcccttatccataaccttaatcgcaaaaaggcaacccatattcctcaactcagccaaatacacactcccaatgtctccacaaccaagctttttcaaaagcctaaaatgtcccaaacccaagtcaccatctttactcttcacgaactgaatggcgtcccatcgaatatcatttcccttgtgaggcttcgatgggcaaaagctcctaaaactaatgtcattcccttcaaaactattggaaatactagcaaaactcgaactactcttctcactttcttcttcttcttcttctttacagaacaactcaatagtttcaacattcacactgttattatcagacccagaaatagtaccgctacataagccaatactcacactgctactaataactgaggggctatcatcattgctttcactgctctgtgtctggtttggtttgtccattgttttagagagatttgttagtgcatagtaagtgtttgataaaagtagtcagaaaaattagtgggaaaaaagaagggaaatgcaatggtggtcaaggttgggttttggggttttgggtttggggtttggggagtgaccgaggtggtcaaagggagggcgagacagacgggggtggtagtaaggagagaggtgaacatgggaagaagaagccaaaaggagggtggtggtggagaaaacggtattcaaatttgaaatctgatgagtgtgataataacggggtgagagacccaatgccattgcccggcttgggtaatttggactccatctctctctctctctcttctttctctctctctcagaacatataacacatacagatacagcttagagacaacaaaacgcagagaagagagagagagagattccctgtttacgaggacgacaaaagccatttagattttctaaacaaatatatatttattcaaacctttgcacaaaaaaatatatatatgtttgtttaaacactaataactgttattgttctactttgattatttttttcatggcatatcctactttgattatattaatattataattattattatta

SEQ ID NO: 16055 - DNA, 10681 bp, Cannabis sativa
  modified_base (924)..(930): a, c, t, g, unknown or other
tgcaaatgtacgctagtaaaactttggtctctttgccagtgcagtttgcaaaatgcgctgtgcagtagcgaactgtgctggtaaaagtgagtgacatttcttgtagtgttcctagatgtaacagactcgatgtctcgctatatgcattcaatgatatatggtttttcgttaatatactataaacaacaatttgtatattttttcctcgcataagaccttacagtcagcgagttgtaaatatactctgctacttacgcaattaatgagttattccattaaaagtgattttatcgatccatattccctttatcttgatacgtgtcctctactgagatggtagccgaatttcaggtataacaaatgtgttttccaataatgttttttattttagtttcagcactttacagccaataattttaaattaaattgaactaattgataaattgataatcggtaataaatctactagaactttggtttgacacatccattagtgatagctttggttgaaaaacaacgctaaatctatttttcttttttgtaataataggcacaatattttacaattatttttataattcaaaaagagataaaaattaattcaagagtaaaaatcttatttattcttttaattaatttgaggtgagatcattatgataaaatttatatatatgctattattataatgagtataagtttatttgcccatcattattgatgtataaaacctacactaaatatgcttggaaaaacacacattattagtttattcccaattaattgaaatgtcattattattcaaaaataaaatatgaaactcaaaagagtggaaaagcatgcacatgtaagctgtgtgtaaagtgcatgctttataaactttaatcataggatacacacacaaaacacacacacacacatatatannnnnnnatatatatatatattacataactgcaagttacacaccacatagaacatatatatacctacggattattattaattaattatatatgttaacttttttcataataatcgatattaaaatttaaaattacatataataatttcgatctatattaatttgcttaccgattcattattaaatcatcataaaaagacgtgtcaaaattgatcaagtcaccaccatcatccaaacacacctttccggccacaaacaccacagcctcatgcactagcctcccaactgtggcacctttaacaaaagaagatagcctctccgaaaggcggccaccactgccaggtggcggcggtggccggggttgcgggggcatgtggtggtcatgaggacaaaagccatgagatgttggtctcgatccatagtagggatattggttgtgaagatcatgatagggcaccatgttataattaaattcatatggtggataatatgtgtaattataattaaatgggttcatattattgctaggaatattgtagtaataataatgaggcaaagatggtggtggttgtggtgatggaggatacaatattattggattttgttgttgttgataggaattataagccattgagattgatctagctagagagtatgtgaatatactacttagatgataagaattatttttggatttgataaattaaatcaatatctatcactacttttatatacacatattaattgcatgcatacaataaattacgtaaaagaagggtttaattatattgaatgtacaagaatattagctattgataattccaaaacatatgtacatcacattttgatgaggatcctaaatttttactatttggggcttatatatttatattattaaaaaatatttacatatattatattgactcttattagatttatttaattttgtttgggtttttttactattttaatctataattattaaattaaaaaaaaattaattttttaaaaaacaatatttttattaattgattttgatgggttgtctagagaataatctatacgtgtatttttagaagctaatgaataatgtgagtagtggaaatactatatttgcaaactgcaaactcacaacaaaatttaactaaaagcaagaattttttatgcaaattgaatgatcatatggggtaaatgttgcaactgatcattataaattattaaggattgaataagtattatatatatatatttagggatatgattttatcccgtgattgtactttcacggaatacattccgtgatgtacgacagtcgttagatgagagagttatttgatctgagggctgaaattgatctaagggtaattaaggttaaaatagtaatgtaccctgacactcatctaatgtaccctgagactcatctaatgtaccacagaatacattctgtaaaagtacatcacagtacaaaatcgtgtccgtatatatttatatgataacaatttttccataaatggaagatcactgcaatgtacctaaaactacaataacaaatttggcagtaatactactgtccttgtagccttattgtacacattttattgttaattaatcaatcaattttgtttgaataccttattacacgcacttaggaaatttttataagaaaaagtagtacaaaaggaaaagaaaagagattaaaaatatacatatcaatattttaatactgggggttgtttttcaatcgttgctttgagctttataaaagattactttaattagtttagtgaacctaacaattgttcgagcactttcatgcatgcacatatttatagtatttaaataatgattagtggacctcattgatcgatcgatttcatgcactcatgacatatataataatttgttccagttagctagttattaattgtcacttctccatttccccactattatataccactatttacagtttttaaaaccttttagcatcgattttgattaaatttaccaccgatattagtctaaacgacgttacagggtcaaatataaccgacgccatagtatacactatgacgtcgattattaatatataacagacaccatatacattaagaattgacggtaaaggcttaaaaaccaacgccatagtattaaaaattaatttatttatccagtttaaaatttattacaaattcataaatttaatttatttaaattatatatttataaatttataataaatattatttaaactaaattaaatatttattttttaaaagctaaaatatatatttatttatttaaattaattttatgactagccaatatacttaaattaatttcatggaagcaattaaaaaaattacaattatattacacaaatattttaaaattagacctcaaagtattaacaagttaatatatttaattaaacatatgaaaattacaagttaacctaaaaaaataagctagagaagaaaaattcttatacattatagcatcaatcgaccaagccttcgtgaatcaccgccagtaatctctatcaactgtcgttgtaacggtaacaattcagtttttgcatcgtatgtcttcttttccccaaactgtgaaaagaagtaaatatttatattagtatatgtatattattgtttgttaaataaaataattaacaattaaaacttacaactttttgattgtttataaacggttagggtttccacgtgtgaagatgtcactcatgtatttcaatacataaaaactatactcttggtttttaggttgtcttagacaatttgctagtaaaatttctggtcacgccccaaaaaatgcatttgatactcttataatctcgtatactctgttttaaaaattatattaacattataatttattaacatatatatatataacttagttaataaatagatttgttacataaagagtaattatattataattacctttttaatattgcattaatttgagggaaactttatggctatgtatacggtctaaatggataattttctctgacgcaacaacctctagcatccaatgcgcactaaaaaatattttgggatgtatataagatagtgtaaaaataatttcaagttatagtatagaaaataattttaaattatctcttaagtagtgtttacctgatcttccaaggactaaagaacatttggtgttggctattcatcgatgataactaatgagtcaatccttctgatgcattcttaaaagactttgccttctctaaattgttctgaccgttcactgcaagaagctctgggccgtaaaacttgaaaactcatctcaaatcatgtaagccctcctagatgtgcctgcattaaattattaaatattagtattttataataatttcagtaaaatttgatatataaggttaattagattagagaagagtatacatcattccaaaaagtattccctggttgctgatgaagtcacacacgccacctgctacaaattttctctagatatcgtggtttggctacgaggtgctatgaaaccacgtggtacccaaattgggattatcgcattttctccttgattctcagaaattcttcaaccatccatttgagtactttggggaatagtgccatgacctctggtgtaattaataaacctgcttgatcaccattgtcttttcgataaggcacgggaccttttccctttaacacatcaagtcttgatggtggttgagctaatggattctatacaaaacaccatataatatatcaaaactgatcctaattttaccaaatttttgacagcataacgactgtaattgatcgtctccaaaaattttaaacatgcctaataacaaacaaaatcgataatataattgattatccatccattcgactgtagtacatgtattcgcagaacctacttcactatggttgaatatttaagatattcaaactccactaagcattgataattaattaataacaaaaattacctcgggtgttaaaattaggtatttagatcaaggaaggaacatgtttgctacttccttaacaaattaatatgcattcctcaattgagattggaatttcagcatcctcctatagcatttatgaaatgagaacccaggcatatgaatcatcgtaagaaaaagtgtgaactgtgatttaaccctcatgttcgtacagataagctcgggccactatgttgccgatattgtttgagcagaggaatatactatctaattagctgccctctgttcaacaaaattgtacatgataggtggctcatatagggaaacaaactcctaagcataattttgtggaccttcatcctcctgagcatgttattatgaaacatacgcctgatgagccacctgtccttcttccacatcctcatcctcattctactcttgttcggcaacatttttcttttgtttaaggaattcgatttctacttttaatttcttaatctcatttgttttagagccacgacatcagaaacttcccttttccaagtgccaaatagtttagacgacgacaaggaactttgcaaattaataaataaagttagctataatttattttgtataactaatgaaaaaaatattttttaagtactagaatacacaacaaccctgacacatccaggatgctctggtgtcccgagcgcctgcatcagaatgtcattttggccatggacctgaacttgtccctgactaattaacttgctcatctagttgagcctaatgcacatattcaagcaattagtatatgatttatatatatattaactcattattacttaatcaatgattaatatatacttactatcttatcagaaaattccttgtcgtaatcagtgacaagttttattttcttagtccgtgatttgatccaaacacgatggcgtgggggatcctaaacctcaaggtcctttttctgcattattttacaaataaatttaatgagtactattacattttgatgcacattgctagaaaatcattatattaattacttaccacatcttctcttacgttcaccattctgctctgaccactttgatgtttggattagttttttaccgatcgttctctttgtactttacttaattcctaccatggaaataaaaatacgtcagctactagcacttgtatttaaaagttttagtacaaatataattagtacttgaaatttaggagttaggcgactttgaacaaatttcaaccagtcatttttgtcgatttcaggatgctttttagggatgtatgccaaccgttgcaaatcattttttttctaatgcaagcataatgatgtccttggtcattctgttcttgaaatctttcattaacttcccactaatgaccatgcaactatgtttgaaatcatcataaactataaaatctgtctagttttaaggtaaataaacatgattggagtcaacatttaaattaatcaaacacaaatcaaaattctaacaaataactgcttacctatatatctttctaaattttatttttaagttcagggttgacctacttccaattttcataggacagcccaatcgtcatacgacttctaactcctaaagttaatacttgattggcatagtttctaccacaatactctcctttatcgttgacaaggagaagaagccttttttcttggtccatcaacttactaacttcgttcatctcaattctatctcgtttaggtatcgcccaaggattctctagtgctaggtccaaatctgaatctgagcctgaacctgcgtttgtcatatctacaccattaacaaataatataaagttagctataacagagcaactacataaaaaaaacagtatcaaaagtaagttataaaaaatagtaactacatatcatctacccccgcttccctaatggatatggatcattaactaagtatttggcatgccaatacgaagtagcataacttctattgaaacttcttaaatacatatgatccttaatcatagtaatattttctttatatctattacaacaatctacacatggataataaatacgtttgggatttttgaaattctttaggaaaaactctattaatgtatcgaattctacttgaaatcgcagtgtgtctctctcctcaggcatttatgatttatctataacaaaaattctaacaatttttttttagtatttagtaactaattataactagttactacttacataatgtaactagaattctcacaattatttttatattaatttatatattactataattcctgttttagtctagtatcatatttattaaattactcattttaaatattagcatgataactagtaactaattgtatatagttactagttatataagttgtaattattaactaactaatttcttacaactagctattaattaactaattatttgtgttatgcgtaacactttttttttttttaatatttatgcatttttagtaaaatttatcttaatatcaaattttcagcaacataacgaatataattagaccttcttaaaaaatttaaacatacctaaaataacaaacaaaacaaataaaacaatacaaaaaaaaaataataataacattaacaatacaaaacatatccacccatccgaccgcagtacatgtattcgtagaacctacttcactatggttgaatatttaagatactcaaactcaactaacatgtacattattccactcatccgaccgcagtataatatatcgtaaatattcaaactctactaatattgataaataattaataacaaaaagttagtgaatgtatatacatgtataacaagctaaaatttgatcaactctaaattattcgaaaaccttcaaaatttgctcacaatctacaatataatgaaatacaatcaaattaaaattttagttatttaactacttactagctatatcatttatgagtaacttgttactaataaataaatacttagtaataaaatatataaatatgaatgaaaaaaagtaactagttactatttagtaaattatatacatgaattttttaaaaaattacatatacatacatatataataaattatatctcacactaacaaaattttaaaaatatcatttttaaactaattaaaactctcagtacaaaatatatatacacacaatatataaaatatatatacacacacaatacacaatatatattgtctaaacaatacataatatatatatacacatatatttaataaaacacaaaatacatacatatatactatataaatttttactttatacttattctgacaaaaatttggccatcatgcacatacacaacaacataatgtaataaaatgaaaaaatcccaaaaaaaattacaaaaacaaaaataaagcaatgtacattactaaaatgaatagaaatcatatttatattttaatggacgttgaaatttaacgttttctctactaaaatcggtggtcggagttatacccaccacttttttccaataggttcagtttacagtgaaataggggaaaaaccaaaactttttgggtgtataagtttaggcatcgaaaataaaagatttaaaaaatagaataaaatggtataaaaatggtggagataataggatttagggtggtggttggcgagggtttgtggtgatttctgggctggtgtggctgctgtgtatatcgtggtgaagaagaagacgaagtgaggatgatatgatgaaagggttagatatatacccttatggcatcaattatttgaaattaaccgatgccatagtgtaaaaaattacacgtgtcaagattctatttggcatcgattatttttaaataactaatgccatagagggaacttctcactcttcacaatcctgattctaaaactgcctctaaatgtactccataaacgatatagctatagttttaagaaagcacaaaagcaatacaagaaaacatgaatttcttagcacgaaagcacgacataaaatacaaatttaaatccataaaataattttttatttagtaaatcatctactctttcatatacaggtactttatttaaatgtatttttatttagtaatgcatctactctttcatattaaaatatgacgcgaacataatttttcttattgagattatggtgaacatttcttttttgcttaaaagaaattatgttgaacattatgtacaactctatgtgaaaatttaataatggaccacatttatggtgttattaatttaattattaaacatgtaattgtagttttttttaaactaatctgaaacaatctatttctgctttaaaatatagaaagtaatttaaaaagtacaaaaaaattgcatttttataggcatgtttaggcctatttgataaatatgagtcgtccatttcataaaaaataggttggaccgtttaggcccggcacgagtccgacccaacacgaataatttgtgcttatgggctaggcttagcttactttgaaaacatgggctaggcccagcccaacctattttataaaacgggtcagtccgagctcacatacaaaaagtgggcttttataaaaatgggtcgggtcgggctacacgaatgtacaactttactggcatctgcttatccaatttcggttccgccttgagcatatgactatttttctatagaaaatgagagctacgacttgtgacaagtaaaattcatactttgatacttcacctattcggcaaggtggaatatcgacaaattagccacaaatcaggaagttttgaatctacctgattttgcggaaaagtgacaccttcaagaaccggtgaacgacttcaccaaaactaagaaattgactaggtgatgtcaagatatcacttaggcatcaaaaaatacaagtttgggacactttttcactcacacaacttctaggttgacgtcagtatgtcaacttgggcgctgggtgttgaacaaccttcatataatagtcataactcccttaatattgatctgattgattcaattcagcttgacttttaaagatctttccaagctctttcaagtcatctatcacacccatatattaattcggaagttcaagtccaaaatttgtccccaagataagtgcaatttttttcgcgaattactcgaaaacggtccaacggacgagatttgagctccaaaaattgacaatcatcatcagaagtcatttttaccattagatcatcaacaatggacaagatcaatctaaaaatatttttccatattttagtaatattttatcattattttaatggatctcattccttataaaaggagagctccacactagctcttttttcacattcaactaagtcctcataaggtcatagaatctctcactactttctctgtatagaaatttaacctctttccttagtcaattctcttgtaattttcgtgagaaataaaaacttgaaatagacataactccatttccttcgcgatatgaggagtgaactactctaaattctgcgtctctcttcaatatttacttgaatcattattcatcctgccaatctagcaagctagtgttggccatttttcagcatcaacaatgacacaactcaaaaatatgccagcggtgtcccaaaatctcaaccctccaagcttagataactggatatgtacaatcttcattaagctcagctctcactgtggttcagccttgtctttgcctttaactacacatagaaacatatctgtgagtcgacagactcagtaagaaaagca

SEQ ID NO: 16056 - DNA, 9117 bp, Cannabis sativa
atatatgttagtttgataatcatccattgtgaattttctaatatgttaattaatgaggcctattcaactaaaataacaaaatgcaaactaaaaagctagttatcttttcccaagggacaaaagaaaagcctggtcatccatgaagtagctgaaatagataagaagttcttactcttcatctgacaaataagggcctccatcaaaataatcacctaaatacaaaatcacgtcaggcttaaaaggcatgatagatgaaagaaatgctcgtcgcatgaataaatcagtgtagaactgagccatttccaaagcaaatgactttggagcaagattgagagatgttctatccatgatctgttaagcaattaagagattaattctttggtagaggaaaagcagaatacttaaataataaaaacgacgcagcgaacgtggaaatatgattacctgtggatcagtaataacagcaattttgacaaaatcatgctgaattgcttttctatttatctgaatttgcaattgacaatgttagtacctgggcttccttgtctccaaatatgcaagttatttattgttattgatgttattttttcatatgttgggtaacttggttagattacaaagttacaacaacaagatccattccaattctaatttaagatcacatgcacttgctagtgttcatttgagaaactgtattagccaaatttggattagtgatttccctgtatggaagacctgccctgtcttcctcctagttttgctctattttggagcatgaatgaattttccccttaaataaaaaagttttattttttttctttgtttttgctatacaaaaataaataaattgattaaaatggattaaacaaagaatgccaatcaatctccttgaataacgccaagcttaaaataaatgctatgaatactaattcataattataagcaacgagaaaggaaatacttgatttttgcttcttaaataatgttcttaatcaagtgcaatcattgagcttataaattattaataataaactttaggtcgttaggtaagtaaatccagtgttccgcactaacgaaggcaacaattgaattgaaagaatatacaatagaaggcaaatattccacacgtatgttgtctacaagatagatttttattttcatttcccaaatgggattaagaaaatccatgcctttccaaaaatatatacagatacatttaatatttaaaccgatgaatttaagatcgccaataatataactcctcttccaaaatttaattttcattttgattgaaacggataaaattttgaacaatcctccaaaataaaagacccagatccgaaaatgaagtaaagattcaacctttaagaaaaaatcaaaaaataacttacagttgaattaagatggagatgaggccaagaacagctccatagagatggcacccaataggccaccatctctccataaagaagagtcactgcccatatcacacacagtagactcgtcagctctcgttgcttcatatctcttattttttcaatttctccgttattttttcgcgctccaagccttcttattattcccacctcttgttcttatttttctattattttctttttatttgggcaattttgccatttccaatttagttggtctggactttggaaactaaaagtcaaagtcttgaaagtgatgccctttaatttaacattaatttttattctatcaggtaacacataacacacagtgacaaactacctaattcagcaaaaaataaaacaccagaaacggcacacatcagagaaaaagcatttatacccatttaactatatataaggactggtgatctacttcattattctcttttttttttttttttttgctgaaaccaaatacttcattaaaaccagaaaaaaaagccaaacagatcagtcacgagtagcaacaaggggtgctacttcccctccacaaagaaacctgacaatgttatgggacgcagcccaagcagccacattgtaagcaacagcattatccttactaagaatacaaaacacacagcttttagcatcaaaattcagacaagaaaataaatacaaaaacagattagtgaaaaatagaatagaattgggtttattcggattgtaaagactagaaccaaaactagtttgtacttttgtaatattggattctagtttcgtatatattaaaacaaagaaaaaaggaaaattggtatcttcaaaagtgaacttatatagggacccgttactgtcttggaatttgccaagaaaatagaatatttcttttgtgcatacaaatatttggcagcagcataaaaaggttgaaaatctagatgtacacaagttatgagggaaattgtgctcttttatgaattgatgatgacttcctagtcataccccttttatcaaaaaatttgaagatgtagactcccgagttataaaccaaatcactcgatcatagtttcatcagagtgcttcaaaatagtataataaaatcaacaaaaacatacaggtatattgatcaatctgcactagttacaaaaaaaaaaacaagataattctgtgcaagtatacacatatgaacttaggatggggttgaagcaatttcccttcactgagccatattttgctgctgatgacggtctgttcctatattttttagccagtcaacaacatccttaatggttggtctcttgaaagggttgtggttgacacacatacaagctacatcaagtacctgcagcatctcatcatcaaatcctttctctcttagtaaagggtcaaagacttggtcttgctttccctcttttctcatctgctgaacccagccaaccaattctcttgacatccttggcttgaacacctcaacaggcctcttcccagttagaagctcaagcataacaaccccaaaactgtacatgtctcctctcaaagtggccacccatgcttgaccgtactcaggaggaatgtaacccaaggtgcctacaagctctgttgaaacatgtgtctggtaaggaaggatcagccgagacaatccaaaatctgctacatgggcttcaaacttcccatcaagcaggatgttgctcgacttgatatctcgatgaacaatatgtggttcgcatatttgatgcatataagccaatccaaagcttgcaccctgtaaaatctttagcctagttggccaatctaactgagatgggccatcaggcttttcatgcaaccaaaagtccagacttccattttccatataggaatatatcagtaacctgcagccatcatgtacacagtaaccttgaagagaaaccaggttctcatgttgagctgttgaaagggcttcaacctctgctttgaattccctttccatcaaacccaaatctcctgagagcttcttaatagccagtgtggtcccatctgctagtgtagccttatagaccaaaccgaaacccccacaacctattatgttggcttgattgaagttgtcagtggccttgaagatttcagctaaactaagatccttgatgtctttggtattgtttggaaacaatatgactatgcttgcatccttgtcaacttcaggagtaaccgcaaggttggaattgttagaaatcgtatcgaaatctatcttgtcactgtcacctcgaggaagtattcttcttgtcgataaaatccacagagagagtagcacacctataataacagaagcaccaaaacaactcccaataatggctccaacaagaagcttcttatttgtctttcgactatgatgaagagttgaaggtgattgtgaagagcaagagcgttgcacagatggaagaccacacaaccccggatttccatcaaagctagagctcggaaaagtgtcaaactgacctccagatgggactggaccttgaagatcatttgatgcaacactgaaatatgacaagaaatgcagaactttaagtgaagatggaatttcaccactcagatggttcttggagagatccaatctctctaaattagtgaggctagacatttgatctggtatggtcccagtgaaactgttgttgttgagttccaaaacatgaagaaacttcagttggccaatctcagtaggtatagagccactgagatagttgtgacacaaatatagggctggaggaagactggagagttgattatactgctgattagttacattattgggcataacaaacacaggcagctctagaaaactcctgttaatcggttcagactctcctgacaaagcttgcaacccacaaagctccttggggaattctccagtaatgagattagttgacaagtctaagtaaaacaggttgggaagcttaccaaaccatccgggtataggaccagctagaacgttaacagacaagtccaaaacttgaagcttcttaagccttgaaagccaattgggtacttgaccagagagtaaacaaccaccaaaagcaagaacttgtagattttgaaacccatcaggttctaaaaggtcatcatcttgaggcataagttcagacataaaattctttgagagaaccaaagtagtgagagtcttgatatcctttagaatcttaagtgccacagtgatatttgttaggctgttattagagatggaaaggaaagagagtgatttcagctcaagtatctcaggagagatttcccctctgagttgatttccggcaagtctcacagcggtcaatgtcttacatgagtaaagggtacgaggtaactcccctgtgaaattgttattgccaaggtccaaaatggtcagcctctgcaacttggagaaatcaaagtcagagagattgccaatcaaagagttgacccttaagtttaaggtggacaaattagtacagttcattaaagataagggaataaagcctgtgaagtgatttatgtggagaagtagcttatccaaactggcgagattcccaatatcctcaggaattgttccattgagctggttagaataaagctcgagaatcctgaggtttgtcagttgaactacaccggcgattggtccagaaaaatggttcacagccaacgagatctgttccaaggtgacaactttgtagatttcgtctgggatcaaacccgtcagattattaaaccctgcccggaatatcttaagcttggaacaacccccaataccaggagggaagaaaccattaaactcattagaggagaagtctaagaactcaagagatggaaccaaattgccactagtgcaaaattcagagacagggattgaaccagagaagctgttgttgctgacattaaagcttgtaagagtggccgtaatcaccgaaggcttgaacaccgaaatgggtattgacccttcaaagagattgctcgataagtcgaccgtttcgaaggcacctgaaccagaagaaggtagtcgcccatggagtcgattataactcaagtcgaggagtttaagacggtttagggaggaaaagaaatcagaaggaagagaacccagaagggaatttcgtgagagattgagttgggtaaggtaggtgaggttcttaagggtaggaaaaatgatgcctttaaggtttgaagaaggaagccatagacgggtaacgcggtcctcaccagccacgacctcacaaccgattccaacccaagaacagcaatcaacggactctgaccagtttagaacaccagaaggtgacgataaattcaaagaaaaagctaatagagattccgtgtcgtctatgttgcaagaacttaagccaaaagaacccatcaaagttggcatcacaaagagaagcaaaaccagtaagaagaagagtttacgaccgagactgaaactgaaaccaccctccatccccaaaaagaagctctttttatcataagaagaagaagaaaacatggcatgaagttgtgtaaggaggtgaaacagagtaataatatgtggtgtttaatcatgacgatgatcagaaatgaattgaatcagaagaagagaataagaagaacccatctttcgttttggtctaaggtagtgagttattgttgttgttgttgttgttgttgttgttgtttgagatagtaatgaaggaaaactccattgactgaagaagaagaagagaaacaaaaatagacatagatggaaatggaagtgacgttgatggaaaaatgttatattaatattactaatgaattctgaaaaagcgtttactttggttgtgggcggctggtagtggctgttggaccctttcttagtcgatggtggtggtggtcgtagtagtggtgaatggtgatgatgaatatcatgataataatctatctccattaccatttgcgtgtgctgtaggatacccttctcatctcaaagattttgtttttattgttttatttattataaaaaaaaattgttggcaatttttataagataaaaaaaaatgaaaaaataaagttggcttttatgacttttgacttctcacaaagttttcttattatattaaggcctgtctctctctttgtcttggggtgaaggaatgtgatgccatagaagaaaaaaaaacatgaatcttaatattgtattatacaatcattggtaggcaaataaagagtttttaggctaaaaaaattaccaacttggtgcgggtttatgataaattattgaattatatacttatattaaattttttgcccacatgcaattttttttttaaaaaaaaaaaaaatgaaatgcaatccaactagctatacaattgagtttttattttaattgtgaaaagcaaatgggagagtagtgaagaagactagagtgaattttattttatttgagtgcttttaatacatttacataaaatgttaccgagttgtttgtgaaagagactagagattagaggttatgatttttttttttgaaaaaatagtttcaaaaaacactattcattagcaaatagttcaaaggggcggaggatttattaaaacatggcatcaatcaaaataaagtttcaaatataaaaagaataatcaggccaccaaattgtgcttgcagtagctattaaagtaaacttagttaaataatcaactactacattaacagttctacaacaataactaaaagtcacaatattgaaataagaacataaaattctaatattgtcaagaattaaactcaaagaagaatctaaagctaatgaattattaagtttatgaactaaagtttagcaatcggagtcaagttgaatattgttgatgtcgagtgtaatgcattaagatacgatatttcaaattgcaaatatctctacaatttctagaacaataatgccacaccttccaagtagcagaagcaagcacattaccatcagaatttcgaatcaccatgcctaggcccccactgcatctaccaaatcgatagttgtgtctgagttaactttgaacaacccatggggagggggaactcagcaagggaccacgacatcagaattcaattacaaaacttcgaggatggttaatgcagcaccgttgttatcagtgtggtaggcaaggagatagtcgatcgcccaaggactatcaagttcggcagcaacgacttttttttgcggactttctttgtttcgtcactcacaatggcaaatgggtcgccaagattgaaagagcaaaattttccgaacttgcacaagttggctacatccccaaagagcatgatgagttgtttccaaataagtagagcacattgggcaaatattgtcattgaggaggccatgtctttgaagattaatcatagtagggatccaactagataataatctccaaacaaagctttttaccttagaatgtaaattaagtttccaaagccaccaagaagtaccagaagaagaagcgatggattcagttatatctcgatagccaaccaataactacttttcactaaataaaatccatgcttcttaagactatacacgagtttatctggagtatctcccaaaagtcaaggtataaataaaatggctaaagcctcctcgctagagaaactattttgaactatgaaaaagttccaaccatgcaccactagagttccgaatatcagacaccaaagcatcaacgctcaaaccaataagagtgaaagagataagtctcgtagaaagtaaaagccaacaatccttaaagacgaaaattgtagcccccattgcccacagccaaacagcacccaaatcaaataattctttattatttttcttgcattgtcttttataatattttaaagagtgtctacacatttggtatcatttgttttatttaaatacaagttagttaccctatatttttaataattcttatttagtacctgtattttaaaatcatacatatttagtactttaaatttatttatttttattaaattttatcaatataataaaactgtttaaaatttaaaaattttgaatttaaatttaattatttgattacatataattgagatttgtttggttaaattgataaaattgtattgaataaattttactttagataaaaatacaagagactaaatatctttttcataaaaatacaagccacgaggtattaaataagtatattcctttatttattttaaattctattttatggctgttactttctttctgagtttgacagtatttattgaaatttttcaaaaagtaaaactatattttccatctatgttgttgaataatcttcatttgtcattgctcggcaaattatatatagatatgaaatgaacaaaaagaatgctcaaaataatcctttatgcagtctttatcaaacaaattctactagaaaacaaatgatgggtgggtgaaataaaaaaaaaaatgtatagaaggagcaaaagtctaagcattttatttactttgtgattctcattttggtgaataaattaatattattgggttaggatatcttacaattgaaagaaataagcttattttattaatttagatggtgtttggtaatattttttcaatcagttttttttcttttaaattaaaaaagtgagaatatttttaaaaacatattttataaaacaacctgtttttactttttaattctgacccaaattcaaatccgaccccaggcttagaccagacttaaataaaataaa

SEQ ID NO: 16057 - DNA, 3719 bp, Cannabis sativa
tatttatatatatcacatgtgaccacatgtccacaacttaattccaaaataaaaagcattactcactttcattatttctccaaaattatgacattcatgacaattgtactgatttattctgtagctattatatatatgagagtgagctagctacccaaaggactatgactattagtacaggccattaatttgttacttctcacagtaatgattttggtccaaattcataattgataacagcaatacagtcaatactattccttaattattattgcaaactaattgaaaattctatcttccacgataccattattaattagctttgtctaatgataacagaaagttatatatgaaattatttaattaacttgtttgtaatacatgattttagtgtgaaaatgcaaaaataaataaatatagcaggtggtactactgtggagaattaatatgtcatgaacagtaattaagtgggtggcatttgaccgttgaattattagttctgctctcttctactcggtagtatgtataaaagttaaaacccttttgtaaataattatagtatacactttcaaaaagctgttacttgttgtacattccgagctttttaattattctatttttttttaatcataattatatatattatacagatcaaatgcaataaaaaatttatatgataaaaatatatatagagccttttagggtgtgtaccctaaccattaataatataggtacatattgatcatatgtgtgtggccactcccccgattgaaataaagactctcttcttaattctgagatgggttcagggtgaggcagtaagagagagaaataacgaaaacaaaaccctaggaagttagctacaaatgggtatcttttcttcaacaaataagctcttctttattgactgttccttttgtctccctcccttgcctcttctgcaaaacactcccaaaatattcacaaaaaaccaaacccatattcctaattcccatgtcttatatgataaatattattcattgcagtttcagactactactgccctccctgccttgttaggtcaatctcaattgggcctctaaatttaatgaccctctgctctgcacaatttccttacatatattattttcttttcttaatcatatatgttgtaaattataagtttattattatttacatcagggtaatttaaatcccacactgacaaactttttccattggtgtaaatgacattataaaactcctatctaatatatatagagaaatattaaaaaatattattagtgtttaacaccctctgttattatcgctataaatctaattaagtatcaggtttgatatagtttaatgtaatatataatttttagagagtaaagacgatataaatagtatccaataacaatactcatatatatatatatatatgagaattgctaaagagcactagtggtgcctaacaccttactatgtgtcaatatcgctattggttcaattaattatcgagttccacataatttaatataataacttttaggaagtattgctagccaatcgcaacgtgacatgtcgagaaggtactaagcaccactagtgcttagtagcaatgctctctatatatattagcagtagtgcctagccctagctagtgtaattttgctgataaataattaaggtgtcttggtaattgttactccttaataataataagttcaattattaaactttgaattaatagtaattaagctttagtataattttcatgttctcattattactaacaaacaatcaaggtgatcataacctgacatgtacttccctaaatcattatattacagcaacattactcttatgcaccagtactaataaatagttagggatatgtttaacatgatatttaattatagtagtgatataacaacttgtagtagtgttagacactattgaagtttacgactttgatcaggatttaatatgtagtgtaactgtttgaagtttcccatgctgtgttttttcctaattattatataatgtgtattaataattttatgaccatagtaatttaaccacaaataccatatgctaattgtactcatttgtacttttttttttttttttgacgttttactcatttgtacttgtttgtgtattttcaattccttcatccacaattatcaccaatccaaaatgtaaatgtaattatatatataaatgttaacatttataattttattccaatgcacacactaacatatcctaaaatgcaaattaataatataaaaacaattcactgataaattaaatacctaaaaactaattatatattgacaatattgtatatagaaatgtgtatattaaaacttataattatctggaaaattattgtaattaaaaaagcagcatttatatttttttttgctacatttgtaacatttgagtcaaatatccaaaatgctatatattttatgtaaaatttggtacaacttgtagtgacaaattctcggcacaatatttagtggattaattattggagagctaatttattgaaaagtgataaattatagcattatacactactttaccactaagcatttgctagtatactagtatttggcagtagtttttaaaagttttattaggctaaactaaataaataaatataaataacgatgagaaagagtgaataaaaatacttaattacattgtaaaatctgcttctgtttcgttatacatatgagggttttagtgagaaaagtttgtttggaatgcatatggatgaagaaaggcagagtagttagaatacatgtgcatgtgattttaagtatgaatattgtactagtgtttagttagggctgggctgggccatcatgaacaccttacgacttacgtcacgccccaatcctcatctcagttttacatccatatagcctaagctccaggggaccactaataatacacatacttaatttagactactatatattattataattttaaatataaatattcttattgcagtttttaggtttgggtgtgtttagttgtacagtactggtacatgcatcataacttaccctccctatttctattacacgcaaatcagccccatttggtcaacaataggttggtatttggcacagaatttacatatttatagcttatatataattaattcaaattacaatttgtgtgtgtgtgtgattcctgattcgttcaaaaaatttaaacaacagtgtgagatgatgccagatctgtgttattatacgtatgccttaattgcccccaccaacgccatatttttccttactaattattatcattcagatttaaacgagttgatttaggaatagcaaaaggaagaaaactaagctcacacattacaggattgggatggcaagaagaggcatcgttacattattattagtttttgatttaacagaatcaatttcaatgctaattaactaattacaactaattaatgtccaataattaagttgtatatattttaaagtaatttagtatatctttattataaacacaaagcttactaataatttcgatttgatgcatgcatataattaattgtttgtaaggagctgcaatattcggaaaaggagacatatagggtcgtcaatttacaatcttgttgctacacagtacacgctgccacaagtgatcaagactaatggcctgttcagtgctgtaatatatatatatatata

SEQ ID NO: 16058 - DNA, 14118 bp, Cannabis sativa
aacccacatagaaatcaccggagaaaccactttagaaaccgaaaccgtaaatttgaaaaaaaaaattaaaaaaaagtatatggagtaattctcctttattatatacatatacattaataataagaaaaaaaaaagataaatactagctaacacatataataactagaaagaatttttgcccctcacattattatattttagcatttatagtatattttattattgatttatgaatatgtggtattataattttaataagaaaaagaacaattaaaaatacttaaataataatatttttttttttataaactacaaaataaattatattttaaaatttattttcaacttatgtttcgcgacgaacctatgaaaatttaccatcattaatgcaaaatttaaataatcaataaatatatataattaaaaaattattaaaattataataccacatattcataaatcaacaataaaataaacaagtgttagaatacggaacggaaatagtcatattatttccgttgcaaccaatgtaaagtttcttatacgtttacatgtttatttattgttttagaattattcatatttgggatgttagattatagatttataattaaacatacatgttaataaattaagatcgtggtaaaataagttctgacatagtggacctccgatcatatggattgaggctcaatcaacatcacaaaatacttctagatagaaatttagagttgatttaagtagaagaccatagtcaagtgtcccaactatgtacttaagaatccttttttgtccagtgtgcgagcaatggctgctgcataaattgacacattttgttaacacaagattcaagttaaggttttgtgatagtggcatattattgtaaggctccaacaatagatctataaagagtaacatctttgaaaggttcactatcaagtggagagtttgagaccactatttattggtgtattttttgtgttaacattttgcatatcaactttgtagagaagatcttgaaagtactatgcttgtgaaagtaaaattccatctggggtccttgtaacttgaatacccaagtaatctactaaaccaagataccttagagcaaagtagaactgagttctgcaatgagctaattcacaagtgtgtcatcacttcccatgacaagaatgtcatctacatagactaagatatagatgcaacccgatgaagtaaccctgaaaagcgaagattgatatcctttggagaagtgaaagccatagtgcagcaagattgttgataacttctcaaaccaagcccgcttcaagccatacaagactttgttgagcttacatgcgaattttatatatacatatgtttgtaagtgcacaaattgacaagtaataatagtggtcaagaaattgatatcgtttcatagaaattaaaaataattaaagcaattaattataacgaatattaaaacttaattttatctaaacaatcaatttcgaatgatattagacaatgaaagagaatagaaagaacgagaataacaaattaaagttgacaataaatagtaaaagcaattgtaaacaattttaatttcaccctaaattaactttgattttaattagattcagtacttgttattactctccaaaagaaatgaacaagggttaaagtacttttacatatttatttatcgttttagaattatttatatttaagatgttatattatagatttataatcaaatatacatgttagtaaattaaaatcgtagtaagataagttctaacatagtgaacctcctattatatgaatttgaggctcaatcagcatcacaaaaatacttctatagagagatctggagttgatttaagtagaaatatgaactcttaatttattcaaattcttaatattaatgcaataaatgtgagactaaattaatggaaaaatgtaattgaacggctaataatattaaataacaaaaataaacttccttcctaaattcaacggcggtggaggtgttaaatcccagagaatgtggttgaggttttatgacataatttgcttattattattattattaagtacgaaatcaatgttggatcaatcccaggaatgaacaagaattcagggtaatcttcacactctcccccttccccaccgcagtccacaccacttctccttcctaactcctaccaaatcatcttctcaaaccttcctcaaggttggtcttttctcaaacaccttacgcttgtgaacattttattgatttatagttatggggggagaaattatggcttcagggaatggccttacttgcttccaccaattatatcctccacttagttgtatgcgtggtttccagcattttcaccattctttacatcctcattcagctctgaattttagccaaaagtatcccccttgtgaggtttacatggtttctatgtgggtacccaagtccaagattccttggacaagtttcataaccgggtgcataagggtgaataattcacttcttgttcggaatagagtttctactattgagagtgaagaagaggacagtgatgaattgaacccaagtgagaaattgggatttgaagttgaacagaaattacctccttggggaaagttagggactttcaaagatttagattcagaacctggtgatttaaaggagcccaggtcagtttctgaaggaaaggttatgttgaatgtaaataaagttcattttttggaggaaactgatgaagaaactttgtcaaagagaattttggtgcttagtaggaccaacaagatcagaagtgcattggaattgctcaggtccatggaattatcgagtctgtgtccgaacttacatgcctgcaattcagttttatcttgtctcttgaggaatgggttactagcagatggccttagagtgtttgagttcatgaagacaaagaatatgaccacaggacatacttatagcttgatactaaaagctgttgcaggtgctagaggatctgatgctgcccttcaaatgtttagtgaaatagaaggagattgcaaagctatgaatagttttgatacaattgtttacaatacaatgatatcagtttgtggtagagcgaacaactggtttgaaacactgagattatggagaagtatgaaagaaaatcatcatactgaaacaagagtaacttacagtctcttagttagcatttttgttcgatgtaatcagaatgaattagcccttgatgcttactgtgagatgcttcaaagaaaatttgaaccaggtagtgacacaatgcaagctataattggtgcttgtgcaaaagaaggaaaatgggattttgcattgaatgttttccaaaacatgttgaagagaaatgtcaagccaaatcccatttcatgcaatgcactcattaattcacttgggaaagctggggaggtcaaactagcatttggggtgtatgatattatgaaatctttaggccattcaccggatgcatatacatggaatgcattacttagtgcactctacagggtgaatcgacatgatgatgctcttcagctcttcgagaacatcaagcaagagaaagattctcagttgaattcgcatttgtatgatgtcgctttgatgtcttgctcgaagcttggtttatgggagagagctttgcagcttttgtggcaaatggaaactaatggagtctcagtttcaactgcatcatataatcttgttattagtgcttgtgagacagcaaggaaggctgatattgcagtgcaagtgtacgatcacatggttcaccagaagtgcatcccagacacattaactcaactttccatagttagagtttgcatttggggttctctctgggatgaggtggaggatatcctgaaagtaagtataaaagagtttttgttgtctatgtatttttgcagttttccaatcaaatttaagcctatcgttttgcttagttaaattgtaaccagatttcagacataggctactaagcataaatcaacctgttgagcttgagcgtgatttagactctcaatgactcaaaatgttgacccctttcaaatattttattgtctttgcagcaggctgcaccaaatgcatccctctacaatgcagccattcaaggaatgtgtttaagaggcgagatcaatttagcgaaaaagctttatgcaaatatgcgcagctgcaaccttcaaccagatgggaaaacaaggaatttgatgcttcaaaatttgaggaaaaaaagctcagttagatacaaatctagacgagcttttcctcaccgaaagaaggcgaaattttctttgatgtcattgtgagtgtaaccaaacatcacaaagcagagaaagcaaattaatggagtctcagtttcaactgcatcatataatctcgtcattgggatttgaatcgagtacgcatataattaaagataatttgatcatattgataaaattatatttatcaaatttgagttttggttacttaatatatatacagggtacacattactgacaacaatgttaccaaatttgtattttgataaaacataggtacctaatgatgagtacacacactagttttaatctatatatgtgtatattttgaatattagttttaattatagttctcttaaataataatgtgcttaactctcacaccccgtctctggcgtcatgtattttcttatgtgctcatttggattgttctttttattaggttgattatcccttggtaactcttcttctctgtcttggtgatatacccttatggatttccatttcaggtgataagttgtatgacatgaatcattcaggacaagacccaccgctttatggcattggattgtcttcatcgagttttgaggttttacctgagtgtccatgccacaaatcaggcttcgaatcgtatatgggaccacttagacagtgtaactcccaaactattgactgttctgcgaaaaggaatgcttacccaggatgtccaacatgataaacttgtggagttctgtgtgaccatagcagaacacaatcttgattatgccatcaatcatatgattttagaaccgcttaagcaagatagtcttagtgaaggaaaggttattgctcttcatgctttgcttgcaattgtcatgtcgccatgaagccaatatattggcttggaaatatttaaaggcattaacatattctgtcattaattctagttgcttgtcatttattgttttgttgtcttcgtcttatgtctattgtttaagcaggtcacgatattggtcaccatattccaaaggtgaaggctgccattgagtcaattttgcggtcttgccataaattctatagtcaggcacttctaacttcttcaaagactgctataggtaatttctctgctaatgtagggcaagtatagaaattttaaggaaagtttagttttacaatttagatattaatatttattgcatgatttaacctatgtagatgctgtccagcaaactggctgctattggttcaccattattctttacgaccattaagaatggatgtccttttaagcttatctgctgcaatgtttagttgttgtatactttcaatcagttgacattagttttgaatctaaaatagaaaagcaatacttctgctttgttttgttcttccaccaccccactttttgttttctcagtaattgctttcttattttctaatgggaggcttgggttgttgaaaacttgtagaataatgacacacatacatcatgaagctgttaatttatttttatttgttttgccttttacgctgctgtgagaatgcatactgagataggctaaaattaattatatgctttttagatttgttaatttatttatttgttttgactcttactgtgagaaggcatactgagctagactaaaatcaattatatgcttttccagatgctgttacaaaagaaaaatctcaaggatatctctttcggtctgtgcttaaatgcataccatatcttattgaagaggttggccgaagtgataaaattgcagaaataattcctcaacatggcataagtattgatcctggtgttcgtgaggaagcagtgcaagtacttaaccggattgtaagatatcttcctcaccgtcgatttgcagttatgagagggatggcaaactttattctgcggctacctgatgaattccctcttctaattcaaacgtcattggggcgattgttggaactaatgcgtttttggagagcctgtctaattgatgataagttagactatgacactcaagatgcaaagcgtgtgggacagcttaatgagggattcaaaagatcttcttttcatcgatcaggagaacctattgaatttcgtgcatctgagatagatgctgttggtcttatcttccttagttctgtggatagtcaaattagacatacggcattagaactactacgatgtgttcgtgctttaaggaatgatgtgcgtgaactttcatctcgtgagctagcagactatacttcaaaatatgaagccgagccaatctttatagttgatgtccttgaggagcatggggtaggacattattcatctttacatgttctttcaagcaaaaactttgtattgatttgtaaatgaaaccaacattttgtccttgtaattttttctggttatttacaggatgacattgttcagagctgttattgggattctggacgtccatttgatttaagacgagaatctgatgcaatccctcctgatgcagcacttcagtctataatatttgagagccctgataagaataggtgggctcgttgtcttagtgaggttgtcaaatatgctgcagagctttgcccaagttctgttcaggaggcgaagtaagtatatatttataaagtttgcacacaatcttggcttgttatctttgctcttcatatctgcagatgctataatatattgtctatattttcatggttagtggctttctgtcacaatttttttcagcttgccataggttccttattcctaacaattgaagcttttgggggatgattagtataaaatggcgcacactaaaagtgcagagcatggttattgtaaaggtgtttggtttcatcctatgcatgtttggtccaatgctgagtgttttgttgaaaaaaaaaatcaaaagtgctttatagcataccaactttgaaacaagaaaaggtgttggcatttaatatatttcgagaaataattacataatttaggacttttcattcgataagaaatgcttgggaaatttgtcagttatgctgaaataatatacatttatggtctttgcattctcctttcttcacttccttttctagcatggttgaaatcattcagaactagtttttgtaacagaaattttatttgcaggatggaggttatgcaacgcctagcttatattacacctgttgagttgggtgggagggcccatcaatcacaggaatcagacaacaaactagaccagtggctcctatatgctatgtttgtatgttcgtgtccatcagctgctggtaaagaagctggtggtgcagctgcaaccaaagaactttaccatcttattttcccctcactgaaatctggatcagaagcccaagtagtaagtgtttgttaaatggatacatatatttctcagtataatctcatgtacattgtgttcagatggttgattaatttgacattattttatttcgaagcatatattatacaaaccattgagtttcttataatttttgagcactcagtagtggtggttctgctggtcaagaatatttaatgttcctttccttgctagggaaagttatgtgaattaacattattattatttaatggctatagcctgtatttatcaaatatgctcactttaatgttacaatcagacacttggttgactggatttgattatgttttgtcatcttatgggtactccattttaattttagcatgcagcaactatggctctgggccactcacatttagaatcatgtgaaatcatgtttggcgagcttgcaacttttattgatgaagtttcttcagagacagaagggaagccaaagtggaaggtatactttattattatgtgtgtaaaatgtcctatttcttgatgaattgactaggttatttcgcatgctatatatgttgtttatggaacaaaaactaatgtcaattttctggttaacatagaattcactattcaatcatcttccatcgtaaacattgatgatcttagagaatatcaaatgccattttttttttcctttcctttatttaatacatgaggaaagaagttgcatacatgaatgacttgtaaggaagcaagcatttgcaaagtcttgcaactcatttgatgaacgaggtgtggaaattgtttagacacttgaaaatcccctaaaagtaaaatactgtttgcaactcgttaagtttttctccttttcattatttcagaggttacatcaacttgtttcattggaatgacgtacttataaaactagtattctcttcgccttttggctttcttcatttcctctattttggttacggtcattatgacaatgcttttaacttgtggatgcagagtcagaaaggacgccgtgaggagctccgtattcacattgcaaatatctatcgagctgttgctgagaatatctggcctggcatgttggcccgtaagccaattttccgtctacattatttgaaattcattgatgagacaaccaggcttatactaacagcatctgctgagagctttcaagaaatgcagcctctccgttatgcacttgcatctgtcctaagatcactagccccagaatttgttgaagcaaaaacagagaaatttgatgttagaactagaaagagattgtttgatcttctcctctcctggtcagatgatacaagcagttcatggagtcaggatagtgttagtgattatcgacgagaagtagatcgttacaaatcttcccaacatgccaggtctaaagattctgtagataaattatcattcgataaagaactaaatgaacaagttgaggcaattcagtgggcctctatgaatgctatggcttcactcttgtatgggccttgctttgatgataatgcaaggaaaatgagtggccgggtcatatcatggatcaacagtttgttcattgagcctgcacccagggctccatatggttactcaccagatccaagaactccatcttattcgaagcacacagctgaaggtgctcgtggaacttctggtcgtgataggcataggggtggccatcatcgtgtatctctagcaaaactggctttaaaaaatcttctacttacaaatttggacctgtttcctgcgtgtattgatcaggtaaacattcaactttaaccatttttcttcttctctcctgtttggctgaaactttgggtgctgtctgcggtcaaacccaggagagaatgcagtgaggcagtgcctcctcttcggtgggatgattaattaacaatatccacaactaggatcagctagtaaattttagggcttaatctggtaagctctggagaataattgagggctagcataagagcttctttgattgattaaacatgtgttggtgtaatattgaggaaaatcatctcacggccaactcctggtctgatgtgatggacagggttttcatgtgacgtatggctatatttaacagagacaaatgaagagttaccttctcctgattgcaacagtcttaactgcaaagcagtcttgcagtagacaaaataaaattagattcatttttatttaatgttaatcttaggagaatacaatcaatcagtaaattttgtccttgtcagaactttatcaagccttctcttgggatgcttcaaacagaattgctgtgggttgtttttattttattccaaatatttgccctgggattttaaaatgaaagttcattatgtgatgctttgggttgaattgttttgaaactttaaaattgtgtatctttctctaaatattccggtttaaatcatttgtttggttgccttataatctctggctgttgtataaaatcaaataaaatatattaaaaagttctggcctttgatagcgtctcatagctaacataagttttaagaaatgctggtctgttctttttgagaaaattacaataatacaaaatgcttggttattttccttgtttgtgactaattgatttttatatttgatcagtgttactactccgatgctgctatagcggatggttatttcagtgtgctggctgaggtctacatgcgacaagagatacccaaatgtgaaatccagagactcttaagcctgattctctacaaggttgtagatccatcaagacaaattcgtgatgatgctcttcagatgctggagactctttcagttcgcgagtgggcagaggatggcattgagggctcaggaagctatcgggctgctgttgttggtaaccttcctgattcctaccagcaattccaatacaagctctcatgtaaacttgccaaagatcatcctgaattaagccagctcctgtgtgaagagatcatgcaaagacaacttgacgcagttgacataattgcccaacatcaggtcttaacatgcatggctccatggatcgagaatctgaatttctggaaactcaaggactcaggttggagcgaaagattgttgaaaagcctttactacgtaacatggcggcatggagaccagttccctgatgaaattgagaaactttggagcacaattgctagcaaacccagaaatataagtcctgttttagatttcttgatcacaaaagggattgaagattgtgattcaaatgcatctgctgaaataagtggtgcatttgctacatacttttcagttgcaaagagagtaagtttgtatttagcacggatatgccctcagcgtacaatagatcaccttgtttatcaattggctcagaggatgctggaggatagcatagagccagttgttccagctgcaaataagggtgatgccaatggaaactttgtcttagaattctcacagggacccccagtagcccaaattgcctctgctgtggacagtcagccacacatgtcaccattactcgttcggggttcccttgatggtccgctgagaaatgccagtgggagcctcagctggagaacagcaggtgtaacaggacgaagtgtgtcgggcccattaagtccaatgcctccggagttgaatattgtacctgtaaatacagcacggtcagggcagctacttccatcacttgtaaacatgtcagggccattaatgggtgtaagaagctcaacaggaagtttgcggagccgccatgtttcaagggacagtggagactaccttattgacactccaaactctggcgaagaggggctgcactctggtgttgctatgcatggagttaatgctaaagaacttcagtctgcattgcagggtcatcagcaacactcattaactcatgcggatatagcactgattctacttgcagaaattgcatatgaaaatgatgaggattttcgagagcacttgccccttctttttcatgtgacatttgtctcaatggacagttcggaagacattgtgctagagcactgtcagcatttgctcgttaatttgttatactctcttgcaggccggcatttggagctgtatgaggtggaaaatagtgatggagagaacaaacagcaggttgttagcttgatcaagtatgtgcaatcgaagcgaggaagtatgatgtgggagaatgaggaccctacagttgtaagaactgagcttccaagtgcagcacttttgtctgcattagttcagagcatggtggatgctatattcttccaaggagatctccgtgaaacttggggagctgaggctttgaagtgggccatggagtgtacttccagacaccttgcttgtcgatctcatcagatctaccgtgcattgcggcctagtgtaactagtgatacatctgtattgcttctccggtgccttcatagatgcttaggaaatccagtacctcctgtgttgggatttataatggaaatcttgatgacattgcaagtgatggtggagaatatggaaccagagaaagtgatactttacccccagcttttttggggttgtgtggccatgatgcacacagattttgttcacatttactgccatgtgcttgagctcttctcccgtgtaattgatcgtttatcattccgggatagaacaactgaaaatgtgcttctttcaagcatgcctagagatgagttggatactggtagtgaaattggggacttccagcggacagaatctaggaataattatgagcttccaactactggtggacctttgccaacatttgaaggagtacagcctcttgtgcttaaaggactcatgtctaccgttagtcatggtgtttctattgaggtgctctcacggatcacagtgcactcatgtgactcaatatttggggacaccgagacaagactcttgatgcatatttcaggcttgcttccctggttgtgtttgcaactgagcaaggacctggggcctacttcacctcttcaacagcagtaccacaaagcttgctctgttgcagcgaacatttcagtctggtgtcgagcaaaatcttttgatgaattagctgctgtatttatgtcatactctcggggggagatcaaaactgttgataacctactttcttgcgtctcacctctcttatgtaatgaatggttcccaaagcactcagcattggcttttgggcacttattaagactactagaaaaagggcctgttgagtatcaacgagtgatactgctgatgctgaaggcattacttcagcacactcccatggatgctgcccaaagtccacatatgtatgcaattgtgtctcagttggtggagagcactttgtgttgggaggcactaagtgtgttggaagcacttctgcagagttgttcattaacaggttcccaccctcacgaacagcctggatcatacgagaatggaatcagcggagttgaggaaaagatgcttgctcctcaggcctcattcaaggctcgcagtggtcccctgcattatagcatgggatcagggtttgggacagcttcaacacctgcacccctcggatcaaatgaatctggaataccgcccagagaagtggctctgcagaacactcgtcttatcctcgggcgtgtgcttgatacctgtgctttagggaggagaagggaataccgaaggctggtacctttcgttactaatattggtcacccataaaacctgcaatgccaacttctaattatttatgttggtggattaaatataacccagttttggcacgtgtgttgttgggtaaaaaagttttgaggttgaatttgtatatatattgtagtgtgtagctaatagagtaatttattgtacagttgcagcagcatatcttgtatctcttatttttattagacttttgtaatttatgagcttctattaactatggaattgttcatttaatcaatatctgacatccccatatgttgtatatagctccatctcaggttgttttcatccaatggaaatggacccagaggctatgttagtgtcatcagatcacaagcagcttccaagggattgatagaacttgtactttctgaactgtcagtacaaaaataaagttttccccataaatgaggagaagatcatggaatattcaagtgaatcgatgggatgggtagtataaaaggactactagagaacaattaaaaatggcaagagatatgagtttggtgaggaaaatggtgattattgaaaattgaagaaaaatggaagaaaaaaaaaagatacaacacgataacgcccacataacatgtgggtagacgctaaagaaaaacttaaatagtaaatagttatagaaaaaagtattagggggtgcgttgtagagtttttaaaattatattttgaatttttgtaatttaaatagttaaaagatatacttttaaaatgttgagattatttatgtttacttcaaatatttattttgtttttatacttttgttagtactttattagttttgtttttgtactatcttttatggtttggatgccttttatgacttttgtgtcatcattatggctt

SEQ ID NO: 16059 - DNA, 16608 bp, Cannabis sativa
  modified_base (2970)..(2985): a, c, t, g, unknown or other
ttaacggcaaaaaaagttcatgagacataatttaatatatgtcaaaattcgagagggaaaattactaattagcctaaaaaaaattagtctaactattgactcaacagttcataaattagacaaaaccaaaattctttttaaactcgaataaaattagggtttgggggccataagaaaaagaaaatcattcgagtttgagtagtaaggatatgggatgaaaatatcacatgctttgacttagaaaaaaccaacaaattaaagacaatatatagtacttgtgttgcttgtgccaacctcatgaccattgctttttttcttagagtgaaatgggtcctcatccatacccacaatcactagctagtggttattatgtactctttaacataatataaatatatatatttattgtatatctcctaaatttgtttgcttcctcatctacttgccttgccttattattttatgtgatctaatggtctttccctttttgattattgatgatctcgaaatcacatactagttatacactaaacaatattactttattgataatttaatttttagtcacaaaaaaaaattaattatgactaaaatatagtatttagatataaattatcactaatttagtttttagtcacaataaatattgtaactaaaaatacttttagtcacaataaattataatttttgtgactaatatatttggtcacggaccttttagtcacaatgtaataataataatttttataattagtcacaatttttttaaaaaaatttagtcacaatttttttgacttatagactattatttttaggttaatttaaaaaaaacgttgtttatacgttacagaaatatagtataatgttgcggtaatatgaaagtaacgttatttctcctctaaaaaaatatcaccgtaaaaatgtcaaaaaaaattaatgtgaaaacatgaaaaaaaaatgcaattttgagtactttgtgtaaattttcctttcatttggttatcgacaaatgtctctcaagagtttccattgttaataaaaataaaataaatgaattgatgatcataataaaatataagaaaaaaatccacctaaaatatagtttgaagagcatgacctaagaaaagaaaagaaaaagtaagtaataataaataagaaaacaaattactagtattttaaaaaattctataagatttatctcattttttgttgatacctttccaatttcataaaaaagaaaaaacatgataaaattttatccttttcaaatcttatcttaatttctaaaagtaaatgtaagctagactttgtaactaaatccaaaaatacatagtaactatttggttcaatgacaatgtgatagttacttagaataagactaggaaactaactacacaagttataagacaaaatgggtgtcttttgtttttcttatgagaaaatgggtgtattttgtttttttatgagaaaatgggtattttaatttgatgcaagtggtggtaacagggtcggggcatgaactaagacgaattaaatatgcatttagggtccacctaacttaggagttcaaaaaaaatatattttttttaaaagatatatattagtagtttttaaaaatattatatattttaaatagataaattcaataatttttatttttttaaggtcgatttatttttagggccagtcttgagtagtagacactagaaatgaaaggttgtttacccaagacaacaagacaaagagaatcctctttactatggactattgtggttattactaattattattctataactaataaaaagaaaagaaaagaaaaatcttcattgccttttcttttttgcatctatcattttctactcaaatgtgattgacaaataatttggacccacatgcttgattacaacctgcaaatttccaatggtagagtttgagtcactttttaagaaagaatatctctattccactaaaatattatcataaccacccttatttagacaaaagaaagaaaaaaaaaatagaaggtaaaattaatcaatggtcaatgataaggggtcaatacctaattgcctatgcacttagcaagtgtttttgtcttgtaaaagcatctccaaaactccaatggagtatttaaatagtgtagtgttatattttaatagttttaagaaaattagttttctaattgtgtattaaatttgacccatacaaaaaattatgttaaatttagtacacaataaatgtaactttttaattagcattgtatcaatatctttttttaaaaatatttaatttatttatgattattaataatattttatttttatcataatttgcaacataaaatattattgtgcattggagcacaataaccaaatattatagcaatttaacacaatatttacatattgtattcgtgatggcctaactttcaaaaataagtgtatcctaaaaataagtgtattggtgtatgtttttttttttttttaaaaaaagcattatatagttttagtttatttatatatatagtaatgtatgttataactatttaagataaaataatttataatttagttaatagggtttaaacagtttcacacatatttataaaataacaaaaaaaaaaaacacttgtaaattattctgaatttttcaaaatatgtaagatattttaaataactataatattcactatcatatataaaaattaaaattataattattcacatattaatagaaatataccgatacactccttttcaagaaagcactctataattttttctataataaatattactcacattgatcaaaaacccatatatttttcttttcaaaacttgaggaaaaaaataaaaacactttttcttactactcaattctatgcccttggaccatgttgattgagatacttcaaactgaattttaggtaaggtcttgtggtgaattctctattattattattattannnnnnnnnnnnnnnntattattattattatatcagtccaatgacctttctatcctagtataaattatatgttgttagattcaagaagaaaaaaaaagaatagatctaaaagaaaaaaatggaacaaatatacatataaatatacatatctatatacaaatcaaagatgagttttggtacacttcccaagagttgctctgttcttcatccaaaagggtcttcataaatcaacttattataaagccaaggtgagttttttcttaaaggatattatttacttataaaatgttttcttaaaccaaactctttttttttgttttcttatatatttaggcacatatatataagtatgaagaagatggaaaagaaggagcatggtgattttgatgatgagttagaagaaaatttagatgaaataatggaattagaaagtgatgagttgggaagtaatgaatcatggagaaaacaaataacatgtagaggagtaatagcaagtgttgtgattggtacaatttatagtatcatagctatgaaacttaacctcacaactggtatggttcctcatttcaatgtctctgctgctttacttgcttttatcttcatcagaacatggacacaacttcttcaaagatttggttaccaatctaagccttttactagacaagagaataccattattcaaacttgttcagttgcttgttatagcatagctgttggaggtaactactaactagtaactagtaactaaattcattcattcatcttattcttttctcttgtttcgatctcgtcttcttcttctgtttctgttattagggttggcaaaacgtatcatcgtatcgtgttcgtatcatattttacgtgatctgtttctatatttcgtgtcaggcgtgtcgacctgttttttaactcgtgtctaattttctcaaccctagcccaactcgtaaaaaattgtgtcgtgttcgtatcgacccactgtgactcatttcgctattattgaagctagaattgtagagaaaaatgatagatttaggttccattagaaaattaaaatttttaaaatattttcaatttcatattaaaaaaaaattaaatttaaatttttaactcaatttcgaatcactaaatatatatttttatataattatattattattaataatttttattttattatatttaaaaaaaaatcatgtcgaacgtgtcaaatttgtgttaaacgagtcgtatcgtgtttgatccgttttggactcacgtctaatttttccgattctaacactgtaaaattcgtgtcgtgtttgtacgccgtgtctatcaaaacccattttgtcactcctatttgttataatttttgatttgtaaagggatttgagcctataaaactcaagtgtataataaagatattcatattactcattaaacatctgtgaaatctatcataacatatggtgtgtgtggattacaggtggatttgcatcgtatttattagggttaaacaagaagacctatgaattatcaggagtacacaatgaaggaaactctattaatagtactaaagaacctggcttaggttggatggttgcttttcttttcttggtttgctttgttggtctttttgttctaattcctctaagaaaggtacttttcttttcattaatcttgttttgtagttataattagttcatgttaaattaattattgatagttctaaaagccataatcattattagtgtttgggaagtgtcacttgtcacacacacacacttcatattaatattatatatataaattaaatttctaatcatatgacttaattgataataaatgagaatctttagaaattaataaataattacatagtattaattgatgtacagataatgatagtggatctgaagttgacttacccaagtggattagcaactgctgttttaattaatggtttccatactcgtggggataaaatggccaagtaattaactaaactctctctcttattttatttctatagaaaaaaaaaatatttttctatctcgtacacgagtaacatttcgagtcacgtggtaccataaagctaattgacagaggcagataagatataagatggaagatttttggagtcatttacctccctttaacttttcatttttacccttaaatattttaattctatgataaatttctattttcatctccataaatattatttattttattaatactcttttaaaaaaaaaaaaaaaatctacccccactaaataatgtagctagctcccaacagtttcaaaaattattatgaggtcatttttacctctccttaaatttttacaaattaatttttgccccaaaaaattcacatatatatatattttcatttttacctttacatatttttattttattcttataaaatttatattttttatatttatctcacatagattaattttattcttactaaatttataaatttcgtttttatacttattaaataatgtagctggttctgtcactggtcaaaattattataaagtacaacaattttataatatcatgtaattcgagatatttagtacaattatatttttatttattattgaaaaagattgtttattttgataggaaacaagtacatggtttcttgaagtatttttcatggagttttgtttggggactattcaagtggttttatagtgcaaatgaagaagaatgtgggttctcacaatttccaacttttggcttacaagcttggaaaaacacgtaagtattcatattcatataaataagtttatacttaatacaacaaatttgactattttttgttctttttttaatatcattttcaaataattacaaactaaaataataataataataataaatatgatttttattctcaaattattatcactattagagtgtaaactttaaaaatttcatattgtcaaaaattaattctcatagtgagatttcttttagtttttctcctatgtgacaaacagagtaacaaaaaataaatattttttttcttcaaaaaacacaatttgaaagtgataaaatttagaaaaaaaatacaaaattcaaaaccgcacaatatttatattagataaataagtaatcattatattcacatcgaaactcaattacaaacaaagtgattaaaccacaaagtaacaattaattacaagctcatatgaacattcccactcaattttaatctattctattaaagctatgtatattcagatattgcattctcataaaaaaaaaagaataaataataacttttacaacaaaagaactgtgttcctactattccatacataataataaaccaccgttgagattatagaaaggaaaatttacatggtatactaacttttatcatttttttacaaaaatactatcaagcggtatttttaacttttttactgtatttttttataagtttcatactgcaatatactatgttaagttttcactagtgttctaatggtgtttttttgttgttctactggtgttttgagttgttctattttgtgttctactagtgttttataaaaacacagtatttttgtaaacttttccgtgtgacagtatttttataaaaattatcccaaattacagtatgtatttttgtaagttttcctataaaaatcaacactttgttcaaaagcttcctctttttcaactcatttttttcagcataaattttgaaggttaaatatttaattttgttttgttttgtttgggtaggtttttctttgatttcagcacaacatatgtgggagcaggaatgatatgttctcacttagtaaacctatcattgcttcttggagctgtgatttcatatggtgtaatgtggccacttattggcaaacttaaaggagattggttccctcaaagtttaagtgaaagtgatatgaagagtctttatggttacaaggtctccttttctctttatcaatttattttaagtatattaatactcaaaaataatttactaattactttattgggacaggcttttctttctgtatctctcattttaggtgatgggctttacaattttgtcaagatacttgcttctacaatcatcaatatgcatcaaacattcaaagacaaaaataatccaggtaataatccaataataatgtttttttattattattattgaggaatatatttatttagtactctgttttgtgctttattttcaataatactcatctagtacttaatattttgaaattataccaatttaatatagcaaagataaaattagtcaaaaaattatatattttttttataataaaagtatattaattagtagagtaatttacggtataaatatttaaatttaattcctgattacaaatgaaatcctaagtttaatttttagcaataataagtacttatttataattttaaaatttctatagatacttggttgttaagtgttaagtaaattatcacgtaacaattcttgatttattctagattcaatataccaataagaaaatgacatgtagataataacttcacatttacaatcaagtacctacaaaatgttagttgtataatttaagtattattaccgtcaaaaattaaacttatgtatttatttaaaactaaaatttaaatttatatatttatcccacaaattactttaattactatgataaagttaagttcaactactaaaaatatacaattactagtctttccatatttatactttaagagcataatgaacagaggattttaattctatacaaagttgtatattttttttatatttataatcaaaaactgtcgtttcacgaataatatccttttcgctagttgtaatattgtatttttcatagtaaagttgtcgttttctcaaaagtatgtcgtttttcaaaagttgtcgttttctcaaaagtatgtcgtttttaaaaagttgtcgttttctcaaagttgccgttttacaaaagttgtcgttttttcaaaagtatgtcgtttctaaaaaattatcgtttcttaaaagttgtcgttttctcaaaagtatgtcgtttttcaaaagttgtcgttttatctaaagtatgtcgttttctaaaaagttgtgattctttagaaagttgtcgttttctcaaaagtacgtcgtttttcaaaagttgtcgttttctcaaaagtatgtcgtttttttagaaagttgtcgttttttaaaagtatgtcgttgtcgtcaaatcattaaaactcgtcgttttacgactgatatgatcattttcatcaatattgtcgttttcttctccttccaacagtaaattgtcatttacctaaatatcgtcgtttaatctcaaagttgtcgtttttctgaatctctgatcttcatcttcttcctcgtgatttttgattttgacagaaacaagagagaacaagaaaaagtcaggaaaagcagtagaagaaaagcaaaaccaaatcttcttaggagaaacaattccactatggatagccataacaggatacctaatcctctcctcaatctccacaatcgtaatcccaatcatgttcccacagctcaaatggtactacgtcgtcgtttcatacctcttagctccatctctcgccttctgcaacgcttacggaacaggcttaactgacataaacatggcttacaactacggcaagatcgcactcttcatcctcgccgccataaccggaaagcaaaacggcgtcgtagcagccctagcaggatgcggattaatcaaatctgtagtctcagtcgcatgtattctaatgcaagatttcaaaacaggacatctaaccttaacttctccacgagcgatgttcgctagccaagtcatcggaaccgccttaggttgtataatcgctcctctgagttttttcctcttttacaaagccttcgatgttggaaaccctaagggagaattcaaagctccttacgccttgatctacagaaatatggcgattcttggagtccaagggttttctgctctgccgcgtcattgtttgcagttgtgttggggcttttttgggtttgctgttggtgttaatttggttagggatctttcgccggtgaagattggaaaatggatgcctcttcctatggtgatgggagttccgttcttggttggagcttatttcgccattgatatgtgtgtggggaccttgattgtgttcgtgtgggagaagattgatgcgaagaaggcggagcttatggcgccggcggtggcttctggtttgatctgtggagaagggatgtggattttgccggcttcggttcttgccttggccaaggtgaagccacctatttgtatgaagtttttgagctcttaagagaatgttatattaatgggcttttaattgttgggctttttttatttgggctttatttaaggttttcataaatatcattttatttttagttttggggttaaatgattagttaaagaatggagttgaatgttaaagggataatgcttcacttgatttctaatggtatggtgttgtgactattcattttcttttttttggttcctagattataggtcaatcaattggataattattttacatatttcttaccaatacattatgaattatgctcccaatttatataattaaggttgttctttttaagggttaaaagattagttggagaatggaattgagggttaaaaggataatgcttcacttgatttgtaatggtatgattggttgtttctttttatgatggtgctcattatatttatagtaatcgtcttgaatgttttttttttaaaaaaaacgaatattttttcaaaaacagttaggtgctttctaaagttttattgctaattcgttcacaatgtttaagtggctcttaattttgttatgcctaagatgaacaaatctcttctatataaatatatatagacaaattcaaattgtgattaaattatatttttaaacatgaaaaaaatacatgttaatatgatgaaatgaaactaataaaaattacattaaaacaccaaatattaataatgatatcatatgtgtcctatcaaacaacaccacctatttattctaacattttcaaattaatgcatgtattattagtagagactagagtattacacatgccaattcaaatttgacatgaaaatgaagagtgcaactcattcttatttctcacgttgcttcttctccataactcatcccactatttaactgataataagatgcaaccaaacaaattttctatttaagaaaatgtgaaaatattcataaaagaatgcatccaaaacatcaaacacgtgaaaccgcttcaattgaaaaaattgtagcgtcattatgtgtaatgtaatgttttgtacatattttgagtgcacatatcattaattttgaaagattaaggtaataagaatcaaaatagtaacattatctctctaattgtttccaactaaacagtccattaccaattgaatgagtccataatggaatgagtttgagtttggtctatttagaaaggaaaatgcttaaggtatacagattgaagattcaaagtctaaataaacaaaactacataaatgtaacagaaaccatctgaattaattgaagaaataacaagtaaaatagacatgccatctcaaaaaatttgcaatatacaaataactctaagagaaagtaatcttagttcatatattattgtacatcgactcaacaaagttatgctataatacctgctagtacatcactcttattccgtgcgtagattgtgtaaactaggcggatcccgtcgagccacccgtcgagggattcccaagagtcagcaacctgaagaatcaatgagtaattaccaaaaaggactacacattagagcatggaaacaagcgtttctgtttagtagagaaaattcaaggacagtattactcataattaagatagaaaaactttagagacaaaaaaggcaaaccaaaaccataaattaggtgtctcgctaaagcttacacttgatcaaatgagaaaagatttggaagtctgcaatgttctattgtcttcatgactcggattcttttaagagtaacttttttcgtgatactcataatgcaatatttacgtataaaattaattataacatggcaagctagaaaaggcttctgtatcatcagaacaagttcgaactttgatatagaaactaattcttaccaaaaagacagttccctgaactgtatcgatgcagaggcctgcaccgggtggtaaagtcagatcagcacaagctgatacagaaacaatatctggaacatcaactctgatagcttttttgtccatcttggctgcatcgcctgacataccagacaagcctgatccttgtctttgatcacctacgctaatctaatgatatggaaacatagaaaaataaatcaaaaaattaaaaaaaaaaatcctgagaaagaaccaagaatgataaaaggaaaagtgatttgcgagtgtatactgttggataattttagtattttataattttagcataagatacaacactatggaatcctactgtattttttacctgttgaaggccttcgtgattcaaaacaaattgtgagcgtttccactcattatgaggtgcaatgggattccccgcgggtggtgcagttagatacccaactttaagatagggtaaaggaagctgtaaaacaatttagttacccaaaaaggaaaaaaaaataataataataatatagacaaaaatatgccatagtgatgagactctagaaaagattttctagtcaagtaattaccatggagcgcacaagccgtaaggcactactataaacctgtacacaaaaaccagaagaaacaaatacttagcaaaaaagtgaaataagagaatagcaataaatgtacttaaaattgattacacaaatccattcattatcaaaggaaaaaagatgataattgtttctttcaatgcaaaactggtggtaaattaaggacggacgttaaaagaaaaagaaatcatgtggtacatacaccgtaatttggtttcaatgcatgagcagctgcaatgtatatagcagattggctgtacaactcatttggagaaacatctttgggattgccagatcccccggttcttagagtgtcctctgctaatccgtactgaaaagtagagctacataagttagaaatgttactaataagagagacaatttaggcttctgatgtttactgtaaatgtactgggcaaataatgtttatgttatcaaaatgtgcaagtaaaaactaaccagaacagttccaaggttgtaaattgctcggtggaaatcaaattgcaattgaatagctgcacggaactgcaataaaggatatcttaaatgtatcatagatctcaatgagatggtgatatttaatcgtgtgtccagtgtcatagatataagataataggaaagtgtttactgtcctattacctatggattcacccatcatactggtgcattaaaaaagtgttgtaccttactaatggcagttcttacaatcgtttgcttttctcttgcaggcacgattgcactcagttcctggatttttttttttaaattcaataaaaatatgtcaaataatccttaaatcaaaaagaatattgcctatcaacgagcacagcagaaacaacaaagtaaaagctctacaaatacaactcaaaataatagaaatacaaagtgagaagcggtaggggggatttcagtgaggaaataaaaaagtatgatttgaaggcatgcatatataaccaaacatacctgcagagcaagtccccagttattaagtgcctgcattgaatatcaagtacagtcaatgctagattatcaataaaatagtccaaaatttttctttttttttcctttttgaaaacatatttcatagtttaaaatagttaatgcatatacatggaaaaaaaaattgttcatacctgtgggctgttccaattaagctggacagccttttcatagttttttgtagcctgcaaaaagaaatgtcattatttgaaaacgaatttgcaagacaacttctaaaagatttgagaaaacagagatgggaaggttgaaatgacaacagtactaagttatactcaaacctgtttccataactcttcagcttcctttgtacggccacgcatttttgctctatcagatattgctatggcccaattataaaaggcctgcccagaaatacaacaaataaaattctaacttagttggataactacacaggcaataaaaaaaaaatctgacttgcacacgtaaatacatcagtatatcattccttctaagatgccaactttgtaatttacgcttatcatatgcaatcattgaatcaaatttgtaattatctaaatcataaatagcgaagaaggacaagtgccatatacaattattatagcaaataaggacaagtgaacttacatcatgaagtgttgggcaaaggcgagtagcttcatcatattttctacaagcttcctcaagtaaagcatctttagaaggtgaggtagcatctggactaacattatcagcactttcctgcataacaatttaccattctgtaaacagagaaattctaaatttacaattacaccaacgattttctgaatcttaaatttcttccccgagacatttaaatcatcacatattatttgagattgttaacatatctgatttgatataaacacattatattttatttcacctattttaaccttaacattgttccattactgatgaatgttccacttaaagagtaaaactagaccatgcccgaatctcaacaagaagatgcaaacaaaagtcctcatctaaagtatctcatttaatcaagcagaatgtatcaaaaactaaattttaacatatttcttctttgtatttcagagaaaacaaagaaagtagtcaaacctgaagaaccaatgcccaattgtacagtgcatcgtaatcttctggatctctctctattgcacttgcatacctacaaatagtgtaaagattacaattcaaaagatcggaaataaaagaaaaaaaaaagttgtcagggagaaggagacgactaaatggtttatggatagcatctcttttctaattagtacatgcactagtaattaatataaaaaatccagagtaagcctattttatcgaacatagggtaataatgtcctaagaaaatctgttataccatctgaatttcaaacaagtattaaattgcagcctagttaagttataaagacacagtgagaatacaaccagaagaagaagatgatgatgatagtacctcttggcagcaaatgtaagaactctttggcgtgaacgaccttcttcatcaacacccgtgacgctattaatcaagtccattgcagcattgttctgatctgtgccttcttgatgaggagtttcttgactgttcaattcataggagtaagtagacaaacttatctccagaaaagatatatgtttccacagttattttatataaactaaaaacctttgttatgacaaaattgaataaaacttgaaaactttcatcctccaaaaataaaaagttcacaaagagctatacagtactttctaaatcacacaagtgcattgaactcctacctaatggtcagtttggtaagccatatcagatcgtattgtattgcagtattatactaagttgtattgtatgtcatattattgtacaatatttgatttatatcaaagtaatgtatgcaaattcaacatagtactacataaaattatgacatataaaaaaattcaatatcatactatggaccaaatggacccttaataactcagataaagtgacccagaaaaacaatcttcaccaaatgagagtgtactgactgttaaaagcattaaatattccaattaaaccatttcctccaaaatcacaatctcttcaaaacttaaacaatctcactaaatttatctacattgatagatacaccacacacataccctaagaatcaattctaaaataaataaaatttaaactcaaattgagaattacagtaagaaagcaaaacctgtaaagagatgatgtatcattagcagtagaatcgttcccctgatcagttttgagaccattaagcaactctctcatggtgaatgttcgattcccttggtccttacgcagctcaggataaacagtctcttgtgtggcggagtcatcattggatcggatcgaggtttctccggtggatgcgttcaatttcggatctgaatcagcttccgtttcttgttgcgactccgaatttgattcagattgtggctccggtgttggtacagtttcaggttcttgaattggcagtggctcagattccaggcctccgttctgctgaaccggtggttcatcgtggtggtcgtcggacattgttggagagctcaagcttcgaattgtgaagagagagagagagagagagatctgtcttttctaacagaccaaactccaaagtaaataaacgaagcaataaccaaatacttttcatttaaataataataataataataattagtaattaactaattaatttatgggttttacttttaattattttttttcttttttgtaaattgtaatttagatgatggtttcataagtcttaattagaactcttgtctatttaatttttagataattttacggtaaaagttctcaaagagttttctttgataaatattagtcctcaacttttagaaatagcagcaaaagtcttaagtatttttttactttaaaagatttgaatatgagacattgacatagctagaattggttaagaattatgattgtgagatcttctaacattatagaaaagcaagtgttatagcgaatgccgaggacaacaaagatgtatcgagatgtaaaaacactatacagatgatcaggcttgaaaagtgatatagttgagtatgtatcaaaatgtctaacctatcaacaagttaagatattaaagtttagtatgactttttcatcctcggactgatgtctagtccaagaggactattcaaatattggaagatatgctatggacatgtgtgttggattttgaaggttcctagaataagtacaatcctctaattaagttttcatacaacaacacttaccagagtaccattactatgacaccatatgagatgttgtatgggagaaaatatcgatcacctattcactgggatgaagctggtgagtggagatatcttagactcgaggtagtccaaagaactaatgaggctattgaaaagaatcgagctcgcatgttcgtctcacaaagtagatagaaaagttacgcagatccaaagtgtagatattgaattccaagttgggaattttgtatttctctgagtttcaactttgaagggagttcggtgattcgcaaagaaattgaagctaagccctagatttattggtcccttcgaaatcctacaaagagcaggtcaagtagccctaaatttactaatcaagatgaagaatgttattgtggccttgtatatgccctagtgcaactcgcttattttgtagctcagtattatcatcgattgacctttgagtattggtagcggatgggatctcaaaccaggggtggtttgctcaattgcagtactggtagttccaattt

SEQ ID NO: 16060 - DNA, 5945 bp, Cannabis sativa
tattttattttattgctttagattaatctccactaccctcccattaagctcagttattttttccttgctgacagaatcttgttgacttatgtgtttttttgtgcttgggtatttatgtataaatatatgggtatgtgtgctcatacataacttcacaccttttttgtatttatcttaatgtatgtacgtagtgtaatgtatcgtatgagaacatgcctatattatttatttatttgtgtgaacagtgatgctacaactgctggcttggtcaaattccgagaaccgtacccatttggtgtggaccctagttggcgtggaagtcgtacagagctcccgttcttgaactctctcaaaatgaagatgtctattttgttgggtgtatcacaaatgaacttgggaatcattataagctacttcaatgcacgcttttttagcagctctatcgatataaggtgtctctttttgctgtgtctttgttgtttttctttcttctgtcttgatccaatttatcttctgagtgctgaccaacttttaaaggtaaacagaaaaaggtctgattcgtgtactgtattgttaggtaccagtttgtgccgcagttgatctttcttaacagcctgtttggatatctttcacttcttattatcatcaagtggtgcactggctctcaagcagacctctatcatgtgatgatttacatgtttcttagtcctaccgatgatcttggtgaaaatcaattgttttggggacaaagaccacttcaggcacaatctaaactcctttttgtataattgctttgctcatgtaattgtttgtggctaattaagcttttaatattgcagatcatattgttgcttttggctttaattgcagttccgtggatgcttttcccaaaaccttttattttgaggaagcttcacacagaggtatatacttaaaattggccagcattcatatcaaaatatcacattcctgaaatttgattaagctatgcaatcatctacacttttgacttcaagatttttcttagtcataaactactttgtcagctaaaatgtcttttactacgtaagagtattttagttgtgtcatcaataagtagttttcaaggaaagtttcactagatgggaaaattgcaacatctttgtttctttccagagatttcaaggtcgcatgtacggtgtccttggtacctcagagatggatctcgacgtggaacctgattctgctagacaacatcacgaggagtttaattttagtgaagtatttgtacaccaaatgatacactccatagaattcgttcttggtgcagtttctaatacagcctcatatcttcgactttgggctttgaggttcggatatgaattattattattttcttacaaattagactttctgtgtgatctatttcttcttacttagtatttgttacttgttttacagtttggcacactcagaactttcaactgtattctatgagaaagtcctcctcctagcttgggggtgagtttaaatttcatttcatttggtgctctgttcattttgctcttgaaacgtaccaattcaattatttttgggtatttacaatctagtaatattcactatgtgctcgggccaacgactagagtataggagattttgttcaccgattttagttgagaactgagcatatattgttgcctgtgctattgacaataatttgctattacacttgataacgacaggtacgacaattttgctatccgtttagttgggttaacggttttcgcctttgcaactgcattcatactactcatgatggaaacactaagtgcttttcttcatgctttgcgtctacactgggttgaatttcagaacaagttttaccacggtgatggctacaagttcaaacccttctcgttttcctccttaaccgaggatgaggaataatacacacctgtacagaagaaggaagatagttgagaaaaaaagctttaaaccatcagaagccgaaaaaactgaccacaactaccacctgtttcagttgactagaagaacagcctagcctgtttttctttaacatataatgatatgatgtcgcgattttgactccaacaaatgtaatatctcggctcgtaattctttggtgtattggttatattagtgtttttttggttacagttgctggtaatcttccatgtagaggtgttactttccttttaaattttcttagttatatggaaaaagaggaaggtaagggaagatggaccagttgtaaaaaggagctgggaattattatggtacataaaggcatatcattttggggaggaggaagattattattatagctatactttcatacacaaacaaatcaaaaaacaaaaacaaaagtacacaagacttgattttgtagggatttgtcttccaaatttaattttgtttttctttctcttttaaatgtttcattattgtagtagctacttaacaatttatttagaaaagttccattttgtaagaggatttatcattgaaagagttctggatttaaataaactttcttttgaatgtgcaatagactattgtgttgtttgttttttactctcaaaatgtagtaggcaccgatgaatctccatagtgtttaaagtttaaattatgttttatattataaattatttgaaattttcaaaactttacagaaaattcagattagagagacacaatcgggtgcatatgtgcactaaagctaccacttttggtttcaaggaaaaattggacagtgcaagttttacataaacttagaaattatgccactaatatttttttgatttaaaattatgtacaaaattacaccttatctaaacttataatggtaaataggggtataagtaataaaattttgagtttattaatttaatgtttaatttttacagcataagtatttaatgtttataaattttttctaattttttcggtataaattttgttattgtcttaaacaaaacacatataaaatttatattattgagtttagataaaatatagtattatatatttttaaatatttttttaataaattcaaaataaaataaagtttgtagtggtaacattaaaaaaaaaacattagagctaaacataaatattaatattctagtgaatgagacaagtgttaaagtgttaaacaatcgatattcgagtacttttacttggcaacaattgtagagaggtcactctccaattccattattattattattattattaatattattattatttgttctatattgttctaccaaagtaaagctgtattctctctctctcgaaaattgaatggaaaatttcagagaaatggaaactaaagatgggtttcccgcaatttgcagtagagagataggtttctctcgcccaatcgtcttcgctcgccgattttctgcttctgaggtcttcaaattttctctctttctctctctagttaattaactaaaatttgtttcacactagttgtaacaatttgatttgattatttatggtggtattcaaatcacgatagttatacatgggaatggaataatcaattttgaagctttattaaattgggattctgttttcttggattaaattgtgttgtaatgggaaaaagaaacaaaaacaaagattgtaatggactgataataatgaaattgaaataaggctagtttattgttttgttttgtttattgtttaatcattggatccccatgtgatcttttttttgttttgtcaaaaaaatcatttttaattgttattattttattgtggattagtgtcaacatgctcatagttcctcgagaatcaagaagtgttttaaccttaaaatcaacaatggattttggtggactcataaagacttttcttttatcataaatttttactagtttttaaatggtgtaagtaatggacttgaacatgacagttttctgacacagaaaatcattgacttttccataatttgctctcaacggaaattggatttgaaggctgatgcgaaatgagaaagtgggaaaatttcaacttattgaatgttttctttttttttttttgggcagcaattatccaaaaaatttacaagtacttttaacattttatttggtgggttattattgtaggttattgtgaagcagttgaatctctatggtaagctaaatggtcataagggctgtgtaaatacagttgaattcaactccagtggagatctccttgtgtcgggttctgatgacaagcaggttatgttttgggattgggcgactaagactcgaagattgtcatatgcttctggccaccatgacaacatattccaagctagaatcatgccgtttactaatgatcgtcgtgtagtaacttctgctggagatggacaggtgaatttggagtatttcctttgcaagtgtattcctttgtatttggcatcaccacttttgttagttttgtttagtttctttttcaattcttgtggcattgatgagtaattcagcagaatatagaaataaatcagacataaaatgtggttagatgtaaaattacctggtttaggtagattctaatagttttgcttccatattaaatggaatcatttctatgcagataaggcttggtcaggtcttggatgatggtcaagtacatacaaaaaagttggggaggcatcaaggccgagtatacaagcttgctgttgagccaggaagttcacacatattatatagttgtggagaagatggtcttgttcaacatgtatgccaaatatcttaatatacctacttgtggaatctctcattatattttcttgtagtttcagagtttggtttttcttgtgtgcagtttgatctgcgaagtagttgtgctacaacactcgtttgttgcacttcgttaaaagaaaacaacaagcagcttcaaaacagtgttataagtttaaatggcattgtaattgaccccagaaatccaaattacttggccgtaggaggtgatgatgaatatgcacgtgtatacgacataaggaaatgttggcaaaattcttcgaaggatttggatgaaccagttgacacattttgtccccgtcacttggtgaaggacaatagtgttaacataacagggctggcttactcttacacaagcgaactacttgtctcttacaatgatgagctcatttatctgtttcagaagaacatgggattaggcccgataccatcatcttccacctcgcttgaggccacacaggaattagaagaaccacaggttttcattggtcacaggaattcacaaacagttaaaggagtgagtttctttggccccaatgatgactatgtgttgagcggttctgattgcggtcatatattcatatggagtaaaaagggagctaaactcgtgcgcttaatgaaaggtgatcgacgcattttaaatcaactcgagcctcatccccacaagccctttttcgcaacatgtggaatagagagcagtgtaaagctctgggctcctatggaaaccggtgttcctccacttcccgaaaatgtacagaaggtactgtcttgcttaagttgcttttgtttttcagtaccgaaaaaggtactactacattgctgttttacataacatttttcgtttatctgtggttgtctggtattagataatggattcgaacagacggggcagagagaaccaatcaagggtggtcatgactcctgatgttatcatgcatttgttgcgtctgcagagaaggcaagcaatggtttacgttgaaagaagatacaatagtgctgataccgagagtggcgatgaagaaaatgcagagccttctggtttaggatcctctgttgactatggcaataccttgcctgaagacaataacgatgatgattcagatgaaagttccagggactgtaacattagctagatatatcatacaaactttttttgtgttgtaaatatacctatatatatat

SEQ ID NO: 16061 - DNA, 1860 bp, Cannabis sativa
cgttccaaacgagccctaacagtaaaaattaatgcaaaattgtaattaacttattacataggaaagtgacttttgttgcaccaaacttaataatgccattgttatgaggttagttttgttgggcataacacttcaaacaggcccaaaataagaataataagaagtgactttttttgcaccaaacttaatgatgctattgttatgaggttagttttgtttggcataacacttcaaacaggcccgaaataataagaataatcagtgaggcattggccttgtgataatcttgagtctcccctaatttgggtgccataaatagatagacgtaagcctctcttctcttcgccgtggcatgagcctggggccttttttttaatgcctccccctaaggtgggcctcataaaaacctttttagacatcatagcctagttcacttttctctccaattatacagtctcccatatgcaatatttgatggcccattccatcctaaaattttaactagcacatatttagcttcccacaaacaataataaaaatagagatttctattaaaggactacttattactactaaatatttaatgacaagtcactatattagttaggaattataccaagattcgcattcttcatgtcatgactttgttcacttaaatcaatttaatatgaaggaaatatcaaatctagttgatctatttaagttgggagctaccaaccacccaagctttcagcaagtgagcaaattatagtcatatttaggtcatgccatatgtggtatcaacaaagaaatcttcttttcttatatgttacaatagtgatttgcacaaaaagtacttagcataacaagcttcaaagtttcattttcaatttcaatttcaaaaaataaaataatttgtttttctttccccaaagacaactctaacatacttatctaaggatggtccaattaacttttctcgccaattatatggacacatcatatgcaacatttgatgggtcaggccacactaaattcttaataatcacataattagtaacgaacataagtaaatgattagatttctaataaataaaagtcgttacaagtaaacaaaataccataagcatgtacatagaaaaagtcaaattaagagcacaattaaacaaataagaaagctaaatatataaaaccagagtccactagactgaaaaccaaaaccatgtataatatttccttctatcctggtacggcataaacaaaagataaaaaagaaaatgcttttttgaaccaattcaaaagaaaagagaaaaaaaaaaaagttattctcccaaaggcatttctttcattagccactccatgctccatgccataatgttaggtttggacctatctttagaaagaagaaagaaaagacaataaaagtagtggtgctgatttactagctggcttaaggtttgaaatctaaagaatttttctggtgggactgtgctccaaattttacttttactggcattagtttaaatactgttaaatgcactagttgcaaatgaaagctagaattgggtgagtctcttatcagtgttctttattttcctctggtttgctgatttatgtggccttttttttaggggtttggctgctctgcccaccccaaaagtgaggggttattttttgttaacaaaaagtcgcctaggttcaaaagcatataccgcatgttgcagggccttaagctattttcaaatacttctggtttacaaccaaacagcaggaaatctgccatttattgcagcggcatggatgaaaaggaaatcaaaagagtagtagatatttctggtttcagcaggaatgagattccttttaaatatcttggcattccca

SEQ ID NO: 16062 - DNA, 1317 bp, Cannabis sativa
aaaagcatataagaaaaaagttagctccaaacaatatttcaaaagcataacatcaaacattcatcaccaattccaactaattatgtcatagcaatacaatggaaggaaagaaaaagtacaaaccaagttgccgagcttcctccaatgagagctccaaaacacgctttgcacgaggagtgaatggaatctcaacagcaacaaaaccactacctcgtccaataatcttttcaacctcaacacgagcgtctttaagattaatacccattgatttaaggaccttagcagctattccagttccttcaccaattagacccaaaagaatctgctctgttccaacaaaattatgaccaagtctccttgcttcctcttgggcaagcataattactttaatggccttctctgtaaagcgctcaaacatggctttggggacacatctggtagccttacgttgcttggaagataatgtaattgccaccttagaatgaaaatcctgcccaggcctcgttacagtatctaaagcattaaggcttctcagtcctgagaaacctctcatgctcaatccaggtgcttgtgtacaactcatcatcttcactgccctttttgactttccagaccttttagactggccctgctttagcccggccactaaaccaggaacattcgtcgactgaaccaaagcagccatgattaccaactaacacactgcattatatataacaaacaacgttagcctctttcaacacacaaaacaaaacaaaacaaaacaaaatcatggttatttactcacataactaccaagtaatagtatacttccctataatgttaactaaagagattgagcattaatggtttatttgcctagtttaactaaacgaggtatgagaatcataattcaaaactcatcaggtccagctcaaggcctagcaactataatgttttatttatttttatttttttctactgaagaattaaattgtgttaaataatttgagtaatgtctagtatatatccgtttacaaaaaaataatgcactcatgtcatgttattaattaagaaataagatatgattagattgagcttgagaataataatcaaaccacttatttaatctgtttagtatggaatagtttagtgttattgagaaattaataatattattatatctaatccatcatattaatatattttacaactacttcacacccactttagtaccatttttaagtaaacaacttacaagtaatcacaaacgcaatcagcaaaagcatggaagcttaaaacgaaatcccaccatagaacaaagctaacaaaaaaaaa

SEQ ID NO: 16063 - DNA, 5284 bp, Cannabis sativa
gtatccaaatattttttgacatgcctatgggttagctcaggttctacagaattttccattaacataatctaacataaataagattcatggttgttgtaagtccaacattaaattatacatacataaacaaacagaaatttacctaagcatacatcaaattaaacaaacaaagaaattattctcatatcaaattactccattagttctgcatcaaccatctcctcgtcgtcgatgccaccttcaacttcaccttctaaaagccattgttcaagctcgtcctcttcgtcatagtcatgcatgttcaaaccatcagagctatcccattgttcgaaaccgagctcctcaccacggcaagctacatgtaggaatggtctattccgagccaaggcatctaccatatctctatttacgatccctgtcacccccagccatctcaatcttggaaagtaaggcctcttcaaccaacggaatgaaagctgtgtgatgccgccacagttatatacatctaatagccgtaagctattgccatgccacctctggtcgtcgacttgcattgaggccaacgccatgactgaagtgtcaccaatgagaggacactgtcgcaatctcagttcaacaattggaatacgactttttgccagtaacaggattccattatcagagagatggggaagattggataggtccaactctcgcaactcggttattggacagccctcaaaaagagctgaaatgaatttatctgtaagctttttgcaccctctaacagataatgacacaagggactgtataacacttggtctcaagaatgataatcccatatcactaatatcagagccatccaacagtaaagattttagttttgtcagattccttatggctctaagggcttcatcaccaaggtttctgcagcatctcaagtcaagaattttaagattcttattagatgccaaactggcaactgcttggttagttaaaagactacaccatctcaagctaacgtgcaacaaggaaagtgaagtagcagaaatatcatgaaatattaaatcagttaactgagtcccatgggacaccttaagcttatatagcttggagcaggcatgaaatattgttttgaaacctgtgtcagtaacccgacaaaagcctccgagacatatgctttccatatccgcacacttatcagccattaagaggagtccaagatcatttactctcctgaaataggtagggatgaactcctggctccggatcaaagagagatatttcagttttccgcgctgattaatttgttgaaggccattgtttgtaaggtcaattgtaaggcttggctcaataattggtgcatctcgaaggtccaaatgggataaggagatgagacctttagaaattgtagcaaccattgtatcagtaatatagtccactgaaagacacaatttttgaatgtttggcaagatcgaaggttgaatattatttggtgattgatttgggctaagtagttcagtcatcattacagatgaaatgtagccaatctcaagagagacgagtttttctgaagccaaagcccatactcgagcaaagttatgacgaagaaacaatgacacatcaaacatgaggacaagtccctaccaaaatagtaaacacaacaaatgtgaggtgataaactaagagcaataaaacaaatagattataaattcataatatagaaagctaaaagatacattacacatgaatagctaataagatgagaaagagacttaaacaaagtatgattttaaatatgaatgaagttgaaacacgatctattttcatatcaaaggcagtagaaaccttctatcaatgtatatattaatatcaacccataagccggtttgttaaagccataagatggtaaacccgttaatgcaagaccaaccaagcgccaaaataactgacaaccactttctcaatccatcttactaatctttattgcattgttttggcttattattattgttatttccttacttctaattgagggcaaccaccgagtaactcttccaaatcagaaatatgtatagcccgtcctcgtttttcagccacggaccccaagaagagagatctggaggggagtaatggagacccattatatgaaataggaaatgaaaccaaaaaattcatactttagacgaactcaatactaaaatgaaaaacttccacggacaatcattacacatactcgaacaaccatacaagtgtgatgaatttggtagcagggagtagctaaccttaggtctttgcacatggttccaatctcagaaagcaatttcccactaaaatcagcgcaattaatcagagaaagctcctgcaaagaaggtctcaccaaagtctggatcgccgaatcatcaagacgattgcaatcaaccttcaggctcctcacgcacgggttcggcggcattagaggtctcagcaaatcaagcgaaggcgcaacatcctaaattcaaaagacaaaaacagtgattggacaattattttttttcaatactcgagaaatgaaatccgtaatgattttgaacggattgagaggataaagatatgtatttgagatcgagatagacatacgagaaggtgaaaagtgggtaggaaagaaaggatgtgagaaatgcaggaattgaaggtcttgcaagtggtggcgcaggagcagatggaggagacatcaagcttggtgaagatggtggccagtagagccgatggaagcagatccagactctcattctcagacccaccaatgatttcctgctccatcgccattgttccctgttttgcgtgcaaagttagaatcttgaagggatgattgattgggtttccagttacagttttgaccttcgttagttatcactagcaccgcatcggaggttgtagagtacgaagttgcctttggtttcttttttttttttttttttacaaaagaactccttgttaattagttaaattaaaagtttgacctatcaagttttttgttttataaaatattcctaaaatgaactttatactcaattttagtcaaatttgtcacaaaaaaatcctattttttttttcttttctttaaaaagttgtattattattcgattattgccaaaaaaaaaaaaacaatattacataaatattgtgtaccagccaattaaatatttatacagtccaagaaaaaaataaaaataaaaatacctcgtacaattcaaattgtattaaaattgtctctaaaaaatgaagctaaccgagacagaaggagctagacaacgaataagcaacaacagtaaacaaagaatactattatttcccatgaatcaacctgcgaagaagaaaagtatcaaaccaaaaattaattattatcgattaatgaacgattctgaaaaataaaaaaattgtttgaaacaattgaaagttttcaaagctcttgctgctatattaatggttcctagaggtaatgatatttatttaattatttcaataattcaattgaaatgtttttggttttaattatatgataattgaaaagttagtgaaaggtgttcaagaaaatcaaatattattttttgtgatgatgagttctacatatatggaacaatcttcaatgtctttgatcactttatttatatatattgaatacttatggtaaatgtccaaaacctcaccatatatcttctattaaatatgagtttttttttccatcttctaacttcaatataatataagaatctatctatctatatatacatatatataaaaaaaatcacttaattaagattactgaacacttaatgggtaaagcttttgtataattcataagatatggattgaattggaatagttttttcaagtagcatttagttgattattataatacttccatcatcatataaagaatcaaattctaaaatagaactacatgtttagaattataatttttaatattaataaatgaatccatggaatccatgttacgaattcatttcatatttttggtttgaaatgagcattcatttcaaattaaatatatttatttttaatataacatcattcatttaatatatataaatcaaattttataataattgaaatatataataaaaataatttaataaattatatatagctaagtgacaattacttaatatatatagatgtgataataatctcatgctactaacacaaagtgaaaagttagagaatcaccaaacttgaataagatttaatacaaccacttgaggctagcttaagtggccataggagggtgtgtgtgttggaggtcttaggttcgagttccagattatgcaatgtaatatataaacgcttaaataaaaaaaaaaaagattttatacctttatctaaaagtttaattccccctaccacaagcacttaggaaagaaaaaaagtaaaaatagcttttcgaatatatgaaacttatagtttttaacaaaatgctctttttttatagaaattcactagtgtatgcatatgaatcccttatgtctctatttatagtgtagatgaaccaaactttaaaattcaaatctcacactctctatggttgttatcaggtgtgtaagagggattaatggaggtcaaaaatgttggcaagaaactaagaacgtcccccattgaatgcccaacattttacaatgtttatctcaaaaataacttccttggagcaaatattttgaaccattgaaatacgttgaaaaacttcaaaaacactcacatgcatactataagtgacatgtcaccctgtaagaggcaacatgtcacttcgaacgaattttcagttctaaattaaggccttacgtctagtcttatttcccaacgttctatacacatttaaggctcgtttggtacgccgtataagggttgtattatattaaataataaataatactatgtttggaaaaaagtaatgtattatattaattattacgatcaaattttttaatacaatgtatgttgtattatttaatacataacaagtagttcgtattagcttgtaatataatatttacaaaggatttggggttaacaccaatctctgacccggacccggacccagacacagacccgactgagcacgaaattcaaaaaatcgaaaaaaccgttcaaacagacctactgaacaccattagaaccgaaattgccgaagcagaaaaccgaaaaaactgctaacggtaaaaccgccattgaacagtcaattttttttgggtaataaatcgaccgaaaaaactaaaattgagcgttatacatatatacatatatatat

SEQ ID NO: 16064 - DNA, 7603 bp, Cannabis sativa
  modified_base (6729)..(6736): a, c, t, g, unknown or other
gagaaagtgacatttttaaaatttaataactaaagaatacgacctatcacaacgaaaaaaacagaacagcagttgctttcaaaatgcaattagtcattcttatcaaccattaacaataaacaacaactacctttatctttcttttaatcttcttaacactttaggtattgttctctaattttcaaaattctagatattatttttatttatttattttacaatttttaacaatattcttattataacattaaaaaaattagcaaacatagcctaaaaaaactaagaaaataactaaatataacactaatctagtatatcacttaaaattgtatacatttatcaaaaaaaaaaaaaaaacttaagacgtatactaaccaaaaggtaaaattacaacaaaataaattataattggaaaagaaatttctattcaaaaaagaaaaaacaaataattggaaaagaaatttaaaagtgaaatttaattaattttaaaatattttcattattattttttttttttttgaaaataaatattttcattattaaataaggcaaacataaagaataatataacttatgattccttataaagaaatgcaaaagaagaaattcattgaaactgcacataaaagtacccaacaactctatattcgtttctgtaaaaataatggtagatttttttcttttttttttttaaatgtacaataatcatagacaattggttagtttgtttggggaaaaaaaatcagaagaaatatatagaaaattccacgtgaatgatgacgtcatccgtacaaatcaccggaaaaaacgaacctgcttctcttttgtgacgtggcagtaccccattcgtcaaaaccatacaatactaaacatcactagcacaggtctttcccttcccccctatcgatttcaattcagaccccaaatccaaagccctaatcccattccctaatcggcctcgccagctttgaaactcaaatctaaaccggccgattcgaatatagttgaattcactttaaaagtaaaacaattttttaatttttaattgatctcaattattaagcaaatatgttatattgaatcaatcaattattgttttgatacggatgtggtggcagagtatatgataattggaatcaaagaatagattttcatcttttagggatttgatgtgaatttaggtttgggaattgggatttttcttgggtgatatggttagagatggctcgtggggacgggtacgtggttccggcggacccgcaggccttggttgtagtgaagaagaagaacccgcagtcgtctcggagctgggctttggtggattgcagcggcgagtccactgttctcgatgtcgacaagtacgccattatgcaccgagttcagattcacgctcgtgatcttcgtatacttgaccctttgctctcttacccatcaaccattcttggccgtgagaaggccattgttcttaacttggaggtgctttatttctatgtattcgcttttttgtagttttattcaatttcagttcgttttgattggaagtatattgattttgggtgtttctctgatctgcgtttttcagcatatcaaagcaataatcactgctgaggaggttggtacttcttatggctgatttaagtagaaaatttagcttattaattattagttttcatttattttcttttgtttttatacgatctttatattctttctactattaatatacaatatcatgtaactgaaactctcttcttcttctttttcttcttctgttttttttccctttgaattgtagaaagaaagttaggctagacttagatgcaattaagtgtgaatatggtcctttttcttgcagatgatgattgttattttatgatgggataggttttgcttcgagatccgtctgatgaaaatgttgtacctgttgttgaagagcttcagaggagattgcctctcgtgaatgctataggtgataatcaaaacgatgggagagagtatggtggtggtaatcatgatatggatgctggtgaagaagatggtatgccatattatttcagttaataagtttaagtcaaagtttgttattattcgggctttatagtatattctaaatataaagctagatcttctcagttatgtttttatttggttgatgtaaatttagattctgctatgtagagtctccatttgaatttcgggccttggaggttgctttggaagctatatgtagttttcttgctgcacgcacaacagaattggagacagctgcttatcctgctttagatgagcttacctctaaggtttatagttaattatttcatttttaagtttgaatttttacatcactgttcttctatccatttttgctatctcatgatcctattcttctttatcatttaccttcaaacaatttccctcagattagtagtcgcaacttggatcgggttcgtaaactgaagagtgcaatgactaggttgacagctcgggttcaaaaggtatgccatgcctgcttcttgtggcttcacatatttttaataatacctttgtatttactaattaataaacttagatgtgttcttacttgtgctctgccatccatggtcattatgaatctcatttttatttgataaaaacatttgataaagataaatgaaaaattacaaagatggattagctgtccaaacatgtgacaattgagctaagtgtaccagacatgtgacagcctatcgtatatgacgatttatgtttttagagaaattatattttttctccagtttgaaagcatactgttgagattaagtaggagcaataacaatatcatcaaggactttgttatttggtggcaatcgtgattgttggtaataattgcaaaagcatccattaacttgcttcttcacagttgcgaagatagataaggcatgtcacataatccagtgtttttttcgcaattgcaggtaagggatgagcttgaacaactacttgacgatgatgatgatatggctgatctttacttgtcaagaaagatagtggctggtgcatcttcacctattagtggctcaggtcctgccaattggtatcctacctctcctactataggctcaaagatatcaagagctagtagagcaagtattgcaacaattcgtggagatgaaaatgatgttgaggaacttgaaatgttacttgaggttgtaaggttgatttgcgatttattttatttatgttttttgttccacgacttattctaaatttgtagtagtaatcttgcaggcttattttatgcaaattgatgggacattgaacaaattaaccacggtttgtgctttatgaacaataaacttttattcttgtcctgtataatgagttccattgtctcatagataaagcatttattttttacccagaaatcatagaattgatagtttatgatttgtacagtgttcctactggactaatccataaccaggatgaaaatgatggatgcattgagaaaaatcaacttatacagttagattacgagtcattacacgcgtatctgaacagagacatcattttttatttttttcaagtttgatgaatactagtttctgctgtagttatccttctgtatgtgatgtggtagttgttttcaagtttggatgtgctactgcttttgctcagtctactaaatgcttacattttgcagctgcgagaatatatcgatgatacagaggactacattaacattcaggtgagaaacttagacaaatttcctgaaacagactgtaaatacatttcctatttctaatcaaacttgtgttatgacttttgcagctcgataatcatagaaatcagcttattcaggttttctattcttctctgtaataatgcttgtttttatcaatgtgcttgtttaatattatattgtgtttcataaaatctacattttatgtaaatgcagttagaactcctccttagttctggaactgtatgcttgtctatatattctcttgtggctggaatatttggcatgaatattccatacacgtggaatgacaaccatggatacatgttcaaatgggtatgcaacctgtttctttctgctactactttcggttgcgaatttttcttcataattgaacaagctttctggtatctgcaggttgtcattgtgacaggaatagtttgtgcctttatgttcgtattaataatttcgtatgctcggcacaaaggtttggttggatcctgaatttagttgaacaccataggtgttccctccgactcgaacaataagtagtttggcttccttatattggagatggaatatttcagctgattttatctcaatgatataaagctggtttacataaaattgtcaaacaaacctgatttctctcaggattgctttcaatacaacataaaaaaacagtttacagaattatagcaatttcatttttcagttacttctttgtcaatttaatacttttcccccctaaatattaagattttgtatacatcgtttggcttctgtagtgatttactgttctatttaaaagaatttaaggatgaaaagtgacatttacaacagtaaataaaacgacatctcattcctcaaatttgttaaatcaacggttccatcaataaacaaaaataaaaataaaaaataaaaataataaatcgaacaaaattgtgatgactagtttaagttgagggagcatacttttcttacttatttttttttttttttttttaagaatggaggagaggtagtttgttttctatagtgatttgaatccttcaccattatcttagagcagtgctattaagtactaatactagtactgtttagtaccatttaaaggtgctatattacaattagttaataatattctataaataaattgaaaaaattacataatattattgatgcggcgtcaagtggtctaagaagatcgtaaaaatatagaggactgcaatgaattaattttgactaataaaactgcaataaataaattggacactagagatttatagtagttcacctcccatatcgtgacggtaatggagctacgtctacttttatttttattgattagatccgacacaccagagttatattctcaagagtgtgtggataaaaatacaacaaagaatttctaagtaaaatcttaatcgagacttatgaatatagaactcatgggagactcaacattcataaatcttatcaaagttggtggttgtaaggttcttgggaacaataaaccaataaagtagaaaattaaaggggtgtgtatcaatattgtttgaggtcttggtgtcgactgagtatgattgactcaatgaaaaagatgaaggaatatgtatgatgttcttggctacagtcaagtaggtccgaaagagaaggttcagcccgaagaaccctacttcaacctcttactctcattatataggctgtagggtttgttagtgatcctccacatgtcggggtgtctcactaacaaatcccgtatatcatcttttttaatgaatgaaaaattacaaaaaaataaatatctataaaaatttcattgtttctaggccaaaatttcacaaacattgagaaaatagttacttttggttgaggatgcgccaatatttgaaatggagtgacaatgaatgtcacctctcagcttggaattcatgatattggtgacaagtgctgaaaatatgtgttttaaagtgtcaatgttcgcatatcatgccacatggactgtggtagtgtcctccaacacctgtcacttaactacattacttaattcccgaataaaatataccagtctatcttgtgagccaattttggacccgataactttagaattgggctagaactgtgagacacgcttagatccgtcttgaaattatatttcaaattcaagttgaaccatgtcatttgaataaaacttgagagagttatgccaattttattgaaggcagtttatgttgtcttataccagttacgagcactgacatggcgaaatggcagtgctcggccatgcatgttctcagacccctcagggtgtgttttgacttttttttaatggtgagtcatattttgagggttctgggaccccaaaacctcattttgacgtccgaaatcctaacatgagaccactgcactaattggggctggaaagtgtcagtggtcggccatggcttatgggaggctatggatggtgtttcttgcttatttcagtaatatggatgataaaaaaaccactttcatcacattggttcttggctaatcgcttaggagagcactgccactatttttgccaaaacaagtggcaatgttcgcataggagacttatgaagccttgtgtgacttttctcacttgtatttgatacattgatgttggaaataaaaattggccaatgaaacttcttcccatgtgtagtggccgaccactgccactaattataccaaaattgtagtagtggtcagctaagtggttttcacaccactaagtggcttctttcacttagttttgacatattattggtgaatatatattcttggaaaaaaatgtcactccccctcttcatggatgaccactaccattcattgtgccacaaagatgacagtggtcggctagggtcagtccttggtggaaaatggtttatctcacttgttttgcactccttggtgttgaggaaacacatttggataatttgttaactcaaatttttaagtctctttattttgatgattaacannnnnnnnattattatttgttactaatgatttgttgattttgtagcacaattaaaaggtaaaataaatttttctaagacaaaattaactccaaaggcaaaatggtaattttaccaaaattctcaaaagtaacccgaagtagattcaacaagtatatcaactacttcacacttgataagagtaaaagattcatcaaaggatcaagaattcaagaccatattcaaaagaggaattcaaaaactcaaagtcaaaagtccacctaaaagtcaaaatcaaagtcaaagtcaactctcggggaaaagtcaactttggatcatgttgtgaaaaattgtatatacgcaagtgcacgtagtcacaaacaagtaatataatgataagtaacgagtatcgtctctacaaggactgtaaaaataaaatttctattgcaaaagttaattaccaagcaaaatgcctaagaaccaaaataaaatgattaatgattcaactaaatgaacaagaaaataagtaaattaactcaaaagtggatgcaagatgaaaataaaaacgagttgtaagctttgaaatgtgaaaggtttgaactattgaatccctctatgtttagcaaaaactgtgcgttttgctgcagcaaaacgttagcaaatctttagtaaaaatctcaggttaacaagaactccaataaagtgcacaaaaatctttcaaattttatgcaatcaattcttggacctgttcaaacatattcctatgccaatcaagctcaagaataccatttataagcaaaactctcaaatgttacacaaggatatgttatctctaatctaatctaataagattaagatcttgtgtcattcaagctaagtccattacatttaacctttc

SEQ ID NO: 16065 - DNA, 3453 bp, Cannabis sativa
tttaggtattaaaaagtaaaaaaggacatttgctttattattttaaaaaatggacattaactatctatagagttaaaaatagggtcatttacttacatttctctattatcaaatgttgttttcgttaaaagcccaccaaccaccattgagcaagaaaaaataataattagcacttaaatattttagactatcaaattgtaccttatatattataggaatattgatagtaaaactgcataatatataatacaatttaacttcataaattaatttttttcagcaaaagtacttaaactgatcatttatgttatgctaattagtaattacccttctcttaaactagttttgttaaatacttacatgtattgctgatatgtacacaaatttacatgtagaatttggttcacattattaattttaaaatatatacttaaaaaaataaataataaaattacaaaaaaaaaaaaaaagtcttcttctaacaatattcctataatatatgtcttgttaataatacctatcgaaatataacttttacagtaacctaatcatttcatcacattttattcaattttattatgaaatgagtgaagcagtggattatagttcataaatagatgcaaattaaatatcattcgtcctttttatattaataaataatagaatagaaaacttttttttataataatttatattttttatttttagtattttaatcattaaagtaaaaaaggttaaatatatttagtttgtgtctatttattaaataccatttaccgcgtcactcgttttacgatagaattaaatacaatatgatggaaggactactataaaaattatatttcgagaggtatattaacgagtcatatactataggaggaacaacttggtagtgtaaaaaattcaaggataaaaatactaattattcaaaaaaaaatgtacctacttatatataaatggagaaagtttcaatgatcacatcaaatatgtaaccataatgtttacatttatttttagtcactgaatcactattgaatagttttaattaatttaaaaactaaataaaaataaataataaataacttgtaatctgataatttattttcttataaaaccttaattaagattaattttattttaaaattaaattaattataatttttaattaattttttgtaatttgttactaaacaagaatcttttagcaattaatttttttttttttgcacttaaaaaattaaaatatttgtaatatcctttgaaattatttcacttacaaccttataatttgaaattattttacttataaccttataatttgaaattatttcacttataactttaatttaaaattactacacttaaatattagtttttattttttatctaaaattaaatacaaactagtttaaaatgtaataaaaattaaaaaaataataataataaaaataattatagaagtaatttataatctaagattgacctaatacatgaatagaattaggtaacaagcttatcaattaaattgtgtgttgtctatgtaggtggtatcattctctaataattcacaccccaacccccatataagaaaatataatattaattaacactaagagtctatgtcaaactcataacaaaattaagttgatcattttaataccaattcaaaaaataacaagatgatgaagcaaaccaactcagatcaaacaaagttgaaaaccaaatacatttaccaatcagaacaaaatttataataactcaaataagattaagacatgcatcatttcaacgtccaatttgagcaaattaaaaatacacttatatacatcacttgtttgttttttttacggattaaatacctaaaattatatttatgttactaccaatccgttaagtactgattggacttgttaagttgccatgtatgttttcattggtccattttatattaatttttaaaaatgatttaataattataaaaagtaattaaacttaaaaataaattacgtagtctttttctaaaaaaataattatagtaacacatctaaaattaaaatttaacttaacactagcaataatttattgaaatttaagaaaaaatggctttcgtgtagtctttgccacttgccactttcctatttgtattcttgaagaaactttcttacaaacataatacttttccaaagacgttaataaatcgttagatttctttcccattaacaacaaaatcaatagtattagtctttgtctccccactttttgctttatttgtggaattatggggcattccgagaacttttgtccccgacgtttcgaggttggagagggctagataatcaagccatatggggaatcgatgcgagtgagacctatacgtagaaaccacatgattggagctaaatggcttaagcagtttaatgctgccatggaagatgaatctgcagcaaaaaccacggctcatggtgaggtgtctcggtcgacgagggcaatggttgacgggaatcgtggtgggctggggtcgggtccgatgttagtggagaaaaattcgggtcaacgtgaggcagggataggcttatcaaaggatgtcattggagatcctataattgtggaagatattttatcagctgtttcgaataagaaaatatctaatgatatcaatgaggaggcttgtcttttggttctagatacgaagaggagaagaacgactttagaagatattgctggggtccatggcagggttggtgtggcaacgggtcaagaggtaaatagttcaaagaatttgagtttggtgggtactggtgtccaggcccaccaatcgttatgaatattttatcttggaattgccatgggctttggaacccatggactttacaattctttaaggatcttgtgatccaaaagaagcccactattgtgtttctttgtgagactctatccaatcgttctcagatggagagagtgcgtgtgacgatgggatttgatggtatgatagccgtagatgtcaatggtaggagtggaggtattgcattgttatggaaaattgaggatgaagtgtctttgcttgggttttctgatgcttatatagatgtgaggttgcttctcaaggtgtgcaggaatggtgtttcactggtgtgtatggggaaccgaataggagtaggcgtgcttctacttggaatctgcttcgtactcttgctaatcgttctaatctaccatggtgtgtgatgggtgatcttaacaatgtgttatctcatgatgacaaaatgggcgataataggtaccctgattttttaatccaaggttttcaacagtctttgattgacagtggacttcaagacatgaaattatgtgattatctgtttacttgggagtgtgggcggggtaataaccgttggatcgaagtgcgtttagatagggggctagctaatctttcttggttgaacatgttcacttttg

SEQ ID NO: 16066 - DNA, 6060 bp, Cannabis sativa
  modified_base (5894)..(5898): a, c, t, g, unknown or other
aaaaaaaaaaaaaaattcctagctttggatttggagcaggttgatgcttgcttgagattaattttattcaattagtttgttaatgttatttgtattaatggtggattattagctgagttgtttccctttcaatcattttgcatttcagcttttacttcactctgtctctcactctcactcacattacgtatatatatatatataagacataacttgtttctctttcattatcaggtgagtgtctttgcctgttattatgatcattttcttagttattaatatcataatatattatttcaataataatacttagttgttgttgttgtgttttgttaagtaataacaggaacaaagaaagaaagaagggaattgtgtgtacttaccatggaatttgttatttcaattggagccaaaatagctgagtacacagttgcacctgtgggtcgccagttgggttatctgctttgctacacaagaaatgtagagaaactcaaaactcaagctcaagatttgaaggatgccaaagacagattgcaacatcgtgttgaggaggcccggaataactgtcaagaaatcgaagctgatgttaagagatggctgagcagctttgatcaaatctctgaaaaagttgacacatttctcaaccatgaagaccatgcaaaggctgcttgttcttgtggatcccttcctcatttggtgactcgacatcagctgagtaggaaagcaaagaagttgttaatcgaggaggtattcgtgctcacagggaaatgcaatttcgatacgatttcttatccccctcacctacatagttcgcctacagcaatagcaacaacaacaacaacagcagcagcaataacgaaagggtacgagagttttgattcaaggagagtcattctggagaacataatgggtgctgtgagagatgcaaataggagcaggatagggttgcatggaatgggcggacttggcaaaactatgcttgccaaagaaatcgctagacaagctaaggaagagaagttgtttagtacggtggttatcaccactatttctcaaacaccaaacataaaagagattcagcaacatatagccgaaaagctagatgtaacaattttcagccaaattgaaagcataagcaaaagagcagaagtgctacaacaacgactgaagccggaaaataggattctcttaattctggatgacatttggagggaactcaatctagaagaaattggaatccatgatgggtgcaagattctagtaacctctagatatgcacatgttttacacaacatgggtatggctgagagtgatgtgttcttaattaaagctttagagtcgagtgaagccataagtttgtttaagaaaatcattggagacactaaagttgagaacaatgcatattacaatgctctagcagttaagattgttgatgaatgtggaggcctaccaatatccatttcgactgtggcacatgctttgaaattcaacatggacagtttgttcatgtgggaggatgcgttgcaacgactacagagttccaactttaccgggattggggagatgcgtgacaaagtctacttgagtataagattgagttatgattttctcggaagacatgaggaggaggccaaatcattgttgttgctgtgtgctttacatgcggaagatgaagaaataaaagtggaagagctgatgagatacagcattggttggaacttgcttcaaggagtgagaacagtgagtgaagcaagaaacagagtgaattcattggttgttaaattgaaatctcattctctgttgttggatggtacacataaaaatgatgaagtgaagatgcacgatgtgattcgtgatgtttgcatagtaattgcaaagggagatgatgatcatgatgaccacaagaatattaagaggatgaataacattaccagtgttgcttcctatgaagaatttgttatccacgaaagacataaatcatctaaagcaatttcgtttcttgactatgatgattttgataatctccctcaaacattagaatgtcctcagctagaattacttcttctatctaccgggtctaatttggaattgattccagatgagttttttgaacaaactagacaacttaaagctttgatttcaaacaatacatatctagaatcactaccgccatcctttcatttgcttcaaaatctccaaacattatgtctgcgcgattcttgtctaaaagacatagccatgattggagagctaaagaatttaaaagttcttgatgtgtcctggtctgaatccatagagcggttgccaaaagaaataggagcattgcagcgtttgcaagtgctagatctgcgaggatgtagaaatttaagagtgatcgagccaaatatcatttcgaatttgacacagatggaagagctctatatgccacacaaatttcagggatgggataagattgaagaaggcggaataagaaatgctagtcttattgagataaagagtttgcaacgacttacagttttatatttatctgtatcaagtgaacatgtttttcgagaggaattgtttactgaaaaattggagagatacctaatatctattggaggtggattttcctccgatttttacacaaacaaattttcaaggtggttgcacctaaacctctctcaatcggatcaaataatacatggatgtggacttggatcgctgatgaaaaggtgtgaacatttatcattacacagattaattgatgtcgccaatattgttgttggtgatcttagtgcagagggatttccaagtttgcagtcattgaggcttagccagatgacaagtttggaaaggattatttgtcatggttgtaatgaactcccaagagggttcttcaatgaattgagaagggtggatgtgtggtcttgtggtagattaaagtatttgttccctttgtgtgtggccaaactaattcatcatattacaatacgaaaatgtgagatgatggaagagatcattgtgagccataacattcatattgatcatcactcttcttctttgcaattacgctccttggaattatataatttaccaaacttggtgcaattctatgattgcttcaagttgaaaccaaccacccactcttcccctgctttattcagcgaaacggtacacttctttctactatttctttctttttcatttaatttgccgaattatattgtttatttatgtgaatctactacatctgttatatttgcagctttccttttctatgttggagaagttgattgtgtcgagattaaacataaaaaagttatggccagaccaaattatggtatcatcatcaacttcttacatgcaaaatttaacaagcttagaagtggaagggtgcaataaattaaagtatctgttctctatctctcttgctcaaaagtttgtaagcttaaagagtatacgagtcgaagattgtaaggcaatagaagatataataagagtagtgaaacttggagaagaagaaagtattgatgatgatcatgatcggatattggaaaggattgatttgttccctaaattagaatccgttacgcttgttaggctttcaggcctccaaagattttgcagcgcaacaattccatcatcgtgtatggtatttccactcctatcagagctaatcatagaagactgcccaaaactcagaacatacattagctctgccacttctaattctatgccaacacgtgtacctgttgaccatgttttatcaacacaaactctcttcaatgaaaaggtaattatttacttaattaatttaccttaacatattaaacataaatttattaaactaatataaatatgttttcaggtttgtttttctaattacatggagcatttgattgtggagggagtgaatacaaaagagttatggccagaaaagactctatcaagttattcttacatgcacaacttaacaagcttagaagtagatgaaagttgcaatagtctaaggtatatgttctcttttagtgttgctcaaatgtttgtaaacctaagaacattaaaagtcagtgagtgcaaggcaatggaagacatagtagtgaagcttggagaagaagaaactcagttacaaaggggctttttccctaaattagaatctcttgagcttaatggcctttcagccctccaaagattttgtgcaacagattcatgtatggtatttccacttgtatcggacctaattataaggggctgtccagaactgaagacatttgttagctctcccactattgtaccaataagacaagtatgtattgaccataaagaagagaaacaacttaatccatcaacacaacatttcttggccgccgaaaaggtatctaattaagttgggtatattggggttccatagcccatctttttatatatggcttaatattttaaattgaaagctcactaggaatatagctcagctgataccatgttgaaaatatggggtttcatctcaaaatagcctatgttcttatatatggcttaatatttttacatttaattcgtgtgggacaatgttcttaagaaatgaatatggtggggagtcctaaacaaagtctcctcttctaatttttgttttgtttgttttgtaggtaatttttcccatgctaaaggtattgagaagtgattggagtgaaggaattaaggagatatttgagatgagtagtaattcaatagtattgtttcccaaccttgatacacttgacttgagctgcacatctggtgatgaaccaattggtgtaccagatttgaagttattcttatacaaatatcatacaattcgtacacttacattgtggggctcctttgtgaatgacgatggtagcggtgatattactacttctacttgtaccacttgtttggagaaactatggattaactatgctgatatgcttgatcatgtgtttggggaaccattacatactatcgtgtttcaaaatctaaaagaagttggagtttgggattgtaaaagattacagacatttgcagccccctttatgtcgttccacaacttggaagctctgacagtaatgagatgccatgagctgaggtatttattgtcttcctcaacagcagccagtctgcttcaactgaaaaaaatgagaataagagattgtgatgaaatgaaggagattattattaatcataatggtaatgaagaagaggaagaagaagaagactccctaattgttttccagaatttggagaaactagagcttgagcatttgccaagtctcgaaagcttctactcaggaaataaagttatcctgagttttccaaatttggaagaaatatgtatcaagaaatgccctcagatgaagagattttcgcatggtgtactaaatatggggagtcattttgatacaactgatcaaacaaagtttttggaggaaatttcggccaatttggatgaatcggtaatttcatttactaacaaccccttcttttatccatatgtatatcattctttctaagtatggaatccctctaattaatttcagtgatgttaatttgtttattaggaagatgagtttgactcccaatgcgatgttttgctgtgataatgttttgctactggtttattacaaatacacaagtatgcatgttttctaatagaatagaatatggtggagttttggtagtgtagtacttgccacttggttagttctttcatctttattctacctaattaacatgtacaattatatataataataaattttacttttatattggcctttatatgctcttatatattctttcttcaacattcatataggatgatgatgatgatgatgatgatgacgacgaagacgaagatgacagcgacgacgatgacgacgacgacgatgatgatgatgatnnnnntgatgatgatgatggtgatgattatgatcaacagtagtgcgaacgaatggaatatatgagaaagaaagcagagagaggcacataaatgtattgtattgtattaagtaataatagtaacaatatgattgagtgacagagtgagtaagtgttgggtgcatcaca

SEQ ID NO: 16067 - DNA, 7872 bp, Cannabis sativa
  modified_base (817)..(830): a, c, t, g, unknown or other
  modified_base (7809)..(7839): a, c, t, g, unknown or other
aataaaactatacatgtatatttttactttaaacacttcaaactagatatgtattaaaaattagaatatttttaaaaaattataaagttaactttgatataccattttaaaaactgacaccgcaatatttatgaagctaccacagcgagttcattgtagaaattatcaccgtaatatctatggaactaagaccgttgagttgaatatcatcgtaagcaaagtaattaacaaaaatcttagtgagaattaatagtagattttgaagagacagaatgattgttatgaggaatgagaaaaaaaatattaagaatgtaaagttaatattagggttagatttagaaaagtgagagtttttttgtattgaaataaatagctaaaactcttaaaaaaatgaacaaataaatagctaaaaaaattaaagttagccagccgtaaattttaaaaaaatttaactaaaaaatcttataccacatttttttaatatatttgaaaagattttaaatagatatatggttaaagtgatttatagtacaattaaaattaaataagagaaaaaaaaaacgtggctatacaatttaaatttcagaatcattaattttttttaagaaaaaaatatcaaagacgtggccaaaataatttggatttcacaattattatacaagtatattttctattaattaatatataccaaagtaataaaaaaaaaaaagaattaaggagaaaaaagaaagatgactttcaagtatttttagacggccatgtcactagctcataatataatgggatttgttttaattttattttattattttattannnnnnnnnnnnnntttattattttattaaatataaaataaaaagtcaccatgaatttctcataaaccaagaacatgaatttatcataaaccaagaattcggttatatagacacactttatatagaatagattatatatatataattattttaaatcatttatttgaaaattttgcatttattataatttataatacagttaagttataaacaaaataaaaatatagaaatcggtacataaatagtaataacataaaaatgtaagttaaaaataaaagaaagtaattattaagagattaatgtaataaagtatattatatgtactaatatgaaatttttccaataatataagcttaagccttaatgggtcttgaggcttacgcctcacctcacgaaaaaaacgcacttaaatccgcaattttaaacactggcggtaactaactaaaataagtatatatttttttctctttttttaaggggtgactgcccctttcgcctctataggtttgctcctgactgaatgtagctttaactgtcacgtataggtgtataaatttaacaattaattttaaatttcaaaatacataattaaaaaaaaaaaataacaagtaaaaaaatttggaagtatgatttgaaagtggtaatatcaggataaaacctatttatccaaatttctatattaaccattaaattatcatttctccacaaagaacagaaagaaaaaaaaaaaaaggaaatgaaactgtaaaagctgagaattctgcaataagataaattaaaagtccagaatttgaaaagaaactaggagatcaggctgtaaaggctaatgagtatgcaagagtaagatagaaacctccttagttttaagaagaaaaaaaaaagcaaataagtcataaaagctcagcattattatactgtataaacaaaagaaataaataaaaacatcagcattgaaaagaaataaggaaatgaattgtaaaagctaagaatcatacttataataaaataaaagtggcagcactaagacagagtgctgctgtcccaagaatcacagtcgaatctcaagactagattcaccaaaccaaagattaacattctccattctgaccaaaatactgtctttaattgatcaaaatgaaatatcgataacaaagtccatgtttgtttaatttacaagtacttcaaacataatttcatttgacaacaatcataaatagatgattcatagccatgatatatatattatattattaaatatactcacttgagctatcttttacgtaaagcaaattcacaagtttactgcatcgaaccaaacaaagcatatgcagtttctcaaggctccttcttcaaccaaacacaagtttgagttagctcaaacccacgcccctttcccacctgagatcctcagagaactcagaaaacgcagcacgaggatcaccattggaaattgaaaagtagtactctgcagttccatcatcaacttgcatgctcctcttcaaggaatgaataacccttttcttggcttgctcagacctcgtcctctgcaacaaagatggagtatttacactcgggccggtaccatcaagatacaccacagccacttccctcttcgcataagtatcaagctccacatagcaagtttgcccaacaagaatttggggatcacttatgggaatcaacaatctctctctagagtatatcccatgttcactcatcatattgttcagtctcttaatatccataacctaattatatcaaaacaattcagtaagatcattcgaatttgggggaaaaagattttaaatttaaatttggatactttctcctaccctttctcggaaaacaaacagggttaatagagtaatagtaggtacctgaacagaatacttaacagcgagactagctacactatcgccacgaacaatccgatgagaaattgcgaactttccaagattattatccctccaaaagattccagagacgggctctccgatcacatgtgccaatttccagggggctttgaaagctctggcgaggatttccttatcggaggcgacggagttccaaaatctgcagacgcagctggagcgagctagatcgggaatgggaagcctgtggaagatgacccggagcaaatcgtggctggttaaggctgagaagtgagagttcatgggagaaatgatatcggaggagggggaagatgggtgtagggtttgggtagtagcaatggtggagttcaggtgcgtgaggatatcatcctcttcttcgtcgcaacagcaacccattgttgggattaggagagagaatattcagagtattttcattttgtcgtcaattgcgatatttaagcgtcgaatctatttggtggcaactggtcttgttttgtaattttgtaacttttcgcggttaagttgtcggtttttactcaccgttcacaactgattattttgattattctttccataagaatttgggtctttcacaatcaagctatattagcggttcaattcttactttatcaatttaaatttataaagttaaatattatcatcatactattattttattttttttaatgctttagatttgtgatttaactctttaatatatacttttagcacaaattaaacttaagatgaatatttttactcatatgattctatgttaaataagattaaaattcctatatacaaccaaaatattagtactcttagatcaaattttatttctatatttagtgtttttatattgtccttttgttatatcaagaaagattgtaaatttaagtaatattttaataattatagtgttgtcttattctttgttttttttttatttttctaatttctggattaattgtttgcctaaatgactaattaatactattatatagtttatttaattttgtttttattaatttaacttatttggttctttattgctactttatttgagttgtagctatattggatatatttgcagttagaagattccctaattatatttggcgtagtatgatttaggaccgctctctacttaaaaaaggtatccaagaaaagagtaggaacatgagactctataatagtatttaaagattcttggttacctcgcccatatttatttttaccttcatccagtagtactacacatctaaatttattggtcaaagatttaacatatgatatgaggggtgtgaaatttacctattatttgataattatttaatgttgcagatcagtcatgtattggttctatacctcttggtaagtttcctaaactgattcatggctttagcattttacgtcaaatggttcttattctgttaaaagtggttatgttgtggcctctacttctaatttgtctaaactatctccttctaaagatatgtttttagcttagtggtagaggttttgggggatgcatttacctaaaaagattttaaactttgttaggcgaggtttccaggagatacttcctactaatgttggtttgaagaaaatgaatattattaaccattccaactgtccagtatgtggttacaattctgataccaatagccatgctttttttatgtaatgtgtttaagaaggtgtgaaaattattaaagttcaatctcttaaacaatctttctataaaagtttcttttcaacaaataaccatttaaacatcagaagggttactatagtcagaatttgaagtatttcttgggcagcttggtatatttggggagaacaaaaccaagtagtacatggccaccaattttgttctcctgaagttatagtttcatgtattcaactccttttttatgaattcagcaatatctaacataccgctagtttaaaagagaagactaactgtacatcaacgtcaaaatagattactccaccacttggtacctttaaattaaatgtagatgcatccttggatgataaaagtaccacaattggaattggagcagttattcaaaactcacaaggactaataaaggcatgcatttcgaaatttttatttggtaatggcatccttaattaatgttttactgatttaggtcatttttttatgatactttttcatgcttccatataagggatatgaggttatgtggctattaaggacgaagggaggtttcccttctgtctaagatagactcaacatttattttattattaatattatattataatattattttattattattgttagttttatattttgattttgtagggaatttcacagttatttaaactgaaactgtagctcttatagtggcattggattggtcgcttagaattggtctccctcttcattctaatgaatctgattgcctagctatgatctctgtttttgccaagagatcatatctttgtaatgatcttagttctcttttagatgttatttctagtctacaatctaatttttttaaggcatccctaattcatgttcgtcggccagcgaataaggctgctcatgaattagttgtgcacgcacttagagtgaatggtgagctagtttggatggaagatttatcttcttttcttttcgatgtactcagtgctgatttttttcaatgatattttgttcattgttcgaaaatatatatatatatatatatatattttgaacaaatttcattaaaaaaaactacaagtacaaagctttcaaggtttataaagaaggtaaagaaccattctaaattaactcatcatctaattctaggccaaatttagctaaatcatgagcaattgtgttacatttcctgttaacatacaaaatcctaagcccaagactaaaagataatgagttcttaatacttgtcagtaaatcatccaacacagtactagaccatttacaagccagcaacttgttaacaataattttacaattagtttcaataatgttgatagggagcttaaccatatgagtccattgcacaacaaggagaatggctttggtttctacaatgactggacaaatattacccacaattggttcgataaccccagccttaattttattagaactatacaacacaactatacccaaactatgttttttccttctactatctaaagcagcagcaatgttgatcttcaagcaatcatttagaataggtgccagacttgttacttcccaatcgtcaaagttcgatgtcgaactctcaccaaaaaatggcaaagaagcacagatccttggctggtcctcatagagtaattgtagaaagtctttgtctactcaatgcttaccacccccgaaagtcactaatgttcatctacataagaggtaaagtgagttatgaactaggcatggtcacgagattctctaagaaaaatatctttgatgttccaagcagtctaatttaaggattgagggaaggaaactttgtcttgatgataagaatcctagtttaaagatgctcaagagcacgggatgaacctagaatcccccagaatcactaagaaaagttttttcaagatttttttaacaaaaaacatagaaatttacaagaatttaaagattatgctccgtaagcataaattcagaagcagattttaagtctaaatctctagaaataaagaaaagcctagtttgtaaaccaatattttgcaaaaagcaattctaaagtaaaatgaagaaattaaagataatgcataaagatttgaaacttactcactgttggagattgtcgggtagaaattcgagtcaaaatctatagatgatcacgaaatcctagaagctttgaaaaaaacttaaagatttgagaaaaatcaatttttttgctttgaagtttctgagtttcaaaacggttaaaagagaaaaatgaaatctgaaaaccctttttataggctactgaagggatattctcataattccacatttcaaactttgggtttctcccctccccaaaaggtataatcagtacgcacaggggagtacaaccatcagcacgcgacccaagacacattttttaaggtgaagcattaaattctgagatatgaagagatagctctattcacctacctcatagtccgagcacatgtcaccttatttacctagtgtgtgggtcgaacaagtccatatactaacaaaaagtttccatacagacttgcggggtaaatgttatcttaaattatgcacagggtgatgtggcatccttttgggtgacacatagagaacattttaagacctggatgggtggcaccatcctcgaaagtcgtccatagtgaatcattccttagaaacagtttgtttgaagaataagctggaattccggacaaggtaaagggcaccatccgactagcgtcgatcttatagcaagctcgcatacactagccaaggtaaatgcgctaaaatctttagagatactttccgtatttaattaattgaatccctattttaatgggaattccacacgttattgttgtaaaataagaaaaattcatagtttccattattaattctcatttatttggaaaatctaattgatgtatttcttccctgtaaatagtgaagccatttcattattcagggatcaaaattcgatgatttaaaaaagcttttatgctgtaaaattataagcttttaagagagatcaaaaactcatttgcttctcttctcataagttatacaagtaaaataggagtaggctattgcaactatcacgaggttgaacttctataaatctttgtgttcttattgcttaatttcatttaattattatatataattcttatcgctttaattgactcaacatcattggttaaaagcaaggtcaacatttatatatcaatgttgatgaagtatctaataggtctaacttatgtcttgggttatgaagctttagaaatacattcaaatttgtcctatgaggaacaactaattcagaatcttgaaaggaaggacaaggtcctgtgaaacaagaccataacttaggtcaagatacttagaggtatatcaaggttgaggaagctgttggaaattattttaccnnnnnnnnnnnnnnnnnnnnnnnnnnnnnnnttaacaccctaaatatgaaagatcggaagagcg

SEQ ID NO: 16068 - DNA, 2989 bp, Cannabis sativa
aaattttacttttaattttgtggttaaaaatttaaactcttaattattttattttacctttttaactattctaccacaattggtgtaagggctaaaaagaccaagataatagggattaatagaaaaatatattatttttttgtatctattaataaaaaatactcccatattagattttattaaaatatacctacttttttgagtggattatataatatgtcctcactcttatttaagtctaacataatttatattaatttaaagagtctaataaaaatatcatctatataaaagtaagtatatcttaaaaaatataaaaaataaaaataaaaaaaataaaataaaatgagtataagatctaatttcctcaaaataatacatatacttgaatgtgaatatgtatatggtagatgtagagtacacataacataaaagagtatttcataggtccttttcagttttggtcaaataaagaggcattcttcacctaggtatgatacccaaaaaaagggtataaacaatcatacccaaaactcactccttattcccttccaaaacttcattcataattatctccatgccaaataatccaaatactacttatataataatataaataaatttttatatatatcaaagttactttttattattttaaattaaataataataataatagcaatgtagtgcttatatatttggacgtatttgttgtcctatgctataataaatggctaagcatgtgccacacacacacagtactatgcaaattgtattgccgtgttgcatttatcttcccattaataaccttttttgtctttttctttttataacttaatgaaagaaagaaaagaaaaaataaaatagtcaataaaagacacatatgattaaatacaattaatagcttatatcaaataaatcaccaccataatttttgtaaatttttgtgtgttgttcatttgacaaaaccagcactaacgtggttgtagcatataacgacacttctaatccaaacaaagccattatttgaacaagaatttagaagttttatttatttatttatttatttttaattaaatggttttgttttaaataacattatctttttaatttgagtttactttttgaatccaaaaaggaaaatgtgttaatagcatgcgggccacaatgagttttggcctttagtgcgttaggtcaacaactaggaacagcttttgtcttcttctgctgtttgggtcaatccacaaagtggaattgagtcatttcaaaatttgtgtttttattgtatataatatataatgactccaaaatatttagactatgcaccaatttgaacaaatatctttctacaattatcattattattattaatgctacgtgtacctttattttcacatttttatttttttcttacttaagaagaaataaagagaatatttcacaagtttaaaagaggaaaatatttcacatttttcttcggagtgctcctaaaaacaaaaacaaaaggaaaaaaaggaaaaaaaggaaaaaaaagagaggaaaattggtgagcattcttctactccatcattctatttgtttcctatacccgtttggcatataattttagtcaacggaatttttgtaacacatattgtctttatggagggtaaaaatcatttttacctattattacatacaaatgttataagaaaaaataaaattagaaaattttctttcagaaaaaaattgagggtaaaataagagtaaccttatcaggttagaaaacaaaggaaaatattattattattattggtttgttttaacaatgttttctatggttttttttctcttattttattgaagattgatgttgtactgagtggtgagctatttataaatattgacaaggtagattaaatataaagtttttttttttatttttacactttaaaatatatatatattttttttttgtatttttacagaattttacataaaaattcatattgcaactagaggagcaacttaaatagcaacaaaaaatcgtatagcaactcatataaaaatcactttagaaactcaaaccgtaaatttttttaaaaaatattttcattattttcatgttaacctaggcactggtgccctatgttggctcccaaaggatcttgtttgctccctaagatcatttatattttcattatttctaaaaatgaaaaagatgctcgaaacacttttcggaaaaaatgtccatgtcaacttgggtgttgggtcccaattctggctcctagattactctgtttgttcctcaaaaccacctaaattttaatatttacaaaaatagagaatattatggaaagacttcttctgaactatcgatggaaatggccaagttgagaaagtgtctacctgggcgctgggtccccgttttgacctccaggctgtttctttctcaaaagcacgtgattcttcattttggatggagacaaataaaatactcaagatacttctttaatattttgattagaagtgccccaatttgagaatatgtcaacctgggcgttgggtgcactaggtgcccggggcgcctagtggctttggtgctaaaaaatgtcagtgtttcgattttaattcgagtgcctcaaatgtattcgtgataggtcttattcatctcaaagtataaattttgaaccattttcactaagacgaaccgaaaaactaaaaccatagttgggatgtcaacctgggcgctaggtgaaaacccttggtgcctggggtgacttatgaggtattgttttgtctctttttagttaccaagccttggacttggattcttcttatcttcttggttcataatactgaaagatgattagttgggaacaacttggcgggatctaaacacccattatggagtttttggagtcaacttgggcgtagggctagggacccctcccaggtcgactgttatgactcgggactagtcaactctaggatgttttctttcttgcca

SEQ ID NO: 16069 - DNA, 6808 bp, Cannabis sativa
taataacaactttgatgtagtgacaattagaattgagatgtgacgataacatcgattttgaatgacaacaattttgaaatcatataatgagttttctatagatttaatattttttttagatctctattttatgggaggattgttcaatctcaattattttttattgtaatatttaaagatacctcttcgttaatttgctttctctttcaaataagaaattatatgataaaattttctacaatattaatttatttatttttttataaaaaaaattagtagaataattactcataatattaaaaaaattatattaaaaattgatatatttttataacttaattatcaataaataaaatataaactcacatgaaactcgatttgtttcttagtttatatgaagtaaaaagatgaaatgaaatgaaaaatggaacaaataaatagagaaaaataaaagcagaaaaaagattagaatgcaatgaaaataaaaagtaaaaaaaatggaaaaaaaaaaagtatatgaaaagtaaaatgagaaaacaaaaatataaaattatggggaaaaaaagagtgaaaaaataaagaataaaataaaaaaaaatggaaggaaaaaaatatttgaaaaacaatagctccaaagaaataaaaatctctgttgattgttcaaaaagaaaaaaatcacaaaaaataacttccatatttttgttaaaaccccttgatgaaataagaggcttaaaagtttgaaaacagtaacgtgattttgtaaagaacaccgttaatttaaagaaaatggcctcctatttggctacataatttcagttgttgatgtaaactttcttggacatcgacaatagacgatatatatggtttggagcctttattctcaagcagcactaatgaaagtaattttctttcagcagttcatctgggaaaattacaagactgtcacagtggaccgtggtatacacattgtacggtaattactaattcccttattaaaagtagctgaatttactgatacataaaaactagttatgttatttatggtgatcagaaagggcacctgcatgcttctatcccccatgtcttttcagcatactcctggattgttctgtcgctgctaaatcttcccgatccagcagcgctaaggatgctcatctcggtccacttatcttgatccacaaatgctttatcggcagcagcctgtgcccatatactcttcagtcagtttccgtacacaatgttttggtatatagaaaataattcccccccaaaaaaaaaacaagaattacctgtgcctctagatagcttccaaaatcagaaccaaggagatagaagtccttatcagcctcgacagtatcacatagtgactcaaaatagtcttgaaagccaaaataaccatctcgaatcatcctacatttagaacgtacaacaatatgtcaaaatagtcttgcatcaaaatgttaatacgggacactatcattgttacatttaaattattatttggccttccaaaaacagccaggacaatttttcctttgaacaaattttatcgtcagctcgactatttgacaaagatgtggcaagcatttgttgggatattcatgatcaggtaataataaactggcagaaaaaaattaggaaaagaaaaatagaaactaccttacaacccgtgcaaattgcagattcactttcatgttaggtcccctctcacgcagagtgggaacttcatccagctttgcgccaaacaaaaactagaaaaagaaatagaaaactgtactcagaaatctgccctcacacaaccaataatgggtgaaccatagacagaaaacgcaatcacactgtatacaaaaataagcagacatcatgcttagcactaacaccaaccatcttgtaaaaactattaaatatttatgaataaatttttctccgctcaacccatgataccatacttttgattataaaaagggaattcaaaataacaacattagtaccagattttctgacccaatttcttcaataatttcaactgttgaaccatcagctgtagctaaaagtagacatccattcataagaaatttcatgctaccagttcctgaggcctcatgccctgcagtgctgcatagaaacggtcatgctcacacaaagtacataggctcttagataaaataaagaaaattgctaaagagcaccaatggtgctcaacaataccatgagatgtcatatcactatttgtgcaagttaacatcagatcccacatattttaattacataactattatagaaaatagttaaccaattgtaaagtgtcacctcatggtaatattggtcattagtagtaccaaaaagcaatgctctactccctaattccttagaagccccttcactaatcattagtgaaacttcaacccacgaccaaagaaaccatttccactacaggataacctgtgacccggcctaaaggctttggatggtttcctgaatatagaattagtattttctagaatataggtttttcaagcaccactcatgattgaagcatttagcattctggggaaatttaactcaacatttgggaaaactgaaagagcatttttctattccaggtggaagtgggagctaatgtttaaaatgggccgggttactcttctgagtttgttggttttaccacaaaagtgactctttacttgaggaaaaattagaaggaaaataaaaccaaccaataaaataactatcaatttcaaattattaaaaagatattgtacaataaacactaggatccagcatatctactttcaaaataacacacctcaagtgctgtgaaaggtcagcccctggtatcaccaactcagcaacagatacattgtaatcaggtataaaaacctgaaattataaataaacttttagcaacaaaaagaatgacagcatagtagcacggctcttctgctagtgcaattgaagtatactacatccaagcaagagtgaagaagctaagctatagcttagttatcctgtaataaacctcccataaggttcacttagaggaggaacaagaggaacaactaagcaagttgttttacttagctgagctgtattagtaggttgctatgtttctgttaggagttttattctgttaagagcagcagttagtttaggagtctaaataagtggatttgagttgagatttagactttggagaattagccatctcaaattagctactgttctattctttgtatgattagactctaatagggggttagggtttaagatataaagagagagttttctggtttgtgtgcgggtttcttggctgagttctatcaccctgacatcatactatgaaactaagagtttcacatgtgaaacttgtgagatttggcacatcattcaccccatgggcatgtctgccctaggaatacttataatcaaaagagaaaaggataagaaagaagtttctctttaccagctttaggagatctccaatatcactattattgtttattttgtctgcaacagcgtgacaaagtttgataatcttttttgctatctcataacctggagcagctttccctccaattatgcagacacgaggaacaaccttcctcctgtcactctcattcatattctggaaagggaagagccaactatcagctacttactcaaaaatacttacaacattaaaaggaaagaggaaaaagaaaaaagaaaaaagaaaaagaaaaaaaaaagtgagagaagagaatacattagtatagaaatccaattaaatgcaccagttaaacttgtcataattgtttatatatgtgatcattactgacaaaacgtttaattttgcaaatctcaaatggtattagaataatgcattccctattagcatgtagtgaaagaaggaaaaagaaagagatccaaactactgcggactactcattttggtagctgcagaaaaatgtgaccacttcaataacacttaataatgataagacgaaagaggcatgaaaagttgcaggaaataagtatgcatgagttgacgcagtaacaggatcttgtacttagtatattgtgccaaggtcaaattaagtcaccttgatacaatcatatctatggataatgccaagaatattaagcagctgtcgtttgtattcatgtattctcttgatctgtacatcaaacattgcgtctaaactcacctgcatttaaaatgacatgccacaaatctcaagatatctgagcatcttttatgatagtatattaatagccgaaaaaattaaatgaagatatcattttgtccggaccttcaaaccactcagcacttcaatgtattctgcaagcctcattttattaaccctcctaacctacaatgtgaacagaacatgttaacacattactttttcatcaatgctcgtgatattggctagaaagtaccatcttccattcttgctgtagaactgcatctgtagcatattctcgaaggccagtcagaaggtcaacattgcgaatccaagcttccgttccaagccattttgtgataaggtcacaaagactgggattgcttactacaatccatcgtcgctgaccaaaaacaaagcaggtcaatacaagcaatcaatttttcctgtgtaatttcaatgagatgctttcaaccaatatgcaaaatgaaggtgcaatgcaccatttctacctgggttacaccatttgtcttgtactgaaatttctcaggccacagctcatagaagtccttttgagaaacagaggagtcaggtgattccattcattgttctaaaataattaatttgaacgataaactgacaatgatagtaaattacagtaccttgaacaccttggtctttaataactcaaaatgtacttttgaaacaccatttacagtatgtgaacaaacaattgataggtttgctgaccgaatgctctgtcaaattaaatggtaatcgattttaatgaacaatagatgtaaaaattaaaggtatattaagaaataacagttaagcaatcagattacaatctacaaaagagtgagacactctccattggagcacatttaccctcttctaatatggtatctcttttttagaaaattcaacaaaatcatgatactgtattttcctgacaagagaaaagcagacaaatggagctggaatttctttttttttatatatatataaaatgaacataaacaagatatgatgcagattttacaacttattaataatattataattctctctatcaatctatctcacgcacacatcaatacaaaaagttcataaaaatgaacaaaaatgcaccataataaatgtatgagctcatgttgtatgtgcaaataccttcacagcaccgtcttctacaattgacatacgagacagtcgactgtaatctaaacctaccttcttcttcaagtcttccataaatttgaaattaatgtcatatataatctgcaataaataaataaataagcttttggagcatctatatgaaaatgtattatttacgacccgttcgttttaaaatgttataaagcatctccaacctctagttaactttccacaatttcagtaaaaagaaaaaaaaaaatctgccacaaatcaaattttgattcaagaaaagtataatgcaaaagtttattcaaaatcacaattgagtcatcctaaataattgcaagaagtggtcaagttttataaaaatgagaagagatattccaaatatcgcacttccaaatggcgaggaagtagactgcccaataaatcaacggggattttttcaagtccttctgccaatactgtgtgtgttgtgaatgagaagattttgcaaacaatgccccatgctctatcccaatccaaattctcttcatcaatgagaactctcatgatttcagctatggcaagtgatggatgagtatcattcaactgtagtgcaacctgaataagatggggaaacataaacttacaagcataacaaacaagacaaattcatagtaccataataatggaagaaaatccttctaaatcccaaatccaaaatctaaaaggtaaatggatattgtgatcagtaaacagtacattttaagaaatatccagctgggcacaaataaatgtgtacaacaataacaggaaaaagaaaaccatcagaaggagcagagaaaaagaagctgcataacattccatggttgtcgagttcatatggttacagaaaaaaaaatacactaattatatagaaattagaaccttctgcggaaactcatcaaagttgtcgtgagcatctttgaatcttcgaatgatgtcctgtgtggatgctgagacaaagaaatattgttgcttcaatctaagttcctttccctgaacatttgaaaaattcaggataaaagtgaacaataagtaaaaaataaataaaaaaacatctatttctaaagaagaacaagaggtagatgaataaacctgatgagagcggtcatcaggatacaagacgctacttattgtttctgctttctgtcgatcgacaacagcatttatgtaatctccagtattataagactcctgcattaaatatatgtagaatagatcctttaattcaagggaaaaattaaagattctttaatacagggaaaataaaaatcctttaaaacctcaaatagaaatggaaaaacaaggaactactactctagttttggccctgaaggaaaaacaactaagcaaaacaaaacaaaaataaatatatatttatttacatgagccacatctattacacttattctagtaaactatattcgcctactaacccttacaaaaaaaaaaaaaaa

SEQ ID NO: 16070 - DNA, 6401 bp, Cannabis sativa
acgctcaagtaccgcggcagcatgtggtgagagcataacttttctgggtgtttttaattgcaaatttgcaattgcttgaaaattttcttttttaaggttttaattgcgaacttttggttttcttcaacgctttgctggcttgattctaaaataatgatagatttcctagtctgactttgatctgagtgttcttctttcttgtttggttataatattgattatcatctagtttatgatgtaaagagaaagaagcaaaacagagagaagattagaaaactgaagaaaacagcttcgtattcgtcaaaaactgatctcgtagtacaagtcatcagcaatttataagctgttgtcatcccaatgtcagaacatgaagttgaaacaaatgttatagcaaagctaaaaactaatctagatttaatcgctaattaatacattagtttgctagattccccattgcacttgctatattccctttggcttctagcttttccctcttcagtgttgccaatacttggtttattgttatgatgaattgagaattcatttttttttttggtaaagcctaagagcttgcaagaacccacatctcaaaacccaatcatggggctaaagagtggaattgggaatacaattttgatgggctattttggatgctgcaggggttataagcgtttctttaaaagaactgccttagagacttcagactatcttaaagatgattgtctatctgtaaactgtattgttggtgttgtgaagtcacaaacggaaggacctaagatctactccatagcagtaccaccacccaacattggtcaacattttgggcaattactggaaagtgggaagggaactgatgttactttcgatgtagatggagaaaaattttcagctcacaagttagtactagcagctcgatcacctgtattcagggcccaactttttggtcctatgaaggatcagaacacccaatgcataaaaattgaagacatggaggctccagtctttaaggtttgactttagttttctgtattcatcattagaagttcttaacaaatacttctcagttttttcattattttttatggttgatgggaactcattgatttgatcaagcactatttatattagtcataactatggattttgtatgccctgtcatagacttcgagagaatattttgatgagataggttgttgttgttcataatttcagtctttggcgctcctgctgttcttttcatttctttaaatgtttatgtcaatcttcttttctttatctaagaaaagattgagttgtttttgttcctgttagcttagttatttagttttttttttttttttttcattaactatgtccttaataaaattattgtggttgaagcaagtagtttttcaaacttttacaatgctatgcatataaccatatatattatgctatgtattatatatttttggtattttgatcttttattttcattttttacctgagtaaagggaagagatggattggcagtgcactgtccccatgattctctagccttcatttgtcgaggtacttggtgtattttgacaattaagcacgaggaataacatgccaattttactctattttcccatgtacaggctttacttcattttatatactgggactcgctgcctgacttagaggagcttactggcttgaactcgaaatgggcttctactttaatggctcagcatctacttgctgcagcagaccagtatgatttggaaaggctcaggttactaagcgaggcaagtctctgtgagcatgttgctattaacactgtggcaacaacgttagctttggcagagcagcatcactgcttccagttaaaatctgtgtgcctcaaatttgtttcaatgcctgaaaatttgggaggtgagatcattatttgcactagaacttttaacgagtttgcgtttggttaatttctggtagacagcattgcttgggtttaattttgtgtaggcattttctcctacattgttgcatgctaatcatattttattttgatatatcatatacttattgtaatttttgctttaatcagctgtgatgcaaaccgatgggttcgactacttgaaggaaagctgtccttccgtcataaccgaccttttgcaatacgtagccagtgagcatcactctactgtattcaggcttgggaatgaggctattcttgatggcagcgatattaatggtaggcgggtgaaacaaaggctatagaaatggtatgccttttgttttggctggtttttttttcacccaatttttgtgtaggcaaaaatatggaaaagcaaagagagcaaaagagagaaagaaaaaagttgcaaaaattatttttaggattagaaataatgtacctagctctttagttttatcattgtattgaatgttggtttgcaaatgtaatgtggatggttttaatttcctgtattgtttcgaattactactcgtagaaaagaaaaagaaaaatgttcataattcttgcatttcattttctagaaacaggttctttaatgcaattacattattattttgactgacaagttagaattcagaagggaaaacatgtacgttacattagaaaaaaaatgtgtacaacagggcaatagtgtgattgggacctctaaaattaattgtatttggcatgtttatttaaattacattaaactctttccagtaggctgaaagatgaatatcatatttgatgacgagatagtgcttggaacgacattaaattattattattatttttttttttttgagaaatgaacaatttttttttgttcttaaaagttatttttttttaacaatgaacattcattgaatatagagtttgaaacatcatagagaaaagtggaactaatccatcataattagtttgatatctactctgagtgtatgaacttttaatttatatgcgacatacataaataaaagatatcccaagaaaattgaactacaaactagtaaaatcctctaataaagatcctaaatgataaaaaacaaaaatagaatctcttaaagaaagcataaattacgactaaataatcacattcatgagtaccaataggcaatccaagtttaagagaccaatccattgcatctattaagatagagctccattgcatctattaagatagagcttaaatgattactgcaaaattgaactgttgccgccatttggtcgtgaccaattatcgtcgcgaccagattgggctcgtcgcgaccagaagggggtaggggctaacccttatttttgggtaaagctcactgcaatgaacgttagtctggtcgcaatgtctaggcctaaaagacctaaaatcccaattatttgaccaaattcgaaaatatacaattatatttcaacaattcatgtagctagtttaaaggctcaaatctgagtataacaatatatacatcgcactcagagcaacacctaaacatacatgaattcacaagttttaactcaaaaatctaagaatcaaattatagttcatactctcgtatcatcactttaagaaaaatcaacacaacctcaaaatatacaaattcatgctcaataacataatcttaatatcagaaagaagcacaaatcaaactcaagtttcaggtccaaaataaataattacaattcctcaaacaacaatccaagcttcttacaagaaactcaccaataattactactcaaccttataacatgcaattcaactcatagacaatcatgcagttcaatagcaaacgtaatcaaagctttaaatcagagaaacctaaaagaataactacctcaaatcaattcttgcaagctcaaacaccaattcacacctaatttcctcttcaatttcttcaagattcaatcaaaatttacacagttggttgagagagagggtcagttagagagaaatccaagaccaaaaattggttttttttttttatttcaattaacacttatctaaaattgcatttttatttttctaataaaagatggtcaaaaaaccattttgcctgtagggtcaatatttcacttataacccatttatggaaaattcaataattctacatgtatattcacatattcatattattcaaattatgccataatcataaagttcatgaattttggatcctgaatttgattcgagccaaaatacccgattgtgattataccgtgctaaattgtaaaaaatcacttgtagtaagacaatatgaacatactatataataatatagtccattagcacaatatatattaaaataatgatttttctttctcgggtcaaaattacgaaaaaatgtccctaactgatagatagggtcttaaatgcaataattctcatataatttcacataattaattatataataatataattactctactataattaatccatttcaattagggttgctaatctatttactaattctaaaatattacaatatgggtaggattttgggcatcttttcttataatacgtttgtctgaaactgactgggcactaatgctttttggttgaattatgtgttttccttttttctagagtcattaggactgatttatctagtgtcttttcttctaaccatctagcgttgagggtcagaagcgatactgctcctttcgttgcaaaaatgattgatttatttgctagtagcatttgcgagctaacttcggtgaaatgggttgtgcatgtagcacaaaccttgctttattagcccatgctacaagacagtaggccacgagggtaagactcattttatgtatttgatatctattgccactttcggtttctaccaatatgttctaacactttgtctcttttacttttggtgtactagatggtcgttcttgccgaaagggcgtgtgactctgcccaatctgcagtggtggagctgcataagcttaggaatgagaacaagaacttaaattccaagattaaagaggcgttcatcttggcggaccaataggctaaggagaagcttaagcattgtgccaacgaagtcactacctctttcaaagaacaaattcttgaggttgacaccatagccaattataaagcaaataaggccttgagtcgcgctaaacttttggatgctcaagttcaagctaggaccaatgatcttaatgcaaagcaaattgaggtcaatgcaaatgagcttaagataaaggatctgaaagatgaatctaatgaatggaggtggaaggaaaattcattggaaatcagcctagatgtagagaaggtctagaggaagtcactccaagatttggagaaagcttgggccactaaaaggttaaagcttccattattgtgggggcattcagcaaatttgcattttattgtcccaatttcatcaagtagtcagaaaggctagccctcaagatctaacatgagaatgaagagaaaatgagggttgctctccaagaggctgctgaagttgtggaagaatattgaaggcggtatatggatcaaactccaattcacacattccactatttgtggaagaaagatcccactattttgaagattctcggggaagaaaaggaatcttatcaagccgaaatcagatctttagaaactgctgaatcttctgaacctccggctactgaggactatagcaaatccaaagatgctactattgaggttaaccttgcccaacctttgtcagatcaggcataattctagaacttttaaatacctctctcttccttatatatatatttatttacgggccattggtccccttttagtatttgtagagacattctaaatgccttaactgcatggcaatttgtaatagcttttagattctttttcattcctttacttgaataattttacatcactttgcctcacgtaagtgcttgttgttttcataactgctttcaggcaactttggatgtcttgagttcttggttccaatggcctgaactccaaggcttaagatttagttaggatcgttctaagtttcacgttatgtgtccctcgtgttaggaagtgtggagaagagaatccaccttttaagcctattactacttaattccaaggattaatacttatgatacttaggacttttgattctagctttttcttccaaacactcacatcttccaaacttaggacctttttgcgaaatgaaaaccttagtctgctggctccgagtgattaaaaggctacacttactcccggttcattgggttccagttctagaggttacatgcttatagactttagtttgcacttttgctcccgaaccaacttgacttagcgagttattaatcttaggtacggtgggagagtggcttccttctagctttaagagtttctagtttcaggcaaaactttattcttccgtaactagtttaatattgattcgcaattaca

SEQ ID NO: 16071 - DNA, 5229 bp, Cannabis sativa
attgtgttgattaattggtttatgttcattattactgttcaagtgttgagattattgcaggtttatgattgaatcctcaaagttatttccgctgaaattacaacaagtaataatagaaaaagtcacaagttttcattaacttttaacccttagttgaattataacaagacaaccaaataaaaataaaagttcatctcaagtgataataattcagttaattaaataatattttatataaataaaggcatgcaagaatggtcatgtaggaaagttatgggaggatgatcaggcattaaagtttaagtcaccagctgcttatggggatacgttataagtgggctccagctaactgtagttggtaaaaggatcagaaccgaagaacaatatcaaagaaaaacatatattgtattaccaacagcactatctacagcagatctccttatgaatagtttattgccagaagagaagactactccataaaaccttcaataatgtgcatgcttcctcttcctaccctctatcccattatacaaatcctttaaattatttcatcatcaatatatgtgttattcaatcataacataatctatatatatatattagcaaagtagttgctgatattgtttaattcctgccaaaaacacgtaatcctataagatatcttgcaaaagtagtttcatttttttcttaaaaaaaataaaaaattctattcaatcaattaaaaatgttttgggtaaaggtctagccaataatatgtctacaattctggatgtaataatggacctcccaaagagcgtattataagagtaccctaacccatgaatttttttgcccattatcctgttgtcattattagataatgatcttacagatcacttatttgaaatacaaacctgaaaatataaatatatagggttttggggtaactctttaatcgtatatataatatattcattaaactaagtgcatagtattggcgcatcaatctagaccgtttgacctataattaattagtattccttctaattatataacgacattgctttcctttataacaatcacgaaaacaaaaaattgctgacagcccttaatcttttatagctatattaataagtagcttgaagaagattagagcgtgaagatctttgtagtttttaatttttctggaaggtattataataatcaacaaaaaactacttgtaaaaatcattccaattcaattcattatgaattagacgaaagttgtacccattaagttgatcatcgagtatatatatatagatgagtagcttatttatgtgatcatctttttttcacatgtatatatatagatagattgattcttatattatattgaagttagaagaaagaaaaaaaaaaactcatatttagagtatatatggcgaggctttggatttggatatttagtatgagtaatcaatacacataattgaatattttaaaatgtaaagtgtgtttggatatgagatggtaattacatatgaattcttaatatcttgtttggcaaaatagttagtaattatatgggaaaataataatttttagtaactaatgtttaatatggaaagtttttagtaattacacagtataattacattcaattctcatggggagccatgaaaattggagggtgtaattggaacccctcaattatttcaaattagacaattacagtataattatatggtcagacaaacatgttaaattgtgtaattacctctaattacacaccaatttcattacattatgactttccaaacgcacaaatcatcattagggaaaaaataatatttgattttttggaaaacctttcattaacttttcaataatcatgtaattaaacctaaaaacatttcaattaagttattgaaagaattaaataaatatcattacctctagcaaccattaacatatattagcagaaagagttttgaaaattttctgagtttggcgatgtaccctatatattaatatatattatcactttcgacaatacttccgaaccggtactagctaattgactatagtattttaataaattgttatggctagtggttgactattagacccttaagattttctttttctttttttttccttctttcaaagttttggttatggttatggtcaataatgtgagttgtgaaagtaaagttccaataatcgtttcaacaaaacagatcggtgactttaatctctgtatattaccaatccctaaacaaatctctaatcgtgtgacttcatatagaaattgagtaaacaaatagaatctcaacaacaaacaaaaaattactgaatgagtttcaaatcaaagaaaaaattaggcatgcactaaaataaacacgaaacagaaaacactagtactctaaacttaatggaaattagggatttaattttttttttttttttctaaaacttaacgcaagagttaacctttgttaaattttatagaataaaaaaataaaccccaattaaaataataatttttgttaaataaccacattttatatataaagatatatataacttagattgtagtaaaaaaaatacaatagtaattgaaaaaacataaaattgaagcaatttatgtctaatgctctaagaaatgaaaaagttaaataaaatatattaaaagcaataatagttaaattataaaattgaaagtaaacaaatatcaaagttttaatagttaaaataataattgatcaaaaaaaaatagttaaaataataaaaaaatatctaaaattttgatatttaaaacatgcattgtataaaattttaattttatttttttaaaaaaaaaaattgtaggaattttttaaacttaaattgagagactatacataattttttttcaaaaagataactaaaggagaatattattgaagttctgtggagctttttactatctcagcatacagaatagtgaaatggtaaattgtatttcactcttaattctttatatggatccgcatataatttatgttttttttatttggttgataattcatctgtagcatttttaaaaaataagcaatgttcctttgaattaagtaatttatagttttgcaaagtaatttagtcagtccaatggaaatgataaattagtagtgcaatggaaatgataaattagtagtccaatagaaatgaaatgataaattaaaatgcaatctccccgaaaggttgtagaacaaactcccaaaggtagtactattgttcttgttttgcagacttgaatacaaactcaagacaatacaaaatacatataaatagtgtaagagacaaacactctcttctctacaaaataaagactctcttttctaaagatatgagtgaaatacaaagatgtaaaagcgggtacttgatatagctgctataaggtgtatttataatctatatacaccttattgacagctcatacacgatctgaacaagaccacaactcactagaccattccctaaaatagatctttaatcagccaaggacgttccatttctgtacctatagcatcatgagcagtaagtggaactttttttttttatagaaaaggaaagtcttgctttggttttttcctcaaaaaatctgatcaaacatattaggaaactgacacaagatcagattaatacagctggatagatagagaaaggatgagttatcaaacttactatttataccttattttctataaatagaaaaactagacaactttccttccaaatataaaagttaaatatacaaaatatgaaaaccaaataaatatcacaactgaaattaattaataaattataaaatattttgtcaaattaaagatgccaaaaatagaagtaacaatctctccctttagcactttgattgacaaaatattttataagaaaaaaacctacatcaagtgttagaaacaaaaaataaaaagtatagaaaatactccccttgtatgaaagtatactaacacataaaataaataactttttaaacggaagagttcacataaaaactccccctaaaataacggtccagagttgtaaccaacaaaaaataaataccactccccctttttgtctatcaaggagccaaagataacaaacaaaatagacaaagtcataatagttcaacaaaaaacatagataaagagcaaaagataaaaaatggaccacttaagcattagcattagatcggaagaatttcatgatgatgtccatcctcctgacaagtaggtattgacttctctccattcttccaaaacacaacctgaattcagccatacctgtaggaacagaagtagatgctagtaaaaccgcgaccttggtagaaaaatggtaacttgatttctttttttttttcactatttaaaagagggctttaggcaaaactttggacacaattcgaaaatcttaggatattctgagcatagaaggaggactagcagtagaagacataattcgaggtctccaaacagtgttccatctctttcatctttatcttttatgtttttaattgaatttttattgttttagaatgatttttagtagctaattttcttttaaggattattataatgtgaaccacttgaatttagtttatggattaatgtacttgttcaatttattcttcctcttttaattcaatttcatacaatctattttaattttacaattatttactagccatctataattgttatctatgaatgcgaatcaaagttctgaaatgtgagatttgaatatgctctgattgttatggatgcaaattaatttaagacgaaagtacataggttgtttgtatgattttattagatattttgcttaatattatctttctgattaaattttaccataggaataatatagggagtttttacatagattggatttataagtcttaactatattataaacttcttaactcaacttatcaattgaataagaagaaaaaaaaaattgagtaaattcattaattatgaagtaaaataaaggatagttgatgatcataataaacattgtctttattattgttatttatttaaatttaaattattgtcttgctttatttatttgttcttcaacaatattttattaatcaaagaacaaaagaattaattgattggtaattaataatcaattctcgtgggaacgatattttttatttatcatttgaaaaatcgtgttgttgcaaatgtcagttgtatataagaaaatataaaaactgta

SEQ ID NO: 16072 - DNA, 3356 bp, Cannabis sativa
cggacaaaaccagtctccatctcttggacgcacgtttggattgttcctgctcatgccctcacctctgaatggtccacggccaatatctggaccatcagccgccctaccaaatggcctgccaccaccccttcctcgaacaaatgggggcgaggcatctcgaaatctaccagtatcccttgtgctaccaacttcacggctgcgtgccatcgcaccagaatggtcaatatcagggttgtagcgatgatcagcatccctcctccgtacaggagatgaagaacctgcacgtagtctatatcctggaaaagaggcagtgaagtctaaagataagcaaccattaattacatagaaagaataatgcactcatagcagctgaattagagatcctgaattcccaaatgaccaattcaacaaagtttgcaaagactgttaccatcactcatgaaatcccatactgagtagcatatattacaactttcgaatactgcacttcttgttacttctcaagagaataacccatagtgccagtaaatgttattatgacatgagcaataagaccatgttcactcatacacacgattgattggtagctgctttctgcagaacaacacaattccagatcctattttcaagagccacatccatttaccccatgaatcataaaatgcttacttcccacttaaacctatatattttatctgatccaatccacaatcatgtatctggagcaaaaacttcagactagcactcatatagagagtgattagaatgataacttggaccatatctgcaacatgcagatgatgaaggcacataaatgatttctaatacagcaaagagaagaagactcccagtgcataggtttcaaacccttcagttgaaacacatctagcatcatggaaacacacaccacacaagagaaagagtccaccaaagaagaccacagaactgcaagcatccaatcaatttgacaaattgcgtgctcccaatttgtccattccttattacataaataaaagtctttaacacacccccggtattttattgtaaatcaagaaattggtgaattccattgacaccagaatgcataatcactctgaatgacactgggatgaagatattaaggcatctctcatcccatgtgcaaccaaaaaaaaaagaaaaaaaaaacagaagtggaaacatgaaaagatgaggaaccaactaaaagaatctaggttgagtcccaaaaggccatgcactcagaacccgcataaaaaaaaaatggaaatgttgaaacctatacagctgtaaatcacccaaatgaaccctattaattaaatccaatggaaaaacacaacgaaaaaaataaaaccgaaaataggaaccgtaactaaactgctgaatgttataaagagaattccaatctgcaaaatacaagaacccgcagcaccagaaacaccaagcttaatgtggcccagcaaacatcttccgtagtgacacatcacatctcaggaagaattcggaagcagccaatttcaagcagtcaaaaaaatttccatcttctgacagttgttataagtagaccaaccagcacatagcaggtttccttaagatttacagctcaggataaccattataattatgtataatcgttgacgataggtttgctataaatatcatacagtgtcatgcatccacaaatactttaaaaagccctcacaagcttcatttttgaatggcattttttctttagtctaaattgatactgaccaaaccacatcattatttccagaatttgaaaccaacatgaccgtggataaactaatataatgagacccacaaagtcaatcagtgatgcagccaacaaattcatatacccagcaatatccactgttggaatcttcaataaacataattaacccataacatgcaacaaaaatttcccaaaaccattgatccaagaccgcactaacaccaacgtgccttcatcaagattcatgttcttgcaggcaacattcggagctgtaacacataatataacaaaatttattcggagttttacactcttaaagtagtactagatccacatgttcgatatgaaacaaaacaaatagaagacaagttgtatattatgacaagcacacctcaaagtcattgagcatgcccaatactcgtgtcatacctataccagaaaagtaatggacacccaacccagtaatgagacaagaattgaccgccacatgcaaaacaatacagaaaaaaaaaccctttgaactctagcactaataagtttatggctaagaaaactcacgacactgtaacttaagctcgacttctttgaagcagcactgacaaaaaatttcttcaaaaaaccaacacgaattgtacaataaacatctaacaactcccatatgtaatcatacacgagaatataaaaatgcagaaaatgatatgacataacattatcggtaagtaaccagctgaaaaagagaaataagaacgaaagcactagctcgatctagggtttgcaaaaacattacttaccgtcttacaccgaatcccaatccaaactcgaatatttattacagaaatctataccctaaattattagttggataaactagaacgtaattagagtaaaagaataacaaaaataagaaagcataaaacggaaagaaacgtaccagaatctccggataaccgatcggatctggaataggaaggagggtcacggcgaacctcgccgggctcgtagtcagtgccacggacgccgtcgctgttagaggggcgtatgacgaggctgctgagaaggggctgatgcggcgtcgtttggtccttgtccttgtccctagaggtcatcttgttttaatcagaaattgaatggatgaggagcgatgagagcgggtctgatcgcccagatttccacaccacgaaacaaaagggttagggtaaccaaacctctcaaaccgcgtcttcgctgtaaaattacataaatgggcacaacactttctttctttcttttttttttttctttaagggcacaatactctattctttgctgccaattatatactctactaaatatttcagcacaaataaactaaattaatttaattttaatctataaaataaaaaataaaaactttttttaacctcttatctcaagagaataaaattaaaaattaagcttaaaactaaataataaaataaaattagtgagcaatgtgctcttaaaaagctctatgacagtttgttccttttttctttttaactattttaatttattttttctctttttctgaaaatgttccctccactactttcaaactcaatttctgactgttccctccaccatgtccaaccccttgctggaaacg

SEQ ID NO: 16073 - DNA, 9104 bp, Cannabis sativa
  modified_base (1979)..(1986): a, c, t, g, unknown or other
tttttttttttttttttgatggggacactataagtgctattggatgatggatgcaatgtggactttttcgcttttacatttcagatcagtgtaggtttttgtttttctttcactttggtgtatgtataacgtgatgttatttggctggttggtttgcagttggatagaaccatatttgatgatagtttgtactcatgaatccactcataagggggttgtttggatttcagtattgtgttgctaccaaaaagagaaacaaaacttacaatgctttgcagttttcaagtagagaaaatacttatactgcctttttgtcgatgaagtggtgagttttgcttagaaggttttgtctgtggcatatggagcttgggtaatttagaattgctgtaatgtaaaacatattttacgacactcacctattatgcacactaatgtgaagtaatcacttgttaatcctaacacgatttttgcaatagtatcacatataatggattatatgccaagttaaagtcataaataccatttggcaggtaggtaatttttactcattttccctttatgatcagtcgagataatttttactcattttcccttcatgatcagtcaaggtaaattttacttattttcccttcatgatcagtcaaattaatttttactcattttcccttcaagatagttacacttttcgttcatgagttattatatagtttaacaactataatcttacacaagctccaaaattacctgctacctacacaaatcaaataatttgaaatgcaaaggcagtggaatttgacaatttctataccataaataaataatgaagataatcacaaacctcacctctaattgctttggaatgccttccgcttcctttccaaaccagaattcatttcaaagaatgagaacacatgaatatttcatttgcactttcgataatttccacatacaagaacctcaacaacaatcaatgatacaatctagtccataattttcttggtaaaaaaaaaggggggcatgtgctggaaaaacatggatgccttgagattttttttcccagtaaaagtgaaaacaaaacaaaacaaaattacaacagatcaaacaattttgcacgctggtaacatatacaaattcatagagaagggttactttccaaaatgggggcaagcacaatttcatccatgcagtagccattaccctaaacaaagaggcatgaaaggacctaaagggatattgcatttcgggatagtttgtcattttcgatacaaacttccagaacaacattatatttcacctgtgaccctctttcacaaaagacacatccccagttccctccagaggtgatagcaggcgcttctcttgatcatcatcgatttctgtcgactcacgggtggtacttgatggagactcactaccatcatcttctaaaaataataaacccagaaaatcaacacattttggtacacgaggtaatgctagagctgtcattgaacttaatatctaactacatgagcgtgtgtaaacaaagtgaaaagatgaactcaccagacatttcgtggtattctggcaactgtttaactgtagttacttgaaggctttcaggcagcaggcaactacataaagcacctgagattttgaaaacaaaagaataaaagccagtcttagtagtagcctaatgaatctgatgaattcacatagaaacattacaagagtagaatctgcagagaaaatacaattgattataatatataaggttaattatgattattgccccccaaactttaatatataccaaattatgcccctaaacttttaaggtcgttaaaatttttcctgaaccattgaaattgttagatttaaagacttttgtcaaattttagtaagaaaagtctaatatgaatgaaagttcatgaatcatgatttagtacataaataatcaccaaattaataaaaatgaatgaaattggacaaaagtcctnnnnnnnnacaatctcaatagtttagggacataatttggtacaagagcaaaaatcctaattagccaatatataaatatacaaatttttataaaatggtaggtggggaagtaagtcatcacaagagtggtccttcttattcttaaacattgcctcagagagagtaactagaagtataactaaatggatgcttataccaacattaaatcaaataaactattctcagggtttatttgattagattataacttttttcaccagcaaattattatttcttttagtaaataacaaacctacttattaatggctatagaagacaaaaaacttccactacaaaacatattattgttcagcatagaacaaaatctcccgttaatgaattaattatgatatatgagggataataaaagttcctatggtagatgaattatgaatgataagttcttacctagccgagcaagccgattcacccagcctgggatcctttttcctgtcaacctacatgaaatgtcatctgtgaaatggttgcagttcttggagatgagatgataggtatccccatgatactctgaagcaacaccctcaataaatgtccggaattcagagatttgaaggtttgtgtaacccagggagagagaatttcggtatataaaacctggacagctccttggttccacttcaaaaactccactagctgggtagtcatgggctccaaaaccatactccttaccatggactgtaagtgtaaacattcgaaagaaatgaaaagatggaatttcaaaggaatgaagtcaataaattcaaatgagtcagttcttaaaagaacagagcctagattatacttaaattgtattataactagatttcaagaaaaaaacaactcgtatgacaacgcttattgaagggggaaaattattctgccgaatttcttaaaaaaaaaaaagaaaagccctctctatgatctaaatgcccttttttaatgatcaaggaccaaaatgcaaaccatatgaatatgaggccaaacctggttccgattatttgcaaattatatgcatacagtcacctcttgcacattaattaatgatttacctaactaaattcatctaaaattactatgggtttctcaaaaaactacttaagtagtaatctattaattgtaactgccctgatttataccatgtcctaactaaactcaaactgtgccataatgaaatggaaactttcacttctaaaagtacgctaactttaatgatataagaccaatagagatttggtagttcaattatttatcatccgtgtgttacagcaaggtacacaacaaaattttatacttcaaacgaatgaatagaaaagtttgattgattaaacgttaaaacacctaaaagaaaaacactttaagcatactaatcccagatacaaatgcatattcatgatttaccaagggcacacataaaagtaataataagagaggagaaacagattattcacaagagtacttatcaagaaacgcacaggaaaaattcaaagtaaaatacagcagaacccagatcagagaaactcataaaacatcaaaatacatttagagaaaacaatagaaagaatgataaaataaaatataattgtcacaaagagaaagtttgagagaccttgaatacccgagtggaaaattccaaaaccgaaccaataggtgtaactgttaacaggtgtaagatcgtagatattcaaaaccacttcggtgtcgacacaatttttggtgctatgaagaccaccgctgccggaggtgctttctgctcccatttcttacaacagtttggaattcgaaacaaaccccgaatgaaatacgagcctcacagatccacctccggctgtgggtgtcgctgtaggagaagaaggaaggctttgagccttttgaggaatgatatcaattttacctctttttcctttcttttatttatgtttgcctttaaattaaaaatcttcttttacttctttactttttgactaaaattagtttggaaaataaacttttaaacaaacaacaataaaatctgtttcaaaaaaacaacaataaaataaggggtaattagatcaccattttttttttttttttgagaaagaataaagcttaattagatcaccatttcaacaataaaaataataaccattattaaaaaaaaacaataaaaataatagtttgaagaaaaataggattaggattgctttccaattatgacctataggctaaattggctggtgacaaggtggcactatgaatatgataatatttatatgtgagacaactagtgtctctaattattcaaataattattgacatttaacatgcaaactcaaattataatattaaagttttcaaaaaaaaaaatataatattaaatacctttgcaaaaaaaattataatatttaataaagaatactaatactataccacatcattttttattatatattattgtaaataaaaaagtttgtgatttaaatgtgtggatcattactcataaaaaaataataataataagtgcaagagtaaacatatggtatggtaaatactactttttttcattgtcaaaaaaaaaaaaaaaaaaggaaaaaacataataatatggttggtatattagattttggatatgtttacaatttgggtctttttttttattaattttgtaaagagctacaaaacactttttattttattttgttaattttgtatattttagatatgatttggctgagaatttctacccggagtcaaaattatttagttaagttgaggtcttattggttagtggggcacatcgataatgtggttagtggggcacatcgataatgacaatctacagaaattaaacattattatgtaaatgcattacaagttgtcccattttttatccttcagtcattgccttcactaggaatattttttcaccatttaaaacaacagcgccaaaaacaaaaccataatctaaatctacttctggtcataattattctattttacagcacactagtaaatcaagcacttcggcttttttgacccatcagtttctatactctcccataatatcaggaatgaatcaaagcatttgttaccacatagattgttagaattgaacattgttcagaacagaagaaataagtgagagcacttcctatgaaatattgaagtagaattatacatgttgatctgaatttatctgtaacttgaaatttagaaaacaagtgtaaccattataaacccataattcatcgggaaaccagatgagttataggatcaatattcatcggactgaacaaaatgcatggatgccatattccagacaagaccttaactttgtgtatgttttggctctggaaacacccgaaaaatgtgcagaaagtctaactcttactatagccttctaattgtgaggtcactcaggtcagagaatctataaaaagcaatggccactgatctctaatatatctgcaaaacttatcaaatgaaatctgttcacagatttgtctcctagaactcaacttaggattgggattggcttgttcaccagccaaatggacttacaaaagttcagtaagtatatgcattgcaggcaacaataatagaggtcattcatgattcaacacatctcatgggccttcacatagcaacatctggatccagccttctctgaattgcagctgcagcctgtaacaatgaggtaaaggtgtgtcaagacgagacacagataaagttgtgagcaacaacaggaagagaactcaagtctgtgatcattacctccatatttccaaccttgtactggtaagccatctcctccctgagttgagcttgctctttcattgcttgtgcctgggatatagtgtgcaagaagcataaaaaaattatggactagtgggttaaaaatcaaacttcagctataattaacaatgcagaggaaactaaccattccaccctgcatggaccgcttcaaagctgccacctcttcttctttctgcttttcacgtactatcatcatttcttgcctgaagaaaatattgtgaattaggccaataattttcatatctcatcttcttcactccttaaataaacttctattcctcttgatgatgagaaatgggtgagaacacaatttcaaagaagaagataatagaagatgcttcgcatgagaacttttgataaaaatgtttcaaatttttactttctttgttttcaaatatcaccacaaaatacattcaacttattattttacaagcaaactcaaacaaatcttcaccccaaaccttctccagaagcaggcacccgactaccataataatttaaatgattaaagcctttttggcagctgaataataaaatgcaatgtattaataatgatatttggcgcaattccctcttataaggcaatttaaagaactgttggtggattttttccagcatttctgtactctgattatttgaatgatatggtcattattcaaaaaaaaattcttcagcttaatttaaaaggatttattttcattattattattattaaaaaaacaaaaagaaaaatctttctaatcaattaaacatgaataatgtaaacgctagaacctgtccagtaagttgaataaacacaaacacacacaacagcaagaagacaagccctgatatgacaaatcactttaaaatacagaaaaacgcgaaaacaatacttcaactaaaacatacctgcgtatttcttcatcattaaacactgtacgttctttttcctgaaccttcttgaaaccctttttcatttctttttccagttggtgtctgaaatgtgcatcaaggctataatacctgccaaccaaaaaattgaattaaacactagtcaacgagtaatctacattacatacatgcattatgagtagtgctgcaaataataagatacaaaagctccaaacacactaaaagctattatctcgcctttatttcattgttaacacacctataatattggtaactgataacactcttgcaaacctattttggatgatgccagtcataataatacttcaaagaaagcaggaaatatcaaatagacgtgtgaaagcatagtttggcaaaaagagtagcataatatggcagcaacagaaaaatgcatcccaaactaaacggaggaaacaactatatgaaaaaaggccttcaaatattacaagaaaaaaggaaacaaattaactctattaacactgcttgacaagcaattataatcttctacaagacctcttaaaacaggacatagagaaaagctatacaactaacaaacttaactcactttttagaaggaaaagttgcagtgttgtggtcttccatgaatctgtacaaaataccgtggagcaatttcagaattcaccaaatagacataaaagtgctttgacttgaaacaaagataataagcgagtgacttttatttgttcaccgagaaagtattggcttactctttaaacatttgtttttcttcccagttgggcaggctttccaaattaacctgcaaagagagccagtcatgtaatagctatagaacaattctcatttctcaacaaaataagtgaaaattcttctgtctttctacatcaactaaacaaaataaaacttgcaaaaggcttcgacgactgtgattaaaattacctgtttcacctctgccaaccaagcagtgaactccggtcgttttgtcctacaaaatgcagtgcacgtacggcaaatatatcaattgaataattgtaaggtcaacatatatatgtgtacgtaagcaactctctacagaaagaaaagaaaatctttatatatgtatattcatcatacaagttttattactattttcattttggcagatgccatttagagagatttcattatcagaagcatagtgaaacaatacaagacagcaattcatagtccatagctgctgtaagattaattttcatttgctttaagccgccaacttatgagtactttcacattcttcaatataatcatccatagtccacttattcaatccatcataaatcatgatctataaagctgagattttgagacatgcaaacacccagatatttatataacctcaacatgtaatgacacatagttctcacttaaattctactcttcctttcctacagtttctcagcagcaaaagagatataaaaacaagaaattgtgtgtaaagaataggttaccacatatcagtttctctgataatcccatacttcccccacgaattcgtgacagcacctttcttccctctttcctttttctccttctttttcttctttctcttctccttcttcttcttcctctcttcctctctctcttttctcctcctcttccgctccttctcttttttcctcctcctcctctctttctcctcctctttctctcttttcctcttttctctcttcctcttcctcctcctcctctcactctcgctctcctccgtgcccgaaccctcagacaccgactcggactccgattccgtaccactatcctcagaatccgagtactctgattcggagcccgaacttgtttcctccccgctgctgtatcgtctccgcgattttcgcttccttctttggcttttctcgtgttttacgtcttcaccgtcggaatcggaactttcccgcgttttccttttggatttgctgtgttttctttcatcttcggattcatggaaagaattttcccggagtttcctggattttctgtcactttcttcttctctctctacacgcttgtcatctctctccggcatcacgccgtcccgatctttcgccatttagctatcactgcgagaacgaaacttagttcaaggaggcgaaaagaagcgtacagctcagtcgccaatggagaattgaggccacttttgcacttctcttggaccatgatcataccaagtttcattaaaaacagtaacttaggcccacccttacatgggctaaattattaaacccaggtacacaattcttcctttgtttccaacaagctttaatatgggccttaactactcaatccacctcatctctcacaacaataagatattgtgtatgggatttcataacaaagttagaaaaatatggcatttttaggtttgccac

SEQ ID NO: 16074 - DNA, 9940 bp, Cannabis sativa
  modified_base (422)..(427): a, c, t, g, unknown or other
  modified_base (520)..(524): a, c, t, g, unknown or other
  modified_base (3148)..(3148): a, c, t, g, unknown or other
acataataaatggtccgtattagcttgtattataatatttacaaaggatttggggtcaacaccaatctccgacccggacccggacctggacacggacgcgaaccctagatcccggacccgggaccgaactcggaccccgacccagactcagaccctggacccgaacacagacccgaacccagaccccgacccagactcggaccccggacccgaacacggaccccgacccggaccccgaaacccaacgcggaccctgacccaaacccaggacccggacccggtacccagacccgaacctgaacccgaacccggaccccgacctagacccggacccgggatgtggacccagacgctggacccagacccggtacccgagacccggaatcgtacgtagttggtgttgggatcgagtgtattaaaannnnnntataactttacacaatcaattaatgcaagtcaataccaaaagattgtattgtattaaataatactaatacaatacaatccaacacaatacaannnnntacattacaatacggcgtaccaaaagagcccttagagttcttaatattttaatttattattaggcgtgttcaaaaaactttgaacctgttttcatcataatagttagtttttataaaaattactgagataatattataactatagcgaatacggttataagaatgaaaaaattaaaaattaatattcccacatatatgttccgggtgccaatattaactaaagttggaattatgactctattagaaatggttgatcacacctaaagtaccactctctggggtgcgacataggtgatttgagtcattcttgttgggcatatgactatgagtttgagcacgtatccgagtaaaacctgacacaatagtgataggttaaaaaaacagaaaaaaaaaaggcttaagaatacacttcgtgttgtaaagactaaaagagtaacaagaagaagacttgtcatataaagctcagctctgagtacgtaacacgaaaccttagccaacgcactatttctctctctctcaaagcgttccaaaagtgagaaacgaatgatgctcagaagaaccatatagctgggaaaaagcaaagaaccaaataaagctttaatctttatgttccctacctatcacatatagtattagtccaaaacgtattgaaattcgtttaagagaagaaaaaggagagacacccctcgatttgaaactatctcagctcttttagttttcttcctctcaaaaaatcagcatgggtatttgcttttcttggtcgaaatcccacgaaattccaatctcttcctcctctgattctcctcctcctagctaccaacaattacccaagagaacccatgaaccatggaacccaacagcatcaagttcttacgatactaaaaccccttcttcttttattcaaaaagggcccatcttgcaaagaccttatgatgatataaaatcgatttacaagctcgaaaaggagttgggaagaggtcagtttggggtaacctatctctgtgaagagaaggccactgggagaaaatacgcctgtaagtcaattgccagaggaaaacttgttactgacaaagacattcgagatgtcagaagagaagtcaacattttgcaacatcttacaggtcaacccaatatagttgagtttaaaggagcttacgaggataagcataatctgtatttggttatggagttgtgctctgggggtgagctttttgatcggattacagctaaagggagctattctgagcgtgaagcagcaagaattttcaggcagattgtgaatgtcgttcatgtttgtcatttcatgggagtaatgcatagagacctaaagcctgagaatttcttgcttgttaacagagatgaacattcacccattaaagccactgattttggactctctgtcttcattgagcaaggttggttggctgtaatattggtctcattattattgttaattatttttacaaatggttctttactttttttttatttatgtttttggctgctttaatttttcaaagagaaaatgattttttttttttcaaatttttttttgaaataataagtctaaacacttaactgatattagtttctatggtgaagttataaatcagtttgtgttttttgggtcacatgtgaatagctgggaacgtatattttaagctctattttcatgaattatattcaacaaaaatgatatcatgataatgactagtcagattagtaagtttgtgtttacatccgaatgaagtcaagagaaccaagtcaagaagtcaaccaagtcaaccattttctaagtaaagacaagaacaaaagtccaatattggtccatctcatgatatgacaacgacatcatttgagtcccagtaaacacgtttagattattttatattattattactattattattttgaaaaaaatgattttgtgtgttcatttcaaaccatattttagttaacataataaagaaagctttattcattaattatagaatctgcataacaaagaaactcttataatgattggcagttcaatgagttcactagaaaaacagagtacaaaacttgtaaaataaacaaaacaataattaattactatgtcaaaagttatgagtgacaattccatttaatttaattttttttaaggttaattaggaattttttttttcaaactttcacatgtaacaaatgttttctgaactttgaagacaaagtttggagagcatgatttagtatacagataatcaatgaattagtaaaattaaataaaattagacaaaagtttttaaatttaacaatcgcaatagtttagggagaatttttaatagtcgaaaaaattcaagtacataatttaatacatgtcaaagttcaaaattaaaaaatcttaattaaccataattaaagaaaacaattttattgacaaaggacatttttgcaggaagagtttacaaggacatagtaggaagtgcctattatgtggccccagaagtattgaggcgaaattatgggaaggagattgatgtttggagtgctggagtcattttatacattcttctaagtggggttcctccattctggggaggtacatttatttcggtatctttcattatatatatatatatatntatatatatatatacaaacaattatatgtgaataagtgtatgtatatataatgaacaattgattatgttagagaccgagaaaacgatttttgaagcaatttgggaaggaaaacttgacttgcaaagctcaccatggccttctatatctgcttctgcaaaggatctcattgcaaagatgttgaggatagaccctagaagaagaattacagctgctgaagcccttggtgagtaataaataaaaacaaaaaaaaacaaaaggaattaaatattcattgtgtgaaactaagtttgacagtaattttatttttattagaacatccatggctgaaggaagatggtgaagtctctgataaacctattgacagtgctgttctaataaggatgaagcaattcagggcaatgaacaaaatgaagaaacttgctctcaaggtaagtataatggaataaattttaatgctgaccatattaaataaatagattttgttcaataaattttagtaacatttatgttatgtttggactctgttgtaaggtaatagcagagaacctttcagaagaagaaatccatggtttgagacaaatgttcaacaacatggacacagatggaagtggcacaatcacactagaagaattgaaaactgggttgtctcgattgggatctaagctttctgaatctgaaatacagcagctgatggaagctgtgagtattattatttattattatgaaattaattagcataggattcaaaatcaagtaatttttacgtaattatcaggctgatgttgatcaaaacggggctatagattacatcgaattcattactgctaccatgcatcgacacagacttgatagagatgaaaacttgaggaaggctttcaaatattttgacaaggatgaaagcgggtaattaatacatcttcttcttcttcttcttcttcttcttcttctttaattttcatttatttaattagttttacttttctaatgttacatcaaaattcttaacagttatatcacaagagaagaaataaggcaagctatgactcagtatggaatgggtgacgaagctatcatagatgaaatccttgatgatattgataccgacaaagtaagtaataattttttagtttaacagtttttttttttggttttctaacattaattttaacataatatttattaattttataatattattatctatatttaaaaataaaaattatgtagatattttatataaaaaaaaaattaattttattatatatatttaaaaataaaaattacatcaatatataatcacatctatatataaaataaatatatttaaactttaattttaccacaaattttttgctttaaaaatgattaatgatataaatatacttttttttttaagaaaaatataaatatgcttttaataatttgtattttgtacactttattataactatactcttctaactacaaattaagaatgtatctatcactattattattttttaaaaatatatgtatggacataatatataaaatgtattttaaaagtaattaaattctctaatcaaattcaaattttgtcaaaatattttttaatataatctttatatatagagagagattaatataaaataggtataaaatacgtataataatgaaattcttttattgtatatataaaatatgtatatacataatcatatctaaagagcacaccaatgtagccgcaatagctaaaacaaatttcaaagatcaaaattttaaatcttatttaaaaaattaaaaaataaaaatacattacctaattaaaaaaattgaacatacatgtattgcactttataatatcacttaattaaacataattaaaaagaaaactaattatacgtgcattgcacgtaacatcaacctagtaaaaaaaatacatcaatactgaaaaaaatttatttttattttttaaacattttatttacaaaaatacatctttagtaaaaaaatattaaatcgtgtttttgtttgctttatagattatttatagtgtaatatagttgtcatgagtttatttttttagttatttttggttgttttatagtttatttatggttgatttttagttgtcgtgagattgatttctcgttgttttttaattatttttttttttattttttactaagtaaagtgtatttttgtaattttaaaatttataattatatttttgtattaaaaattataaaaactgtaaacaaaatataaaagaagattatttttgaaaaaaatttctttcttattatatatataattattttcttttacatctgattttttttttttttttttttttttgtgtaatttttctttttcttttctaaggatggaatgatcaactatgaagagtttgctcacatgatgcggaaagggacggtagattatgaagataaacaaagataaaacattagtgtgttaaatgtgattatggtaattgctctatatagtatatatatcttgccttttttctcatcttttgaataagtttactgcccaagagtttgtggatgttcaatgttgtatgattaatcaagcaaggcctttccaatttgtatgaaattacaaaatatccctttattaagcctttgttagtttgtttgtgggctcttcttggtctatgtgggtatttgggcttttattgaaatttgtcataattgttatgtttttactagaatgggtaattgcaaaatccctattcttttataaatattacacttaactcactatacaacatttttacggaaaaatccccaaacatattttgctgggacgttggataccatctacctacataattatatgatattgtctattttaggcctaaatccttacagttttgtttttggacatctttttaaaaggcctcatacttatggagttggtggaacactttatattcaagggaactcttgcgtatttttccgatgtgagacttgggttgataccccaacaatccatccatcaaaccaaggaccacatacttgtggcctttcaaccttttgtcgtcgttatcaccaatgtaactcactgtctaaccatcaactttgtcaagaagactttcaacaaaagtattaaacaccgatctctatcttgtaccactgtaattatcagcaaaacacgtcggctgatcatcataatatcaggcagacttttgttgacctcacttttagccaacgacagtgagtcaaattaaagcgattaagaatgattaaataataaatatgaataagatttagtaaacaaaaccataattataacggtttggccccttgatgatggtaatagcctactccaatttagtttgtattaacttgtgagataagaaccaaggaatccttgatctccctcgaaagctcttacaatgatctttgagttttacactcttgaatctatttttatttcttataatttctctcgtgtgtttttctaaaaattttgtgtccctgaatattgagatgactccactatttatatggatgaattacatcaataagttttccaaaactaataagaaataaaatgagaaaattgtttactttctataattacaacaagcaaaacagaaaacttggcgagttatctttcttccttaatattatgtatctatcccatgaagttagatatcgttgtgtctttcaagcatgaagatatatgggacatctctgaaatatctaacttggattctctcatcggctcatgcaagctgcccacatgttggaagctggtcggatgttctcacgcgctatactcggatgttccagcttctgctgactttgagtatcaaatctcctagtggagtcttctatccaggtcatagaatcgatttcatatgtcacccaagtggatgccacgtcaccctatgtagaaatttgaataatatttgccccccaagtctgcgctggaacttcttggtcgcatgtggacttatttagtcatgaagatgattggatgggtgatgtgtttgggtttttctcttgattcgacgtgactggttgaacgtctctttgatgtcaggagcatttaaggcctagctttgaaagttgtacctcgagtcacataatgaagttgtatgataccgcatgtgtgacgattgtactattcaacgagtactaacgtcctttttcagggggaaaccctaaagttcaaattttgaattactttttagcccttttaaccacctatataagggataaaaattggctttactcttttagccatttttatattgcataacagagcaaaaattttcttttttctctcaaaatttttgaagaaccctttgctggaaattcaattactagagtcgtccaaacgtactcaagagtttgcgaacagtaagtaagttatcttttcgtatcttttatgaaatttctttcaaatacgtgcattatttttttcaattttttcctctactgtaatattttgggttcttgaatatgttcttgactgatatgagacttaggagatattaaggcttataactttaactgatatccgtacgggtcttttaagcttctaatttcttactattttggctaaaaattatctgagattactcactcacaggcttctgaatatcagcattaatttaaacttctgggtttagggatttcattaatggaatgaaattccttcatttttttcctttgaatcgacctggtcagtatatcagatatgttttaccttctataactccttctagctctcaccttttgtcctccttctttgtatatgaaccctagtgacttttggggaggtaaccattacatcaaacatgatctccttcaacttctctatgtaactcatcctagactctgtgcagactcgtctccatccagtgaaagctcttctacttcaagctttgatgattgggaagttagtagtgatcattcaaaatcttcagaacccatggtgcaacatcatcagtatcccagccagatcagcggagaaggatacggttggttcatctaagaattgaacaagggttggagacattatctccctgtttcgtggacttaaaaggtccgacccggtactactcatacactgctagaaggctgactagctccttcgaccagacataccaccctagatgaagttgtcatcactaaatcgagacacactactgagttgaaaccatcagccaaacataaaaggatggcaaaaataaagcaaacattagggagggcttcgaagtccgacccttattttgcccagctatttgtgatggtgagtgtgaagcaagctgagcctccgaacgaggatgctaaaggtgttactagggacatcaaggtccaagagattgaggaccagggcgaggttcgtcctgacgatccttctgatggagtggaagaggaagaagaggaaaaatgagtttaaattcttccttatggtggatacaacgaggtcagagagcctttctctgaaatgggcaatgtcttaatggagggccaagagtatgaggaggcctgacctttaaccactaaaggaaagaagggtcatcaatgggtctctcctatgtccatacttacttacaagagattgaaaaatctcttcgacaaaggtgtcctcgggggagtagaggatttcttaccctgtctcgggcagttggcaatgaacccaggagaagggttatgtacatggtctgggacccatgccaagcaaggtgcactcttgcccttgcatttgtactctaagaaaaaggctaactactacaagatctgcctgacccaattcactcccaagggcattaagtgtatggccgcaatgttcatgctgtttgccacacagggatggggccagcctttcgctcacgataccaacatgtttttttaacttaaagtcatgtccaaaagaaaacaagccgagatatttttatttcccaaaatgaacaccagtggctgagcaatactacagacaaggaggtgtctaagattggtggcttcctcgaggattattatattgtcaaatacatggatgttgaccacctttctttccaacagatcccctcatatggccgtcctccttttaccttggagttaaggtctagatgggcttggaacatttctctcctggctaccactgccgattttcttaagtacagactttatccgtctaaggaggctcaaggatccgagcaagcagatgaaaagattatcattgagtagaaggctccaaaaaagaagaacattcccaaggggcatcaagttctgactaattggcctatcaagataagagaggaccctgaggtagttgttcgtcctactacccctataatagggaaggggaaggtcatagtagtagatgatgataaggatccttctgacgaggataccccatcttttcttgtttgagagggtgctccccctgaagtccaaggtagttattgctttatttatctttatttattcttacttgtttaaatatttaataagagttttctttagtgcagccttgtcaaagaagatgaaataagcactcagtttgaggattggtaatgcatctgaccaaaaatcacctgctaaacgatcaagggtggaagtttctctatccacaagcattgccccaagctccaagacaccccaagtagaagctgagaggagctcgatgaccgtcattgtagacgttcttgagtctcttcctctagccaagaagacttcgaaaactcaaccttcgaccgctccgaccaaaaactctaacggggccagtactgaatggccttgtaacgccctaatgctaaggcacgctacagt

SEQ ID NO: 16075 - DNA, 12259 bp, Cannabis sativa
aaaaaaaaaaacataaaaatgtaattttttttttataaaaaataatgtcgtatgtaattattcatttaactaataggggagttataattacatcttatagagctcatttagtacaccataatatattgtattaaaatatagtggattgtatcatattaataattctttcatacaatattatgtttggtattgacttgtactaataggttatgtaaaatcatatattcttcacaataaacttgaccccaacctcaaccacaacctaaactcggacctgaacccgaacccagacctagattcgaaccgggaactagaccttggacctaaacctggacccttgatcccaaacccgaacctcagaccccaaattccccaaatttgaaccaggacacggacccatgatccagacccaaatctcgaacctaaagccggacctcagacccaaaatcaaacccaaacctagaccatagattcaaacccaaacctagaccctagattcaaacccaaacctagaccctagattcaaacccgagtttggggttcaggggtctgggtcctggaccccgaattcaaacccaaaggctgatcttgacctggacccggacctcggtcccagtcccaaatgggattcgggtctgggtttggggtccaggtttggggtctgggtttggtttcagttctggggtccgagggtcggggttcggggtctgggtcctggttttgggtttaaatctggaatccgggtcggggttgacccaagtgtcttttataaatattataatacaagctaatacatgtcatttgttatgtatatatattaaataatacgactaacattatattaaattattgatcgtaataattaatataatacaatattctattcaaacataatgttatttattatttaatataatacgacatttgtatgatctaccaaatgagcccatataattataagtacactctaatatttttaaaaaaaaaaaaaattaaaaatcactcttaatatatactttttttaaatttttttccacattattattttattaaattcaataattattttaattttattttcataatttttaaagttatttataattattttattgtgtattaataaaattttatataatttttattttaatatttttaatatttaaaacagattttatttttatattttttaagaatacatgaaggaagaatttttttttttttttaaaaaaatagtataaagtaaaaatataatttttttttttaaaactccccaattattatcattatttttatttttttgaaaaattaatatcattatttttaaaataccattatatgcacaaatgttttaacaatagcagaagttacctttggaccaaagcttacgggccaaccctgaacttatggcaaaaaccacagttggattatcagggaggccctaattggatggtgatactcgcccggactgtaaaaatacctttaattaatgaataaataatcttgagcttctcccacctatacccgcgcgaaccccatagcttctactcgaagattctgaagctccaacctggtcgccgccacgccgctgccgactctacctacgccgtcttttccctttgttttgattccagaggtgagttttctggtttttcctcactttcttttccatgccattgctgtttgtttgctgaaaaaaaaaacactcttaacttttggttgtttttaaaattatttctgggttagtttctggattatgagtagtgtctgtgttagttttgtgggttggttgtttgttgagcttcaaggtacttgtagggtaaccgtaacgtgttattcttaaactaatggttgatgcctattaattgtttgataaaatgatgcaaagaaactatagcaaataattaccacgacgacatgaattttaggaccttagaggaagaaatcacagtgcatattatgtttaaacattttcataaacccttttatgtcttttttctaaagtaatccaaacccaatacgggggaacaaactcttttgtagtgaatctgtcatttgatactctgtcaacatgttacgcaaaatttagttttccatatgaaaaggctttttgttagctaatgtggtgagggatctactggctgagctttggcctattattttgttccagttcaaaggtaattagccaacgaagcagaaagcattttatcatttaacagtgtttaatttaatttggaaagaaagttggattagagaaaggaaaattgaggcaggccattttcatgatatattttgtataatttgtgccaatcataatattatcatagtttagggccagatacggacatgaatgccagactattatattttggcactcaataaggaaagagataacttagcaagaagatgggctagatagttagccattctcttataataaacacaacataaatatcaatgaaattcttagattggagagctatatctctaaaactactccaaaggtagagtgcttcacgtcgttattgttaatggcttcacacattctttggcaatccatttccataatcacaaaaatatcccaaatgcgtacatagaagaaaacactaccagactacactatcaatacttgcagcaatgaggtttaggggacagaccaagggatagctgatgagccaccatcacacttgcatcatctcctaaaaccactttgatctttcttttcagtgagttaaatcgtgtcctacatcaatgttgactttgattctaccaacctgaggtgaatgccaatgacaatcagcttcaatgctctcctcttttgtccttttttctttttgtgatgagtgatattaaggattttgatttttttaactaggaatacctatttgttttagagtatataaatgttaattttgtaagtgtctcttttcatttatttttactgtttgataaaagtagtgtatgtttattttatataacaaactaatattacttaaagaaataagattaaaaaaaaagctaaaccctaaatgtcgtataggaaggaggagtttcttcttccaaagtgaaagtgttggacttggagtttctccttccaaactgcgaggattttgtgaacaaaaacagcgggtttctgaatttctgtaaaagccattccacggcgtcatcagcttcaccttgtaagagttgcctttgatggagtttgtcagccctgaaggtctccgattagatggacgccgtccgaccgaagtacagctctctctctctctctctctctctctctctctctctcaaatattgcttttgaatctttaatttatggcttataatatttataaaactgttttttctttggtatcagatgaggcaaattcgagcagaactcggagccgtggctaaagcagacgggtattaatactaaacatttttgctgtaatacaaactcagtttctggattgataataataacaagaataatgttgtatttatttttgtatcagttctgccgtttttgaaatggggaacaccaaagttgtggctgctgtttatggcccccgagaggtactactccccaaaaatgctgattatcgtttcatttttatctcttcattttccaaatcgatgaagcatatttgaggttattataattttttttacaggttcaaaatagaagccaactactaaatgaccaagcattggtaatcactcatacttatttgtttgggttatttatgtaagctggtagtgaaatgctagctgctcaacttatctgacaatcagaaccatgtagccatcaatttgcagttatcctacattaacttgtagtttttgtcatataattgattattatacttgcatagggtctcggagtgtgaactactgttagcatttgatgaatgtatgtttaatgaggtattgattatgtactttttaatttacaggtgcgttgtgagtatagtatggccaattttagtactggagatcgcatgagaaaaccaaagggagacaggtttggaccttatttcccttctttatcttgcaagtgtatgtttctcttgggtttgggagattgatgttaaatgttgttttaattaggcgatcaacagagatatctctagtaattcgtcaagccatggaatcttgtataatgacacatttaatgcctcgttctcaggttttattccaactaataattttgcttaccccttttttctgtctcttagtctaaatgattgtaaagtatgttatttgttaaaagcatttttgtttttgctctattttgcagatagatatctttgtccaagttctgcaagcagatggaggtaattgacattcataaaattctatgtctggtcactcataagctctctctatctgtctcctttttttttaacttagatgctgtttagtgttggcaaatatttccaggaatgtacaggatgtctcattgttttgatattatagttgaaaaggtttgctcttaaattttgaatatggtttcaattctgcaggaactagatctgcatgcatcaatgctgctagtctggcccttgcagatgctgggatcccaatgcgtgaaattgttacttcttgtagtgcaggctaccttaatagtactcctttgcttggtaatctctttgtgtttcttgttttagttttatattttcgcaattattctttcagaagcaaaattctctctctcgctttatcttgatatgtattaaataagtatagtaatttgatagcttatagttatttgctgttacaacagatttgaattatgtagaagatagtgctggaggacctgatgtcacagttgggattcttccaaagttggacaaagtgactcttcttcaggttacataatttgtttgttcgttttctattcacaatattaagtatattatttgtgtaattatatcttattttctcatgtttatattacaattcttccattattgctggattggatatgaaactggctgcataatattgagcttttctctgtttcaaagctgaaaccctttgcaggttctgacatgaagtgttacataataaactattttaaggactccatatatcaagatgtttttaattaagcacaatttcctctgaaggagtcatgccaactttctttgttaacaaccttttgttgacttctgctaatgcagatggattctaagttgccattggatattttcgaaactgtaatgcaattagcaacggaaggttgcaaggcaatagcaaaagaactaagagaagtaagtatataaacacatacaaaccagactaatattgcaacccaagcataaaacaacaatgtttttgtcacttttattgttttggtatagttttgtgatgagtttttatgacagatactgctggataatacgaagcaattagaatttcgacgtggaggataaatcgtaatgaatggtaaggagactatttatttgtactcttcgaaaaatagcattgccaggcaaggtctaactctcaggtgttgtatttttcacagggttaaaggcgatcactctaccattgggccttccaaatcaggagagactcagttgcattcttccatacacatctttgaagaaatcattttggcttctagatatttttcatttagatgaattttaggaatatttctgatgtaatcaacaaaccatactggatgccatcttttagcataggcaccaggcactactaaagttggagccgattgaggataattgtgttgtgtttgaaaaaaatatttttcagtaaaattcgaatttattttattgaagcagataggaagttatttgtttattgatttttaatagttacaattctcggtcatcatttagttatgtgataaattaaaggtgtacctattggcaacgcagtttattaattaaaattagggtagttattagttattaccattaacctttaaacacccggaaacatcagagtggcgcagcggaagcgtggtgggcccataacccacaggtcccaggatcgaaacctggctctgatatttgaatatcagattggcttccaatttttaagtgattttttgatgacatttcctataatttatcagggtattatgtatgatgatgttcatgtttgtggtcatagttgtgtgaagctaaaattcaacttattgctttttaaatttcaaattgtttgtttatgattccaggtatgattccaggtattattattttggagttataagtttgaatgtttgagtagttgaacgctcgttcttgttgtgataaaattactctgacaagtcaaaatagaatcttattagtagcaaacaccatcaacaatcagagtggcgcagcggaagcgtggtgggcccataacccacaggtcccaggatcgaaacctggctctgatattgactatcagttgggcttctaatgctttattttttgtgattgacataaggtgtttttggtggattttttttttttttttttttaaaaataatttgtgtttttatattgtgtattgtgttaaatttttattattgttctatggttttttttttttttttgaattaattaaactcattcaaaacaatagaacgcacttcagaagaacaatcctccaactgaagcacataacctgtagagaaacaagagtttcttgccaagcaataagccaatttgttcgcagatcgtttaacaaaacataactcaataaaaaataaattcaaaagtaaattcctaacatcttgaacaataagatcaaactgcgaggacataaaaactttactttggactgcttggacacacatcaaactatccgtttctaatactatattgtcccaggcatgagtcgcaatccaactcaacgcttctttgatgcctacgatctcagcaatttcggattgtaaatttttattattgttccatggttgttttttaattgttctaatattgttttaattattctattttattattttataattattttataaaaagataatatttttataaaaaattatgtcacaataaaattataaacttttattcataatgtaatatcttggtgctgactcccaagatcatttttctttggacattttggaaaagaataataataagcaaaatcactttttacgctatttatttttttttatttttccagttttttgctgctacagtaattactatataaattgttatgtaaattttcttaaaaattacaataaaaactgccaaaaaaatataaaaataataagctgcaacaattactattcagtattcagcaaaagaaaataaaacaaaggaaaagaagggacatgccattttttaaaaaattacaggctttaagattagtttcatcccatatcctggaggggaccaagacttgacaacctctacgtaatcactaaccatataactttactatttctaaacatttgaacatcctaacatcaactcaacatcttatattcccaaaaaaataaagaaacaaacaacaaacaaattgaggctctcaatcttcatccttggaactgtctttggccttcttctcttgaacatcagaaaccgagatggtcgctgcaaaaacttgaaggaacaaccttgagctgcattcgccctgtccattcctcgccaggctttaaagttataggtctaacaattgctgctccatcaacacaaaccatctgtttgtattcctcatccccaaggtcccccattgctcttgattttttctcccatggattccaaaccactgtccacaaagatacgaaagattaggaaagtttatgaactttcaagaattagctgaatctattctttttcacacaaggaaaaaagaattgtcttaacaacctatgcatccatttttctgtttaggttggcttaaagtgctccaggggtcccaatctctataaatgtatcttaaagaaacagcttacctatgtctggcagtccctcctttcttatcacgaatgtcctcttcttttcatgatcaaggatagcaattgcgttaggcgcactgacataaacacgatccacctagcagggtaaagaagtgtttgtaagaaaagttattgatttcttctgccatgtaaaataaagaaaaaaaatattgtggcattacttcagactcgaatgttatggcgttcccttgctcagtgaaccgctctttttgacaaaggttgtctaaatagtcaagtgtctccaggccttctatcctcacttcactatgaagagataataaagaaaaggtagaattagaatggagtcaacacccaagtaacagttgggaaatcctctaattgaggttgttctatacacaagcaacttggtctctaggatatattctctaacaaattacaaattttatgatgcaaacgggaaaatttagaccagtttgaactatttttcataccttatgtcagagactgagaagtacgtgtggtaagcaaatgaaaaactaaaaggctttccatttacattccgaatacgtgatatcatattcaaaactccatcagctgccagcgacactctgagacgaaattcaaagctggaagggatagcaaagattctgttagcaaattcaaagaaaggcatttgtccacaccacaaggcttagccaatgacacaatacaattgaagcaaaatttaaacaaatccataacgagtgctgtccattcaactcaaaaccaatgaaaaggcagataaagctaatacctatggggccagcatttcatgtcatcgtcagatggtttgagtagaagatcaacaaaagatttcccatgggaatcatttagatggagaggtggagggctatcttcgatcatccaaatcttatttcttgcaaatccatgcagttctgttgatccaccattcccaaacttcagaagcatgagtgcaataaaaatccatcagcaagtttataatggatactgaattaaatcaattgcaagtaaagtaaatgatacctgagggaaacagataggaattcctcccctcattgctttcggggccttgaagatcgcctacaaaggattaagtacaagctagagaataagtaaattgagcaaccaaactcacctcaaccatcaaaccatataagagtacgtttagttatgacatggattagatcatgtaccattagtgaaaaaaataataataataattacagctaaaaatctggtatcagaaaccaagcaagtatgccaaattcattgtttaaaataaacaagaaaaatcatgaacagaatatggaccaaacaaattgatcagtcaactaaaggatacattccaaccacataatatgtcaactataattatatggtctatctcaatcattgcaaagcaaaattgtactttttctttttaccttactactagtgaaaagaagttcttccccatggtcattcctccatgaagtgacctgtcctccgtacaagcttacctatgttatgaacagagattcattaatgtcaaatctcatagatatataactaaacaaaacataacatgttatataaaggggaagtccctctttaaaatgaggtttagattcttcaattttgaagaccatgttacatagagatgttcttttcaggcacaaaaaaaaaaaaaaagattcatacccttgctgaagctccatgtgggctccgaagcacaacttgatcgattccattccagtcttttgtcatctcagtagccgccttattatcccatactgctgctgctggatgacccatttggaaaataggttgaaaaatcttttccttaactctcgacaaagacctttcaaataacaagcaaaattaaaatgggactacaagccatatttaccggcagaaaaatctaaacttgacccaaccttcatttcatctaagaaaaactgtgatctaggactgagtaacaaggggaaaagaaaacccagtcaccaatttgatatcaccaacctctctaccccacagatctagaaaatcctagcttgggataatctgaaaatgccaattcaaataataatgttgttgaagctctaaaacccaaacacacaaagtggaaacatttggcactcgctaaggaatctctcgacacctacttagagttcataattaagttacaagagatttgtcacattcatatacatgtgaagacaaagtaaacaaaatagccataaggataagatagcaggcaaaagttctcctttttatttcaaaaaaataagcatttattagtaaagaatatatatgaaaactcatctccctaataaagaatcccatttttgttttttaatcttttttaaaaggaatagtattgatcaaacttctatacttgtatataaaattcactgtacctaccttaaaaagagttgagctgagacttgagagcccaagctatgacaaaacccactaagatcgcatacaagcaaagccttaaccaaactcctctgtggaagaccaaacgaattgaaccaaaaaaaacgctcaaaacttaagaaacaaagcaatgcccatttaagaacatgaaaaaaggctcagaactctaaagttaaagcaacccttttccaagaaccatttctatattctgaagtttacattaaacaattgaaaaagggaatataaaacaagaacgtgaaggttcagctgaggaggcaaaacaaaactgagggaatcattaaatggtggtaatgagaaaaatgaggaacaaagtggagaaaaaaaagggtgcttgtttattcagttgcagagagatctaggagcaggaataataggacgtggattaaatattacgagaagaagtacatgttggttgtacaaaaacagtcaaatttgaaatctgagaattttggtgatggatatacagatactattactattagtattcatttatttaacatcccttattttaatatagtagcctagtcggagtagggtcatctcatcttcccttttattatattatattggtccatccaaatccaatggaaatcaaaacacatgaccacgtggaccaactaccaaagataatgacaaattcagtcaagtcgcctcctaacacctgcttttgtttatcaaccgtctataatgctaattctttttcatcttttttgtttaggtaaaacgtgtcaacgtattaaaacagaggacaactcataaaacaagattagtgttacgaaagagttcaaaatgcacaaagggccggataaaaatcaccatttaaaatttatggtaaatcattgcttcgaagaatgagggaaaaaaaaagccaaaaccatagtggttaaagaaaacaaatttatccatgatagtaggtgtagaaaattaacaacggttatcaaacaaacaagaataatccaaaaatgaggaaaaattttcaaaaataactgtggcttataaagtatgcggattagcattccctactgatttattgaaagagcaacccacaaaatcacaaagcagagagcagctttaattggactggatttgcttatgaattaatctattattagaaaataatatattttattgctgctataagcaattattgataataactccaatctcaattctactataatttagcaaaactaaacaatactaatatattatttagtaacgactaacatcagagtcaccaagtgttgcattattagaattctatgctattttttaatgagatgataagtttttttttttttttgaaaaaaaatggaaaaatcagaaagtgatggctaactcatcttcataccaaatcattatattacaaagccattctataatttctatcttcttcttcttttggatattgcatctaattaatttgtagttatattatctaaatatatccatgtaatttttttccttacaaaagaaaaacctgatattgttttgaaatcgtgttataaaataaattttaaaactaaaattgactatataattgtcaaaatgaacaaaaattatcagaaacaaatttagttcaacataatttttatttaaagaaactaatcaaactagttcaattttggtaaaattaatattatttgtaataaacataattagatgtttagttaattagatataaactggattattttattctgattaggaatttcatatgcaattttgtttttttcttcagaaacacatctcaaaatcaattggctgagtggacatagtcactatctgtataagtgcggatcggataggatgacttgctcgcaagggatatggctctgataccatattgagaattggttccatctcaaaaccaattgg

SEQ ID NO: 16076 - DNA, 7505 bp, Cannabis sativa
gcaagtcccaaaaaactccctgttctcgtcattgtagcagcatcaaatgcaggctcaagagacttgccactatgcagagaaagaacttgaggaacagtgtcttttctgttgatttccacacgggtacccattatagaaataacagaattaggcaccacaaatttattaaccccctgaaaagacttgccagacccttgttctatggaatcaatgaaagatggtctgtcattcaaatcaatatttctcataaaaggttgcattgatgaagatgatgacgcaggagatggactgcggtggccatttcggtgatggaacaactgctgcccttctgccttcaaattcaatggtagaacatcactatcatcttcaatggtatttaaatccaacttgaaccttttggatttttttggactcgcttccacagaagattccccagaggggaggccagacaatgccggaatttgtttccccaagtcctctccaccctcggccacattgagatcaatatctaggaaatcttgcctctgctttgaactactatcactagtacccccaacagaatgatttttatcattgtcagaatttctgcgaggagaagctggtcggaaagcactagtagcagcagatcctttccatccaagagaaccctcaaactgtaaaggggatactgacagtccagaagtcactggccttgaagcagaaacaacaggaacaggggtagatacaatattagcataacgttctacttcatcagagaaaagttcttcatttagatcaaaaccacaaggacctttgtctatgttcatttttgtttcttctacagcttcagttacttgggaggagtctacggcatgggtgcagttttctggtaccacatccagattagcgatgtttctcacctgcagatcttctgtaggataagcctcagcagaatggctttgagcagttggttcctccttcgatgaaacttcagggggtcggtcctgtttttcatttatggagtctggactacctgcctcctttggttcgcctgatgaaattttctcagaagaagaacaactaaatggtcctttgagatcccctacttctctttcaacagcttcagcaacgcgccgagcaacttctagagcgtcaaccccaaacccaatatcaaattctgaatctgatcttcttcggtcagtagcacgagaacgattggaatccatgacaggcttagaaaactcataagcactcctaaaatctgtatcttcatcgctagcactctccatatcttcatcactagaactcttcttatgttcatcatccctaccatactccttgtcatcatcaacactttccaggtcatccgtcatagaagaagtccctaaatcttcaggttttgccaaagaattatgattacccgatgagaaatgtgacgctttagagcaacattcactatcatcaacaacattgagattatttataaactttgaatccccaatcacactccttgaatcagatgcagatgccactgcaccaccaacaggagatagtttttgacagctatcattttcattcagtccgccattattttgcaaagtaggttgcttcataagttccagcgaacttgaagcaccagcatctgatgaaacaataaaaggttcctttggacttggcaacgaattttcagctttgtctgcctgcttttcattttttgtgagctcatttacttttgaaaaatctggctgtccctcaacagtgccattcttaggagccacaaaactaggctcagatggtgtgcttcctccaatagaacacacagtggaatcttcttcggtagggcttttctcaacagagtttaagatgataagcgctgaaggattggcagttatttcatcaatgttagcactatttgaacttttgtcaatgccttgctgattattaatctgtacatcatctcttcctgataatatatctgagcttattatctccttggcaggttctgcagtttgcatttcctcccctttaacagttccttcagaagtagagacacctgaagaagatggcctatcttcatctaaaataggctttgaagtcccatcattatgcaataaaccaacattgtcgacaacattgttaactttatcctcacagctttcctgcttccagctatcaaacagaagtttagctctgtctttaactctagaacttttgtgcccaagaagagtctcaatagtaatccagattcctgaagattttgacttttcattatctacatgaagcttttcaagtgcttgtaataaagcagtaatggattcttccacaaagctttcgtttgcatcggtacataactgctgtgcttcttttagccatctatcaatgaacaaaagaccatctaaattaatgaaacggtcaagacaatctttattctctgtggcagcaatagtgctggccacagcagtccactgccttgttgcatcactagcattcttcacaccacactctttctccttctgcattacagttatgagctcctcaactcgagacagggctgtgagcccatctttcatctcagtcaaagtgaaaaaatcttccagcgtcatactgcttcatatatcatgcttctcaaattcaaaacaacaattgagcagggataatgttctatttcccatacaaaattgttgtaaacctcagtgctagttgattgaaattactctgaaaacacaaaataaagttgtgtttagttattaaaaagaatcagatcaagtcacttataatctaaatgactgaatctgtaagagtaattatgataaaaaaattattacaactttaagataaaacattaacaaaaataactttaaaaattactttataacactaaaaatcaatgatgatataaaaaaaatgtatatatttgtaataataataactagtcagtcacattagcttagccctatcccaataaacattcgttaaacttatatgttttaaaagaatttgaacacgatagaaacaacaattaaaaacattgaaaacatgagcattaattccatctctgaggtgtacaagatgtgacagctacaaaaacgccctcaatatcttctaatgaatgtattttccatgccaaacaaacaatctagtgagcaaaactaattagaaatgccccataaaaataaataaataaataaataagagcttaatttgccagaaaccaaaactcaaatctcaaacaataaatgtattaccaatccctctctagtaacatttactctatgaaccctctacatttcaaagaaaatacaaaccttaagagacataattttgttgattaaaaattcacaagaaaaagcagaagatgttgagcttctgattaaatgcttgtagttcttacagatcaggtaatcagcaaaagcaatcatacattaaaaaaaacagagacttattacttgtcaacatgtgtcaccttaaggagcacgataaaatatgcttctcatccaaacagtaaaagattaaccaataaaaatcacatttacaaatctattcaaataattaggtcacgtataaaaacccgaatcaccattaaaattagaattaccagaaacttcaaagtctggatagagccacaaggaaggatcccaatactaaatcttcaactgcgatttccagtaattgctatactaggcctgaaacagacaaaaaaaacatattataatcaaacgataaataagcactagcaaacaataaaaataaaagcaaattcgagacctaaccgagataatccccaaattcaaaactaaaattgcttcgattctcataaaaatcttccatgaaacccaaaaaacagtaaagcagccacgatttcgtccaagggaactaccaaaccctagaagatagaagagacgagcaagaagtaaaaaaaaactagtccgggttcacgctctagctgctctagctaaagctagggcgttctttataacattaatataaacgaccaatttatagaatataagcaaaattaaagccctctaagagtgtatgattaacatcagaaatcataaatatggaaacaaatcaatgcaataatattacaccaagagaaataattatgattcttatatacttcacctttatcaacgacgaatatcaaaaccctagccttgataacgccgaacacagataacttccacaaacacacaaacacacacactctctctctctaaatttctctcactactcaacctctcccaaaagctaggttttcattcctctctctccttcacaaaaccctcgctctctttcctcagagctttttctttttcttattcttttttatttatttatttttttttttcaaaccagagcaaagagagagaaagagactcaaaacgtttcttcttcgcgtggagcaatttttgtttttgtttaattttgagttctcttgtttctctctggtccgtttttagttgctttgaaaccacgtgcgaagcgtgcgattagccgtgtgtcgggtcctggtcggggtccgggtccgggtggatggatatgaatatgacccagatacaagaatgggtgggggaccgcctcgcctcttcgtttttatttattattattattatgtgaaaaataaggtggggaaggttaaaaggacaaaggttgcaccagactacaaaaactgtcaattttcattctggtgtaccttttgtggggtcttcttataattagatagattagattagagattgagagagaaaacggagtctgtgactctgtgcccaaaacaagaggagcatgtccttgtccttgtcaatttcttctactcacgtgaaactacacgtgcctattttattttatttgcctcacttcaaaataatctaattaattctaatattaaagcatacgtacaaataatttaagattaagagctaattttactttcacactactaacttttttagacttcaaatttaaaaaaaaaaaaaaaaatcatactgcaaatgtgaaattttaaacattatatcataccaaacaatgctttactctctgtttcctattaagtgttttcgtattattcgaaatttgtgtttttaatcctaattaattatttaaacaaaattatttgagacttaaataaataaaccaagaattgactaacaaaaaaaaatcaaggatggatactggatcaattttggactgtttataattctataatccttatataatttatatatgttattctaaatgtagtttgtcctagcttgtaagtactttcttttttctatctcttttttttttttgtcttttttttttaagaataaatgtacaaagtactcttaaagtgatatttggttcaccgtaatgctaatgaataagttcattacattgtttgctttttccttttaacttttgtaatccattacaatgtaatggttattactttgagcattgtaatgataattacataccaaaactaatgtaatcccattacaattacactccattacaaagaaaaaataatattttaataaaaatatagtaaaaaatatcaaaagtctatattaccttttttttgaatattttataatttaaaaataaaagtaatagggttattttggtcaatataaatttcattccattacattctcgtaccaaacaaaacataacaattctgattacaatgttcattccaactacaaaccaaacattgtaaacaattcatattaccattcttcttccattacattaccactactattactattaccattacattacaccaaaccaaacaccacctaagttaaaaaaaattaaaaaaattagaatttcatttataattacacgaagttgtctttttttccagcaagcctgctggctttctctgggcacaggtggggctttttaatttttactactgcaattagtattgtctttgtgacatggttttgaatgttatagtcttgttagtgtgacatagttttattttgttgttgtttcttctttgttctttgatagctcgtcatcaaatcgttgttagtagttgggaatagcaagttctctacgattaaagaggttgttagtgttgagaatcatggggttccatctcaaaaccaattggtgatgagtggagtagcccatattcttatatatggcccaatactctactatttattccatgtgggacaatatctgtataggtgtggatcgtggggttccatctcaaaaccaattggtgatgagtggagtagtccatgttcttatatatggctcaatactctatcatctacttcatgtgggacaatgtccacaatagttagtagtgcagttacgtacattgcacaatagttgagtgctcaagctacgaggttgaatgaacatgctgcaacacatcctactattgtgttttttgagtggtagatgaaactgaatataggtatttttaaagttaattgtgatattgcaatcttttttatctaaatttatttttagttttttttttttttgtcaaacaatctgagaattaggcagttaactatttaactctttttttaattctaattatggtcgtgcctctaacaggaaagatgtcccagttgaattgcagactattattttagttgattctattaataaaattacatgatttattaaaaaaaaaagtacaaataatgtatattaggtaattagagaagaataaaaaactatttagacctctgaactttgtcgcttatacgattgtgctctctgtaatattagtgttgttaaaaatgccccattaactttatttgttaataaaaattaatacttttgttaaatttttcataaataaggttgataaggcatgacatgataaataatacactaagggttcatttggtacactgtattgtaatgtatagtattatattgaattgtattttatacaatatttttatgtaaaactatatgtggtatcaatttttatgggcacctaaatatctaatattttatataaattaaagtttaacattgtattacataaaaatataatatataatccaattcaatataatatagtacaatacaatacaacttaatacgacaatctaaacgagccctgatgtaattatctatgtaacctcttatgtggttgaaatttttttttaaaaaaaaaaaggtaattaaattataaaaagaaacttattgaaaaatataatgaaattaatttcaaactaatttataatgaaaactcaattttctcaaaaactatatctttaaacaaaaaaaaaaaaaaataggattttatttgtctggagaaaagggtgcaccggttggattttcttgggttgtgcgaagaacttttctctatgatttctcaagaaaacaaaggaaaaagtttgtggctagtgcaatttttctctacaatttttggctggaagtgattttcttgcacaatggtgtgggaaaagtcaagagccattaagtatccatattgtttgtgttacgaatattttaccaggatctagatttactaataagtatgttgattaaca

SEQ ID NO: 16077 - DNA, 10577 bp, Cannabis sativa
  modified_base (27)..(30): a, c, t, g, unknown or other
aaaatagattacattgaaatggagttnnnnttagggcataaaacctaacacgaagaccctagaaaacttcataaaaagattcaaagaagaggtctgaaaaacgaaaaaagtcaatgatggacaacagctagcgctactccaggctgggatacgaactggaactcctttttgatgagatacagtaggaatgagttgccagccttcaagatttccaaaagagggtctaaaaattcatcaacttagaggaggctcacataacggcctacggtgggtattatccaactggtgggccagggtacaagccaggaacgcaacttcctagagctatcctcccgactataccacagacaagccgagtgaccccaaggtatactcaaaacctccctcttcctctggctcaatatagttttggggcactaggtccatgctcaattttctccatcaaccacaagtgttgcgggagccccccaaaactcctagagcaagagatcctcaaaaggaagcacccaacctaaggataagagacaaaggagaggttataccccccagtatacataatacacgtggatactcaaaaatgagtgtacttctcaatccaacacaacactcattattggaagcatcttcctttgtattgagatagcttccggagagaccccaacaaaaggtgcgactaccataacgatattggtcacaccactaacgagtgcaaaaacttgaaagattaaatcgagagcttaattcgattaagccacttatatgaatggatcaaagataggttaccacacttgaatcttgggcaagtcagagtcccagcacctcaggggggacctacaacagtactggaagggcagatacctcccgggggtgttccccatcagcaggtacccaaataacctcctcgaactaatggaagggtggccatgatctcaggatgtccccacataggaggaaccacaaggaacaaattgaaacattatgcgaaggccttggactacgacggggagatatcggaagtcaatcaacacatagcccaaagaccgagactcatggatcaacccatcaccttcacagaagaggatgctaagctggtgtgcttcccacatcacgaattgttagtcatagaaaccccaattataaacaaaattgtggcccaaatattagtagacaacagaagttcaataaacgtattatttaaggaagcttttacgaccatcagactcaccgatcgagacctctccccaagcagttcacaactcacaggatttaatgggactacacttgttccaatgggaaaggtaagactccctattaccctgtgtccggacaccccacaaagtacgttcaaatattgcacctttgtggtggtagattgccccgtagcttacaatgccatcttgggttgtccggcattggtcgactttggagcaataacttccatcaagaacttgtgcctcaaatttcccactcggacggctgagataggaatggtctgaggaaatcaaggagaggaagacagtgttataatgttgcagtacacttgtccattttcacaatccaaggggttacaacggcatcctcatcaagccaagatgagttggatcctcgcatcggctccaagactacattggaacccatggaggatattgaagaggtaagaatttgtgatgaagacccaactaaggtcaaccgcttaggaaagggtttagatctagaggaatgaagcaaatcatcgataccatcaaagaatcaaaagatgtatttgcatggtgtcatggagacatgaccgagataagtccccatgttattactcatgttctgaacgtcaacccaagcatgctttcggtacaataaaaaaggcgtccattagatcaggtaaagttagacgccctggaaaaagaggtagataaaatgctctcaaacattttcatctgaaatgtataatacccagagtggttgacaaaccctgtcctggtacccaagccaaatggaatgtggcggatatgtataaacttcactgatcttaacgaagcttgcccaaaagattgattcctattaccaaggatagaccagatggtggatgccacttcaggttttgaattactgtcttttatagatgcatattcacgatataacaagatcaaaatgcatgttgcggaccaagagtgcactagcttcagaaccaacaagggggtataatgttatctagtcatgccctttggattgaagaatggaggagctacatatcaatccatggtcagctgaatgttcaaaagccttctagggcaaaacatggaggtttacttggatgatatgctagtcaaatctaagatacatatgggccatgtagatgatctcgtggaatgctttgaagtagtcagaaagtatgggatgaaactcaatccaagaagtgtgcttttggtgtcaaataaggaaagtttctagggttcatagtaagccagtgcggaatagaggcaaacccagaaaaatctattagatatgccttccccaaaaatatataaagacgtgcaaagcttgtttgggaaggtagctactcggtgtcgcttcatctctcgttccaccgataagtgcatcccaatcttcaacatcttgaaaaaatgccaaaagtttgagtggacgaaagactgttaagaagtgcttaagaagttaaaagaacacatggccaagccaccggtattgtccaaacctgttcactgggaagacctgtacctatacctcgttgtctctgataatgcggttagtgcagaattggttagggaagagggaaaggttcaacatctggtatactacatcaacaaacgtgtaataggggcagaaattcagtatcctatgattgaaaagtaagctttctgtcttcttattgcatcgagaaaactgaggccatactttcaagcccacttcatcaaagtattcacaaaccatcctctctaacaggtcttacaaaaactcgaagcttttgggagactcctcaagtgggcaatggaactaagccaatttcgcatacagtacatatcccatatctcgatctaaggttaggcgctcacagtatttattgttgagtgcaatgaaaccgaggctaacgctagtatgccatatctatatatgcctacatggaaagtgtatgtcaatggggcatgaaatgagaatggattaggggttagggtaggaatgatatctcctgatggactgagactccaagtcgccctgaggtttacatttttggcttccaataatgaggttgaatatgaagccctgctagcaggactaagtctggcaaacgcagtaggagccaacagggtggaggtgtacagcgaatctcaactggttgttaaccaggtgtgaggagaataccaaaaacatggagaaaagatgatcgcttacgtctcaggtgtcagagaattactgcaagaatttaaaaattacaagatcgaacagattccccaagaaaggaacgttcatgtagattgcctagctaagttagcatcggatagtgaggtagaaaatttgggggtagtgccagttgagtatctcacggagccaagcattaggccaaaagcagaagtagcgacaaatgaacgaatgccaaggtggatggaccaaattgtcaagtacataacaaaaggagaaatgcctcagaagaggacaatgtccagaagggtacagtatcaagctcaccgatacttgataatcgatggtattctttatccaaggggcctcaatatcccatatctaaggtgtgtatcggatcctgaagctagacagattatacaagggttccattaaggattttgcgaagatcacacggaagcccgaatctctccaagaaaatcctaaggcaaggatacttttggcctagcatgaagaaagattgtgtacactacgtccttaagtgcgatccatgctaaagatttcaaaacatcccaagagcctcgccaaatgaaatcaccttaataacaagcccgtggccctttgcggtatggggaatagaccttatagggtctctacccaaaggatagggtgggataaaatatgcaatagtagatgtggattacttcacgaaatggatagaggcagaacctatgaagtctataacagctaagaaatctttggactttgtcgtcaaaaacattgtttgtcgatatggtttgctgcataaaatagtcttagacaatggtaagcaattcgattgtgatgagttcatggatttctgcaacaaacatagagtcatcaagagtttctccattgtggctcgaccacaagcaaatggagaggcagaagccgtcaacaagatactaaaggttacccttaagaaaaaactctggcatgcaaaaacaattggcctaaagagttgccaagcgtattatgggcatacaggaccactaaaagaactaccactggacattccccattctcaatggtgtatgggtgtgaggccatggtcccagtagaagctgtcatcccctaccatagaagaactacttatgatccaacaacaaatcaagccttgttacaagaagcacttgatttagtagatgaactcatggaagaattacaaatacgcatggcagcataccaaaagaaattggcaaagtattttaactccaaagtcaagaaggaaatttgccattggttatctgaacctaagaagggtcttcctagcttcccaagaatcaggagtggaggtactccgaccaaattaggaaggctcgtaaaaagttgaagatgaaataggctctaggacttataaattgaagcgaatggagtgatccataatacccagagcttggaatgctgatcatctccgaaaatactatcagtagttaagaattcagtacttaatttcatctttgcactttgtaagttagcatgtagcgaacaaagatatatgcattatcccaggtaaatctaagctaagtgacccgaaaattcctttttaagtcacttaggagggtactaaggcataactatatgcagagacaggcaaaaaattaaaaacaaaaagaggcgacaaatagataaataaatgaactttcttaaaatataagtagtccaaaaaagataggcctggggaaaggctattaaaatgtctcccctaataaaaagtaaagatagtataaactaaaaattaaaagtattgtcttaagggggagaggagtaaaaggaagtaagagagaagggtttaattaatcagctcatggaggaagtcgagggcccatccgcttagccaaggcctcctccagcttcttgttctttcccagatgcgaaccactatatcctcaggatcaggcatgaagtggaggcgaggttcaaatttgttcaatttccaacacataaaaactccatcctcgaagtgcttcacacaatgcttatacgtcaccggagttaataaagcttaccctgcaccttttgcatcctccctctgggtttgttcccagatttcgcgcaactctttaagctcagccgacatacttacggcagtctccaagtcagtcttatgtagctcatcaagagtcttgagtttcaccgtgagtccctgaatctcctcttgagcatttagaaggtccttctagtttgaggcaatagtgtcatctttggccttcaaagcctcctagtctcgctccctgagagccttctccaccagagtgtcattgtgaagagtctccatctggctctcagactccccgagcttcctcagaacgccatccatgccacctagctccaaaacaataaacccttggtcaattaatgtcttagagatatgaccagcctccatagcaatttgacagcaatcaataaaattgggtcaggtcttcaaaaataataatgaaaaaggaaaacaaacctggaaagtatatactcatggaagtaagaaccacgctcatgttctcaatttggtagacaggtttagtggaggcgtaggctgcatacctttttgttggaagttgggctaggtcagcagcaaaatgacttaccatctcagaggaaaaaaatgccagggttgggcccaggtagttcttgaaccagtcgatcatgggatcaagatttaggtcccacaccaccctagtatactcacctcaaaaaggcccatcatggacctcccttagccattttttcagagcctctgcctttgcgtcgcctttggacaactcgtccaccgcatagttgtgtttggcaatgtggagctggacccgctcttcatcaggataggccgaggtcaggagaatggcttgagtggcgaggaagtctttagcttcagctgggatattgaagtcagacctaggatcaggggttattggccgtctaggcttttttgaaggctctggaaaggaaaccacacctttccgtttacggtcaagtgggggttatctcttcctcctcttcctagatcagtaccacctcctggttcccaagtacctcttcagtcatgcccccaggactcaccgtcacctagggaggattaggcatctccgactcagggctatgagtggtggctaacatggccagtaggttgtccatgggttttgctattcaaaataatcaaaaagagttaaaaaaaaaaaaagcactaaagaatcacaaatgcaagtatagcaaatcaaggaaggctaattctaccttgacgctctaattgtgccctaggaaattcataaattaaagagctggtgttgtcatcccatagaaagctatctgaaggaaggaacaacctcaaggtcatgtaagtggaatgatccaaaaggataggaacaggaggactagagtccatttgagaccgacccaagaaattacacaagttggaaaagtaaaaaccttttgcattattgccccaccgagtatggggcatccaaaatttatacagcctcatgtaaaaacccactggccttaagtaagaataatcttggatggaaggaatgaaatgaaggttcaaaggggacttatgggctctagaggtacttgcattagcggtcccggagttcaaaacaggaaaagaaaattcaggcctagctggcgtcttttcttttcttcccttctcctggatgagcctcgcagtaccatcttggaggcgagcgtaatagagtttctattccttcttgtatctatacttgttgtatttagcctcgacggttgaaataatgtcagccttgagtgccttttcgctcctaggattacgggcattggggcaaattaccttggacaagttaaaatcttcaaccgattgacgctccaaaattagtttggccctctgacaattggagattgtcaccaaatctcccacattcaagtattctttcttatagccagcaaacacatgggcatggttcacgaaaagttgagtgggagcagtgcgatgcattggggatatcctgacccagtccgtcaacaggtccgagtgttgagaggctttaaacctagaagaaaagaaaaacctatgacggtattgcttcacgttcttttgaaaattgaaggataacagggtttcattggctggatgagcatgtaacttgtaaaaattttctttaaatttttcacccttctcgaggacagaaagaagttcgtaaaaatataaaattttagtgggcctgggagcagcccaagccctaaaagcataaaaaataaaaatgcctaataacaggttgtaggcttgaggaattagtaggtatggcacaagtcccgaaaatacaaggaaatcaatgaaatagtcatgcagaggtagcatggcttcagacataagatgggtttgggtctaggctccaaaaccgctgtaattgtggttcagtgtctcttcgtctttgggaagacgatgataaactctagagccgaaagatttgatcccatttacaaccactatcttctctagctgatgggcataggtcaaagtagaatggagttcatcggcctcccaaccgttggaacgacaagagtatttcttgtaagcatctgggccttgcataacctcttccagggtggcaagcttctttggccctttcttggaggatttggcgctagacacattaggattcaacatggagtttgtgtgatggagctcaagaatttctttgtcaaacctaaagaaaccttgtttgtgacggtcttaaagaacttcactcatctgaaagataagaaacccatcagttagcccccacataaaaccctaggttaaaagggggaatgggggtccctaacagctgggaagaagccctctccggatcaatgttaaaaggaatctaacgattcacagtggcaaacatcgagttcaaagaatccaagcaatatagagaaatcaagagaaaatagtaggaatgtgcagagatggtttaaatcgctaaatatttacagagaaaacgtgggtcggagggcctctggccctttgctccacccaaaggaaaaataaatatataataataaaggaagataaaagaatcgtcagacattccaagaaagggtatcccacgaataaccgccatggctgttatccagggttaacatgcatacgatttcctttaaaagagtgaatcactatttatcacctcatgctctactatatgaaaaagtgaaaagaaagaagagcttacacgatgaaggcagagtagaggtagcagctgtcgtacaacggtagtaactcgcctggcaacggtggaggaagagtaaaaggaagtcgggaaggtttggaattttgtcgagagagtttgtaagactgaaaatcaaaatacactgcgtaagtaagccagtgacaagaggtacaagtttttataggcccctcaaggaatgagccagcatgaatcgagtaccattgagcggtgggggttcacaatgattcaaattctagtgatccaacggttagggtaaatgcatgagatgaagagaaaagggcagtttagacgtttgagtacctttttgacatcgacattaatgaagggtctgtcaacaggtgggaatcgaatcgttgcctgccaaaaataagacagaatgattatgaacattaaaatggaccacatgcatgcgaggtacgtaccatgtcacttcctaagaacagaagcaatacacaagtctcatttacaaagtactaaataagacttgggaggtaaatgtttccatggttttctcccaatgtacgtggcaatctcgcaatgtgacatgtgacagattaagctcgaggactcagagataattaaaggaaagtcattacataggcgaaatctccgtaggaaaacccaatagctactccaggagcaatgacttggtctagaggattcgtcttgaattttccttcatgagctagatagcgtccagctcctccgaatttagggtaccagagatgtagtgtcaacaagcatttaatgcagcatggaggaagcgtctatcaatgtatatgaaaggacgtgtcagacgtattaaacccatccttaggcaattatgcgctaatcaaggatataagtgacgactccataatgtccaatcacatcaatcaaaaatgggttaagagctagtctcacctaaaccctacgcaccctactaagtagggagtgcatgccctacttcatagatttggaaagttgtgtacaaccaaggtagaagcttaagacaattgtgacctttcttctcttttacaactactataaataaccccaaccaaaataatgagggggagagagggtaaaaaaaaaaagagcataacattccctgtaagaaatacccacatattaatatcaaggactcgtggactaaggctcattaatgccccaaccacgtaaaaatatttgcatttactctccttaaaccgtctttactacattaatgatttagttgccaaaaatctcgatcaacactggaaaatgagtattgattattctctagacatagattttgatataggacgagagtacctatatggttatgtagcatttacgatttttatgcttaatggctcatatgtgtttaaatttatcacgagagtagaaagttgcatataggttaagatttgtatgtcctagcccaaatataagtttctttaataaatttgctatcacatgaaaattaaaactgagaattaaattatattaaatcatataaagtagatgtaattgaaattaatcaccctaagttttattcattcttaatttcaccttaattattaattttctttgtttttttagtagaaatttaacatattttcttattctattatcaccaaatagaattaagaatttaattatttggtaattaactatagtccttgtgggatcgactcacacttgtaagtctattacttgtaaacgatacgtatacttgtgtgttggaaaattcataacacccaacgcatttagaactgaagtagctagttggaccccactttaacttttaagttaataaaattaaaagtaaataaataaaatagaacgacacgattacttggcagtgacaatgctacaaaaattatcactcaaaaaacacgttctctcaacttcatcactgttagattttgtgcaataaataaaagtcatttcaatataatcatatttactaattaataaaatatcaaaaatcattttatgttgcat

SEQ ID NO: 16078 - DNA, 4132 bp, Cannabis sativa
aatgttcttctcttttcaagaacttattaaccatgaccctgttcagttttcctagtacagctggtactacattatcatttgtgtattgtagcttaagttaatgatttgaaggtgaactttaaattagatgctcctcatcacccccattaactttggattctgttaattaatttataagttattattcattcacaccacctgtagtcttcattatactgattgagatatgtttaatctgtatatatttatctctaatgtattatggttatcttccttggtgtacaagtaattgtttcttgtgcttattaagattattcagcatactaattccatgtatttattgtctttcctttccttctttttgttcagtgtccacttttgaacatcagctattgtcccccatcagaggttgatctgtcaaagggaaaaaatctggtgagaatagtaatgtggtaataaatagcaagtaaggtgtcaggtcttgagaagtttgaatattcttaaatcattttcttttgtttctccttctgtaggttattgtagtttataaccccttgggatggaaaagagaggatgttgttaagattccagtaagtaatgcacctttctcttgtttcattttctggtgaaagaagaagaatccattaaaaaaatgtcatttcagtactttatttctggttgtaacctgaaatcagcaatatacattttctgaaatcagcaattattctaagatagtattaatttttatatatatattttttgtaaaaagtttagtgagaaaaactctaccctgaatacttgcttggtttacttctgccatgatctaaccttatcaaccttactacagattgtggatgagaatgtggttgttaaggattttagaggaaaggaaattgaatcacagttcatacctctgtctcatgtttctgtggccataagaaaataccatgcaaaggcctatttgggaaaacttccaaaagtgacacctcgctattggctcgcattttctgccattgtaccacctcttggattcagtacttacactgtctcaagtgccaaaggggcagcaggtattggccacttgtattgtatctataatacattaatactcatagaacttataatagttagattagagtctccatatgcatatgatcaagacttttttgctccataatcacagctggtggtggttctgagaaagaatcagtgaatgtgtcagctagaaatgaagatcataaaattcaagtgggatcaggaaacttaaaacttttttattctaaaaagagtggacaacttacaaaatacattaacaaaagaagcatggtatactgttatgattgattgttctaataaaacctggttttcttttcttaattatgctacatcattaaagttctacttggcttaattttcttgtgctattcaaggtggatgagtcagtagaacaatcctttggctattactctggagatgatggaagtgtagatatgcaggcctcaggagcatacatatttcgtcctaatctcacttatcctattagatatgaaaagaaggtaggtaatgatatgcttttaaaacactttgaataaatgacttacttgtaatcaatagaatatctagagtgtatgattggaaatttcaggttcctcttactgttttccggggaccaatattggatgaagtacatcagagaatcaattcatggatatatcaggtgcttattcctatctcttctcttgattgattggatgtctcaaatatttcatgccatggagttttttcttttcattaatattttgcactgactgagcagatcactagagtgttcaagagaaaagaacatgtcgaatttgagtttgctgtaagttatactatgaactgtaaattttggaaattagttgtttcatttgaatgtgtgacaattttgatctgatgcttatctgtcaacaatattttcatttcagattggaccaataccaatcaatgatggaattggaaaagagatagtaacaaaaatctccagcagtttgaaaagcaacaaaaaattctatacagattctaatgggcgtgattttatcgagagggtatgctgtcatcagttagcttgtatagttgataatgcattgatttcatgttcaatttcttcaaggttcttcaaagaggcaaagcagatatgttaacataaattttctgtaataaactgtttcattgcagattcgagattataggaaagactggaacctggaagtaaatcaacctgttgcaggaaactattacccagtatgttcatttgataattaagtcaatcaactcgtctctatttttctttacttggatattgtacatgcttaagttttcttcatcaaattatgatcattactctcaggtagtaaattttgttagtcataccagataatacaattactactgtttgcttcttttacaatcatgtatatagtctgcaactgtatgatattccacaacaaggatttatggagatgtgatgaagtggataatacattgttaaaaactttacaaagtgctcactttcttacagcatgaatgacaaagtctggtctattgctctctcagtccacttttaaggaaatgcatatgatgaagtttggtttgttttcattcagatcaatcttggcatttatacaaaggataagagctctgagctctcattgttggtggatagagcagtgggtggatccagcattgtggatgggcaattagaacttatgcttcacaggtttaaattttctcctcttttgtgcttgagttgttaagagattgaaaagtgacttagtttttgtgttataaacaatgtgctatagtgtggattcaaataaggtgtaatctcaaaattactctggatttacttctttgtgtaggaggttgctcgaagatgatgatcgaggagtggcagaggcactaaatgaaacagtttgcattgctgataactgtcaaggcctaactgtaagagcatagcaaattttgttcttagttttcaagaaaatcataatatttaaatttggtttcttttcttatacttgcagattgtaggaaagtactacctcagagttgatcccctaggagaaggtgctaaatggcgtcgatcttatggccaagaattatattctccatttctgttagcatttacagaacaggttaaatgaggacagtgaagtatttggtagacaaagtttttaattcataatatgaagatgactggttttttgttgcaggatgaacacaactggaattcccatgttccaacgttttatggtatgagtccctcctatgctttaccagataatgttgcaatactgactctccaggtttgtatctcaattctcaaagatcaagttttttcttgtcttaagaaatctctttcaaatcatctcttactgttgacctctgcaggagctagaaggtggaaaagtcctccttcgattggcacacttgtacgaggtttgatttctctcttatgaccaaattgctaattgaagtttccatttttcatcttcaatgattgtgccttctaagactgattttctcatatggtgcttctttgaaaggttggagaagataaagatctttccattatggcaagtgtagaattgaaaaaggtgttcaacaataagaaggtaagtcaaacaaataattgagacaacttgttctccatccagatattcatctcacttaaatcatttctactaatattcttcttttccttgaaattcagataaatagcatagaagagaccagtttatctgctaaccaaaaaagatcagaaatggagaaaaagagactagtctggaaagttaaaggctcttctaaagagccaaaggtattaaggggaagaccaattgatcaaaaaaatctagttgtggagctttttccaatggaaatcagaaccttcattattaacttctactcttgatgatcaacaactgaatagtacaagccccctgcaacaaatttctttttcttctttgaaaatcagagaagagatctttatggttgggtttcactttgcagattccatgcaagaaaattggcattggaaacaaagtattttcatatttttccatttggggttcatgcaaggctagtcaaacta

SEQ ID NO: 16079 - DNA, 5671 bp, Cannabis sativa
  modified_base (5634)..(5646): a, c, t, g, unknown or other
caactagttctattaagactctcttcactacctttgtccgattaattcttctcaaataattagttatagaacagatctgatggcaactaatgatcactgaaagtattaaaaaataatatatttaattatgctcatataacaagacaagtctcaaaataaaattatgttcatgatgacaaagctttgttatgtataataatatgaagatatatatatatattttttgagaagatatagatgagctgcctgtatatatacctgaaataaattaattaagagatccagtattattaactttttgtaaaaacctaattaattaactactgcatatatccatatatagaaaacaaaatatgcaacaaagaagtagcaactttaatacaacactttttcaagtgtgtgtacatatatattaatatatatttacctgattatgatccagataggtttcttagatcaaaatgaatagataaaaaaagaaaaatactactttccttttcccctattgtgaactactagatcagctctcaaattaatttcagagctggctctctctcttaaatatactttgtaatctgagcatatataacagatttgtacagaagggtgatctccaaatgagggaaccctaagttaattataagaataatggagagagatctagagagagagagagagagagagagctgcaaagctcagtggctaaaaggtaatgggggggaagggagggaaatcaaagcatttagtggatggagagggaatggaggcaaaagacaaaggtaataaatggaaggtacactaaaaaagagtgactatgacactgcatctaataataatattattaataataataatatcaggttgtgtgaggatgtcttcattcttcattccagtaccctagcttactttttttcccttctatatatattatagaaaagttattagcatatttatataaatttgtattaataaaatggggcattccaattaatgttgcaaccttatagttattttgagctacatatatataagagttttaaaggtcatataatttattaatatatatatatatatggtcaattaatgtgaatatcatttacatgtatcgatcatgtcgacttaattaaatagttttgtatgttttttataataagtactttataatatttttggccaacttgtatcaatttatatatataggctttaaaattaaaaaaaaaaaatacatatttagagatcagtaactagtgactgagaatttactatttggtgatactaattaactccctatagctaataattacttgctctgccagagatatctgacatatgtatatatatagattataagatatattaagtagtccgactagtgttgatttgggatcctgggctaagaaatatattctgatcattatatatataaaggcgataaacatgttaattatataaaatataccactatgaaaaacacaaaaaatatatatcaataatagaatataaaaaacacagcaactattattcttatctcttcactatttatacataagaacactacacgtattttgcatattatatatataatatattagctatctagaatagtactgtgctgttctcctcgtttgctattagattctatacttggtgtcaaagaagaaatagtactatttcaatagtgtactccaaaaattacatatttataatcataagaatattctttcataacttcaccaataagctaattgagttatttgttaacggtttaacgccctatagctacacaaatactcagtattgtactacatgagtgttgcttatatttatagatctagatatataatatagtttgaatatactgatttggtctcaatatatttttttttcaaatatcaatattaatgaggggagatcaatattaactgatgatgacattacaacaatactaaaaaatagggtgggaagagtccgccgatattaatagcaaaatcggtcagtatttggtattaccggcagggtttcgctggaattgtccatcggtattactcattaatgagttctagctcttgcatagacttttaatcaactttattacaagttaattagaggcttcataatatagtagctatgggagaatattatgaagaaagtactgccttgctctagcagtatatatatatatatatacatataaatagtttttgtgtcaaggaaaagaaaaacatcatgcatgtttgtacattaatatttatgtagctagcctttttctttttctttttcgtttggacttaattagtctagtaaatatactatataccaaatgtctctatccattgcatataaataaataaaatcagtttcaaattgatcataaagtcatgacataactacctatataccttaactaattctagattaagagtttaaacggcatagaactacatttgaccatttcccaaaagaaagaaaaatcaatttcatgtagactagccctatacaatttcatgtagaccagctctcaatttcacatttgttctaactttattgattcaaatcctgagatacatgtgtttaattattaatttatttatttgggtgtggattgatggatcgaatagctccaacaaactacgcagtactatacttactacttccatgcttaaggaatattttacagctctagagtaaagtaacagctacctttatatatttaatgtacggcaggttaattttcaggattcctttcacagatgaataatccagatttgtgaaataattatttaaacgatgacgtacttgattgtgacgtttgtaatcctgaaatggattaattttgtagaaagtcatttaataagaaataataatagtatatatatgttcataaataatagtgcagttatatgtatgattaattacttggttaaacatttcatatcaaagcctcttctgataaagatatgtacacaaaacatgcactagcctattcaatatagtgattcattaataatgcttataaattataattacctaattatgacttgttcctcactactctccttaaaattaatatatatatatgtaaaaaatgaatattgaaaagccgttatatatttcaaacctaaacaatttttacagattattataccaatgaaaacgaccgagataaacactagctctacacacaaacatattctaatttttgtttcaacaatttaataattactatgctatatagctagtataaacccaaacatgatgagttgccaaaacaaaagtgtacatgtgtatgtggacagtgtaataagagagagaggtaaataagtgtatacgtacacatgtttgtaattaccaaaagcagggtgctcaacatagataaatataaatataaatatatagctaggagcaagatgatcacttgtagaggtaggtggtcgtgtgtaggtattcccagagtggggggaccttaagagacagtagaagatgtttttttcttctttttttcttttcatttatttaactattttatgttgttgtctcatcaatcactagtgctataccctatagttcatttcaaatatctataaagatgaagaattaagaagatatatatatatatatatatataggagagaaagaaaagtctttgtacatcgctctcatagtcattaatgtcacatatatattatccctgtttgtagttggtcccattacatatatttcttcatcaccttcctagataaggcttacaaaataccaaaaactacttgtgttgtaggccaatgagtgtctcagagtagaccaatgaaaattgaagagatgagctggggtttttgaagggttgggagcaatgggtttttggtttctcatgaatgccccattatatacacatgtatgagattcatattcttttataatcttttctctttggtcttttcagataaatacaaaaggattcagtgcaagctgctcaaaattcaaattattttaattttagttatataagtgtgtctcacatttcttacccatatatcactaatgatatcagtacttaaaatataaatacacacaaaaatttccacgcagtgttatcagatttttttagctaattatatttatcaaaactgagagctactgttttaaaaaagcgcagacaataggtgtaatatttgggtacatgtattatatatatatctttaagggtagatatcattactttataataaaactaaaattaaacactctacagtatttaaaaatttaaaaataaatttaagattgattaggtattttacaatttagatcttgaatggcttacaataaattcaatttttcttttttcaaaaaaaaaaacaaaaaaacaaaaaaagaaagaaaaagcttaagtaatatttttttttataaatcaagcatctttgttaaatgataaaataataagcaaaatgtccctattataagcacgatgagcctcagaaagagtatatcgcgccaaaacatatacaactttatttagagattgtttgaaaaaataaaaagagataaaacataaattattaataataacttcataacaatccaaaattacacagccatgggagggattgtgtttttaattttatttttaatcagatcattaatcacgttaagactatcaagttccagcactacatataccacctcaaaaagttaattacctatttaaatcttaataatttatatatttttattctgcaaaaaaaaccttaagtatttaagtaacaatttaactattttagctgggaatattaaccttacatataaacaggattttagtaaatagttggcccatagtttcaccagacaattcaatattcttaaagcacgcaaataatcagtccattttgttgtcaccctactgtcatttgtgcaaccaattcttttgggtcaattttcatccaaacaaaataaataaatatttaaagtggatgattaaatttatagtgtaggtacatgtagcaatatgcatacataaatatataataatattattaattagtatgatttttaagggaatataatcaattgttagttaattaatttcttaattcatattagttaataattaaagattcatcataaattataagtagtttttcgtatgccatcatttcgtaattaattgaacatacttttatatatatatatacatataatatataatgtttattatacctggttgatgtttctgttatttagttgtttaattataaatgtttatttatttcttgaagagaagatatataattataaataatataaaagaaaatggacactgagttaggtgcagtaatgtatactgaatattggcactatctttttgttaagctagctcttaaaataaaagagatgactgcgaaaaatctgcagagttgattgggtatgtaggtacacaccatgtggataatattatgggtcaatggaggcaaattaatttaaagacctcaatttggtaactgtgatcattacgatcaatttaacaaaaagttttgccctaatgattagacatgtgcttattccacccattccaaaattgttatcattgattgatgaatattaaatactcattactatattaaaatttagggtaaatactatttnnnnnnnnnnnnnttgcaaaagttacagattggaccct

SEQ ID NO: 16080 - DNA, 7233 bp, Cannabis sativa
tagccacacgacatacatgatgttcaatttcaatttgctgctacattgaatggattacatacaccaaatccaaattttagtgcctacttggagttgctctaagtgtgttatgttttgcaagataaaaatagtaaaaaaaaaaaagacttggtagtcaccaaaattcaactacaactagagatgtaatgtttttgtgagatacaaccccaataatttgaacatatttatcgatcatttttaatggaaataaagtttataatattactaaattgaaatttcactttcatccttgtttttttttctccccctgctttttctagcattccctttatttcctcactatcaatcatactgacatcttatgctttatttcaataatttagaggacatgtactgatgtgactcatcaaaatagccgtttattattcaaaatctcccccactgctcttcgaggaaagtaaactaattgaaatacttgcctgtgaaaaagtggtagttttactaatcatggattgataataatgaaagaaaaaaaatccctaaactttatcacagttcaacttaaagaaaatgaaaaggcatttgcacatgggaatttgggatattcaaactttgttgtatagttttcttcttttgatgatgtcaagtaaagagccctatcatgggcttggctaaggtgatcatcactgataacagtctctcacctttacgagttgaattagtaataaatttactgacaagtcaatgaagaattgaactacatattgacaccatcatcaccagacaagtacatggtcaatgtgaaattgacaacataatctaaataaaacattctttcttccatgataagattattgtcattccaagtagattaaaatgaagaataaacgcagatttttaaactaagtgcacaaagcagtcacattggtaaagaagaatactcgagattcaagaacgaggggccggcatttgctgtttttttatattcacatcatccttcaccatgctgtatcataaccaaaacaagttagttctataaatcaaaaccacagagggaaaagaaaagaaccattccacaaattttacaatccgtaaatttgagacaaactaaattgcaagaccttatttgggtaaactaggatcctcgctaggcctaaaatatttggaaaccaggaaactataactaacaattactatgtaggtaccccattaggactcaaatctaaaaacttgtgggaacaaaagacatgactgaccatttgaactacctttttgggtaaactacattgcaggacttgaaaccaaaatattgtcaaaacaaaacacgaatctcctcgctcaacatgatactcactatccaacatacattcattaatatgatacaatccaatcaaagaatgagtgctaaaattctaatctgaacacaatctaatttacatgtaatatccaatttaattcaatcagtaattggattagatcaacttttgtaatcagttttgacccttacggccaaatattcaaatagcatgtaaattttcccaagataaacttcacaaatgatcaaatacatgtctaccagagagcttaacttcaccggatagacatcacgagatcacacatatatcagataggcctaaaaacagaatgaaaggcgagaaaaaccgagattgagagatcaagttattattttatttttaaaaagaaaaagggaaaaaatcctaatatctaaaatcaaagatgtggtgaaactcactaaaaatgaggagaaaattacgttgaattacaataacgcttctaaacagactatgactcagtttcaaacaggttcaattcacaagtaaaatattattattttatttttcaaatattaaaacatgacccagtcaggatcaactgggtcacatctgtacacatgcacaaagcaatcaaccgagtattaatcaggttatatcacatcaaatatgtattgaattacctgatatcatgaggagtaataaatatccactgggatccctgaaccagtgcaaagtccactagagtttctaagctgattttccgacttacagcatcctgaagataatgggaaaagcttgaaattagtagtaatgtaacatggtcattcaaaaatttcagcgtcaagtacaacaatgagaacaatcaaagtgaaaaaaatataaccaaaaaacaaaaacttaggcattcaactattaacatgaaggatgaggtagcatatatataaatacacacatatatatatataagaaataagttcctaccataaatacatcaaattcgtccattgctcgaaatggagcttctatcatatcatgaagagccaaagtgaagcacaaagttgaaaacgaacgctccccacctgatacacaccaggagttaaatgacaagtccaatttataaaatttgacatctacaacgaattctagagaatcaaaacaaaaattaaaaattacaacgagacacattggttttccaatttataaaatctgacatctaaacagaatcatataatttgtaagataaaaacagtatcagacccaataaattattaactttaaaaaatgaatatggtctacctttgcattttgtcaatcttattgttacaacagtaacctaacactatccacaccataactccattatgagacaatcacttccatagcccttcttaggaagctaagttaaagtagttccagttgaggggtatcgtataagggtatgatattggtataaatattattagtgtatcaaacccagaaagtattagtaatttaaacagcctttctataaactaatgcaactttcaagtacacagtgaagcttcaaaataaataaaaaaaatagatgaagcattgagcaaaaataataaatgaaaacctgaaagtcctttaatgtcacgaacactgctgtttgatgcatcttggggcatctttacctgtaaagcacgtgataagttcgagagaagatagtaaaaggaaaaacagtggcaaaccaccatataaagctgcccaagtatttggcataaagtattttactgaaagatggaatcagtggataatggaagactgccaaattattgaagtaaaaacacttacatgaacagagagggttctatcctcataactaacatcgatacgtccacagatccctttattttctagtttgttattgaaactgattttttaaaaaaaaaaatgaaaaggaacaaaggaaaaaaaaaagatgttaatatcattgaaccaaaaagtgggattaaaccatatatcttatgtaaattacttttgggaactggtatttcatacccccatgttatctgacggctcaatttatttgcaattgtctgatacttagttcgacgtgtgtccagggctttctgaagggcctgtaatttaacattgtaaagaaaagtccataagaaacccaatgacagcttttatttaaattccatcaaagcatatctaaaagaaatggacagtttcctcagaatagcatctatgtcctagtgcaaaccagtaaattatccacttattctaatcaatcattggcattactcagatacctcatgcaacaataaaacaatcctccatatctttatatattattttagcaaacaactctactaagatttatttttatatattatgttaacaaaaacaactatactaagatttatgaccaaggacctaatttaaaatgggaccgtaacttgcaataagttgggcactttgatttaaaaaaaaacctaaagctaaagagaaaaacgataataacattgaggatccagcataaccccatgatagggttttggtaattggataaatgctatgtgtggtgactgaaatttatccaaaaaaacattgagaaaccagaacagtatttaagtaccatcaactcattgtctctatgctataaataacttaatctactatcacaaactgcagcttggtgtcaaaagaacattagacattaacagtgcaacatgacatttaaagactccaaaccatcctcctacttgggaatgtaacatcacaaacaggctaacttagtcattaatattttcttatttagcatcatttttcttaactggaaaacaagaggacataaacacaaccgattacaaagaaatgaagcatacaatacagatactgtaataataagataactgatcagcagcaaggtaggtcaagcatagacagtactggtacacaaactggacatttaattcaaattaatctttagagaagctcctctcaaattatttatcctgttttccccattaaacttatactttacagctgggaacttttgaaatctaagaacatcacatgctacagaagaaacaaaattgcagaccaggatcaaatagaagatattgcttgttttaatttaatattattgtgaagccaagcattaacataagaaaatagctgaccaaacattgaataatcatgaagtaatgtttcctgcagttaaaattatataatcttttcttctgttaatttgtacttacatcaatctttttccggaaatctctatttttttcctgtttccccaaaatcatactttgtttttcttcatacattgtccttaggtcatcaatagattcagaaaatctgcagaaataaaccacaacgaaaaaaagcaaattattttaaatttaaactaaagcttgcctcttgtttacaaaaagaaaaataagatataaaaacagattgattgtacagatacctagggatctgttgcttaagcctttgatctagtgttgtgatttgagcactgagtttctccggggtgctaccattgcacccaccaatagcttcaagttcactctcaggacagataatagaagctttcttgtcactggcctacagtaattaacttcaagcttcagcgttggtacaaaagaaattaatttatgtggcatagctacagctaaaagaataatacaaccttggagccagaaaaagagtataaaggaagaattaaaatcatgggacaggttcacatgaatgaaagttcagagaagtcttctaactttcatatcttcttaatagcacacttcttaaagtcttaaaaagtcctattcatgaaaccatttcctgaaatttacaaagcatatcataaagaaaagacataaatgatacctcgcggagcaggacaagttcctcatattcggcctctgcattctttatttcatcaaactccttgctcattacactaacataataatttttctcctgaaaaataggtgacttaaaacgttaagattaacatggtaatggcttaaatagttcaggtaactatttgagatttttttaagatggtaaaacacctcttctaaagaatgtagttcttcttcgatatccataagatctttctccgctttctcattagcatcaacttcaccttttgcggactctatttttttcacagagaaagtaaagacatttaaacccgtttttacatgtggtagagtcaatcattcaaagaaataaaagaaaaaccttaaacttaccacgtaaattttcaaacgatactttaagttcattggctttatcctcagcttcacacattcggactttgaagttttcaagcaaaatctttttttgttgtatctcttcttggattttctaaaacacctcacaacaacgaagaaattattgaaaatatagaaattattgaaaatatagatagaacattctaaaatttatatatatatatataaatatatatgtattaaaattcaaacttaaaggtggcacaaactgaaatgtcttgatggatctcatcaactgttgatgcaggtgatgcactagcttcagcagcacatgatttcttaaaatctctcagttgcatattcttagaaacggagattctctcagcatgatgacactctctctattatagatgcaaagaaggaagagttagaaatcaatagtataatttgacgaagtgacacattcaataccttagatataatagcaaagcaatttcatgcaactaaattcatattgcaatgaataacatactcggtagtcagtaaagctagtgtataaaaaaaatactcaaactaactgaaaagctaagacacgaaaaagttgtaaccagttttccaacaaatcactgtctactaaaaaaccaaccataactgatcacaatagagagaataagcagacaacattgatcaaaagatcatgcatacacttctgttaggaccaaggtgcattttatttatgctaggagaggtaagaatgctactgctcaaagggtagtgggtcttttactttaggaaggtatgattgtaattgtggagtgagattgcaagctgttatattgttgtttgagaggtttatgggatttatccatgtattgaggacttctctttacagcaggggtcctatagggctctaagcttgtaatctactgttacttcaatttcttgctattgaattgtgatcttaaggcttatcaattggtatcagagcaggcaatcttggtgaatgacgtatactcgaagttaaaaaaaaaaatagtggagtcggttcacttggtagcaggggatgaggaatcacaagcaccagttctagaagaatggaattcaatataagagaagattaacgcccatgaccaaggcatcaaggagaaaatggatttgatcctttaaggccaagctagaattgctacggagcttaccgatggaccacgaagcccagtggggaagtcgtctcaatttctaattaggtctagttggtcgggaaaccagaaccgagaagaagttggtgtgaggcgagctgagttccgtccaaggaagatcgaattgtcgatgtttacggggtccaatcgagcagatagatattttggtttaatgagattcgcgatattttggtgtgaggcgagctgagttccatccaaggaagagcaattggaggcggcaattttatgcttggagggatcagctcttcgttggtttcgttgggagaacagccgccgagaaatcctaagttggggcgaaatgaagaacctcctccgacaattcatgccagcgcacgaggggacgacgtatgatcgattcctggcgttgcatcaattcaccacggtacaagagtactgtcaacaattcgaagctctgactgtatcgatcggagctgtcgtagagcctctgctgggataagccatcatgaagaggctgaacgaagaaattcagggcaccctgcgatt

SEQ ID NO: 16081 - DNA, 4804 bp, Cannabis sativa
gtctattagtcaaatgctgaactttagaattaacatttgtccaagttgctacacttgactttgtacttcgctaatactcagtcttgtacaatgacgttatattaaaaaaaataatgacaaagttattattttttttatacttgtaataaaaatagtaaattttgcatcaagttttataattgtacattattagaacataatgttaaaaattgatgcaaatatatcagaaatttatttgtcaaatatataatttttacacatttcattttcattggagttcttgtaaacttatatataattaaaaagattataaatataatagttgttacaatgataagtatatattaataatgaaaatagtaagtggcacattaagatgtcaagtaccacaacagttattggtatattttaatatcaattctcaaaaattttaattttataaataatttgaaaaattgttaactaattattgagtaccgcgtgtgatattaaacactttaaagtgttatgatagtataaaaaaattatttatcaaaaaataaaataatacaaagattattaataaaaaaataaaataaaaaataaataaattttgcattaataggaccgaaaaacataatacaaaggtcatttattaaagataaaaagacaaaaagaaaaatacaatccaagttaatctaagctaatcaaagctaataaatatatcaaatatttaattatattaaagttgagagtgatttgttaaaaaattatcaggaggatatattggactgaattggaaattaaaaaaataaataataaaataataaattcatatttatttagttatattatattataattttaatttattataaaaaaaaatatattttttaagagaaataacttcttaagcgtaaagtacttcttttattatttttatttttatgaaaatattttgatttttttaaaaaaaaaaaattagaatactaaatattacaatcacataggaattagaaaaagtaaaagggattaaacatatgaacaaaatgaaagatgaaacacaaggaaaagacaaaggacttatcaatattgcatagagatagagatatataatatataatatgacactttttggtgctacaccctcaatggtaaccttagcgtttgtcatatgatgtggtgatatatagaaaagtcatagttcgaccaacgcgggtttgaataagggggcaccagcttcttctagttaatgcatgggatccactcaagactttacagtctcctcacacacaaacaaatttaaaggaaagaaaaaactgatagccactattgtcagtctttggtttttatgtctttcgtcaatggaagactagactttgccaattacagttgagtcaactcccactcctaccaacacgccactcctataaacttctttctttctctaatcttttccacgaaacaaacctcctctccctcattacttcattcccaatttcttgtgttcttaattatgtgttttctcacctgaaaccaaataaacaaatatatatactttacatatatatctgcatatgtataactaatagattagaggtcgagagatttttgtttctgcttagctaacagaacaaatgaccaatttcggtttcagaaactctcttcgttaccttttgttatgtttcttttttttatttcctatgattttctctcaactacccccaacccaactatcatccatgaacactctttatcagtatctcaacactagtctttcatggaatagtaataaacagtcaagcccatgttcatggaagggagtgacatgtaaccccaccaattcttctgtacttaaaatttctctatctgggttttctctttcttcctcagattttcttcctgctgtctgccaaattggttctttgcaggcttttgacgtgtccaacaaccgtttgagtaaagttccagaaaagttcatgactgactgtggaaaactggagggactgcgtctactgaattttagcagaaacaggttggatggttctttacctttgtttgttggttttgcggggttggaggtcttggacttgtcttttaatgattttagtggtagcattaatgtagagtttgaaggcttagatggtcttaaaagcttgaatcttagttataacaagctcaatggttccattcctacaaaacttggaaagtccaaggttttgaaggagcttgtgctttcagtgaataatttccaaggtcccatcccagaagaaatgattgattatgggaatttgacactggttgatcttagccaaaataggatttcggggtctattcctaacagaattggtgacctctcaaagttaaagattttgattctctctagcaataatctaagtggaaaaatcccagtaagcctttcaactatcccaactctatcacgatttgctgcaaatctaaaccatttttctggtacaatccccagtagtattaccaaatttctcaaaaatttggatttaagctataacggtttatatggctcaattcctatagacctcctgtcaccaacaaatttgcaaactgtggatttgtcatttaatgatttggatggatcatttcctacaaacatttcacctagcttggtcaggttgaggctggggagcaataaactcaaagggaaaattccttctgtcaacttttcaacacttaaggaactgacatacttggagctggacaacaatcatttttatggatcgattcctctagaattgggttcttgcaggagtctggcactcttaaatttggctcaaaacaacctgactgggcctttgcctagccagctgggcaatcttacaatgcttcaagtcttaaaactgcaattaaacaatctctctggtgaaatcccagagccagtttcccaactacagagtttatcagtcctaaatataagctggaattctctaagtggtcaaataccatcttctatctccaacttgcaacaccttgttaacctcaacctacaaggcaacaagcttaatggttccataccaaataccatgagtaccatgaatagccttttggaactccagcttggagaaaaccaactgagtggatacattccaaaaatgccaccaaatttgcagatcgctttgaatcttagtagcaatcgttttgaaggacctattccacaaactcttacgggactttctggattagaagtgttggatatctcggacaacaatttctcaggtgacattccagaatcatttacgagaatgggatccttgacacaattgttgctttcaaacaataacctctctggagtaattccaaaatttaattcttgggtcatggttgacacaaaaggaaacgggaatttgattaatgttacagagccaacaacttcacatccatctaggaaaaaaatctcagtggttgtagtaattcttttagttttggcttctgtattttctgttggagcaactttcgtcttcactctgttacttttccgacgatatggaagggttgctgatgaacagttacaaccagtggaagatctacctctccctcaggttattcagggaaatttattaacctcaaatggaatccacagatcaaatattgacttcaccaaggctatggaatcagttgctgaccaagctaacattgtgatgaaaactaggttctcaacctactacaaagcaactatgccttcggggtcaagctactttgtcaagaagctcaattggagtgataagataattcactggggcaaccatgatagatttggaacagagattgaggtctttgggaaactgagcaattccaatgtcatgactcctttggcctatgttttatctgctgagaatgcttatctcttctatgagtattcctcaaagggcacccttttcgatgctcttcatagtagctcaggatgtgatatggactgggcgagtagatacagtatagcagtgggagtagctcaaggtcttgcttttcttcatggaatttcctctggtccaatgctcctgcttgacttatcaagcagaagtgtctttctaaagtccatgaaagagcctcaagtgggagaaattgagctctacaagattattgatccatcaaagagcaccggaagtatttccactgtggctggttcagttggctacatccctccaggtcagtagtaactatgtgactacaactcacactagctagttttcaatccactacacagcccatattcatatgtatatatcagttaatgattgatattgagttctgataatactggttaatttgcagagtatgcatacacaatgagagtgacaacagctggaaatgtttacagctttggagtaattttgcttgagctgctaacagggaaacaggcaatgagtgaggggactgaattagctaagtgggtattaagtaactcggttgaagaagataaatgggagaacatgcttgattttagcatcagtagaacttcagtcttagccaaaaagcaaatgcttgctgtactaaaggttgctattggttgtgtttgtgtatcgccagaagctaggccaaagattaagagtgttctacgcatgattctcaatgcaagataggtgtgagagattccattttaatcgagtcaaaagtaagtacgtatacggttttgcatgtaaaatagtaatgtgatgagtttgtttagttctctactagattagaagtggtcaaaatttgttgttgcctttttggagtattattacatcattatatttattaatatatatatatatatatttatatattctagcaaatgaaaagaggaaaaatgtaa

SEQ ID NO: 16082 - DNA, 2932 bp, Cannabis sativa
agagagagagagagagatgggaagaggaaaagtggagctgaagaggatagagaacccaacaagcaggcaagtgaccttctcaaagaggagaaatgggctattgaagaaagcttttgagctttcgttgctttgtgatgctgaggttggtcttattgttttctctccttctgggaagctctaccaatatgccagccatgagtaagtaattctacttcaataatttccccactatatatacatctaaatatatatatatatttctccacacttataaatatttatatatatatatatacatattgtggatgatcgattgttgtgtgctgcagcatggagagtagcattgtgagatacaagagtgaaatgggattgctaggatccgctgatgaccaacattctagagccatagaggtatatatatttatataaatgtcatatagatgaacttgtttttgtgatatatattttaaggaattaatttggatataaattagattattagtccaatatctccatgcccctttaataatcgctttcggaattattagttatatatctaacacataaaactaatatgtgtgtgcgtcagattttcagcttaacttattatacatattgttgtttaaaatattattgattacacattctttaatacaaaattaccccactaggttcgtcgaagactttccaaaatatattaaataattaacgtttgtgttatatgtgtcgataattgatttattgggatgctataatgatggtcgttcattcccatcatatgatattgtgaaacgaataaagaaaaaaaaataatatatagtaatatatgacggacgcttagctctgcaaatctgtacaaataaagtagtggatgtaattaaacatgtgaaatagatatatattttgattcaatgatattattcatcaacatgaatgatgtctcttacttctccttttcctattagctgcctaaattcatgataattaaattaaaattttgatatatcacattggagcttttgtctttatttatgcactagaaactaacaatagtgtaatgttcataattaagaaatatatatacaataaatttcaaaaagatctaaacgatcgatcaatgaatgagatttaaattttttaggaaaaaatattattaatttaaattatgtataaacatatattcataagaatattgcctttcgttagttgcagttctggaggacaagaattgaagaaatgaaaagatcaacagaaaccttggaagcaaatttgaggtatacatgcatgattgatcccttcccaatatccactctatatatacctcatatatatactaattaatataatgtttgtatataggaacttagctggtgaagatttatcaacattgggcatgaaagagttgaaacagcttgagcgtcagcttaagattggggttgaacgagtccgctgcaagaaggtatacatatcactttaagaatgtatatatatatattagttttatgatgatgatacaaccatcgagttcactacacagaaattttttatttcaaatataggttttttttctaaaagaaaatttcaaatttaggttttaattatcgaaaaaaatattaatatatgagattaaaaattccggttactaatttttaattgattagcattatgatgatgatgatggattaattgttaacagagaaggatcctatctgagcacatcaactacctgaaaagaaaggtaagatactaactaatatgtaaagcctaaattaaagaattttgttaaatggaaaataattacttaatttgtggtaacatgtatatactcatataccatgtttgacaaatattatattgaaaagataacttgaataatgttatcatatataatatatatatataaataatttgttgtataaatacttaaatttaaattttaattatatatatatctaaatatttaagttaatttttgatgataataattcttaatttatatttcaaaaattaaacttatattcaaccgattattaaagttacaaattactcatatatatatatatattatatatgatattaataacttgatcgatggatacaatgtatagtatttattactaacacctaataaatttcaaagtaatttaaagtaactttttccaaaaatattaatgatatacattttttaattacaagcttaattaattaatttcatttatatagtccttttccatatatatctcgttctattatgaagtaattaatagtaaactaatttagagattaaagatatttgtatattgcacgatggtacaagacccgcctgaagcaggaatacatacactccccccgtccacaaatatatatattcactaattatttaattagtgcttacatagcaacgatgaccttattacaagctatttcatcgatctcacaaaaagaaataataataatcagaaaaaatagaaagaaaatagaacatactcgacgtgatacctatatagtaataattgcatgcttgttaaggctagctttatttatatgcagcgaataatattgtgaggtctaataactatatataataatcttgaaataatatatatcttatatcatattatcaatattgatcatattttctttgtgttttgctaattaaattgattaattacagcgtcgagaattgctagaggagaacaaacggcttctgagaaaagtgagatttatcttttcactgaaatcccgtactcttctatatatatatatataaattaaactctctaattaattaatatatatcatatatatgtactaattaatttcataaatatatattggtgtatcatacaaaggttaagctagatcaacagatagatgctgtcaattaatccatccttaaaagagttggcattcaatgcaatcttcaaaggta

SEQ ID NO: 16083 - DNA, 6821 bp, Cannabis sativa
ctctctctctctctctctcatccattgttatcttgctcaagctcgagtactataaaattcagtactcttacaagcctcccttaagaattccctaaactatgtcaatggtaaaaattacaaaatatgagaattaagatggtgtttaagtccccttggaatgagtcttaaagcagaaatgaatacccttggaagcaccttgaagaatgatcttcttcttcccttagcttctcgatttggttcctcaaaattctcagatttccctctctcaaaccaagtaatctaactaataacttaatatcacaagtcgataagccttttcaaattggttaacaaactaatttaactaactgtccaagtcaatgttgaagtgttgtcgtattggtctaagtctgccatgtcatttaatggtggttttagttaggactgattttcaacagaattttttctgtgttgcttgctacaattaggtatagccaatgattgttgatgatcaagactcctttatttgttttccttaaatagaaaaattcttggaattcagattttatctataaaaataaaataaaaatcctttgcatatgttaaatatatatataaattacagtttttaggataataaaaacaatgataatgcatgttataacaactataatgatagtcatgatatcaaaggtgatgaatattcaggcctagctaacaaaagacccatgtcttatctaacttggttaaaagtgtgtctgcaagttgggtttagatgataaaattgaaactaaaattataattaaaactaaagagagttgttttgtgttgtgggtatatatatgaatataataataataattaactacactaataataacaacaacccttgaaccgcaaagacattacatgtgccatttacttattaataattcttatctactcattaccaatctaatatggtcaccacacttttgaatggcaaatatatataacattgttattgaatattactagtgcttaacatcttcatttcaagaagtgttagatagtcttacattattaatgtgtgaaaagataatatagtatatatatagaggaataggctactcgtcatattgccaattagttttgatataaaacctcattcatcttatctcaaattccaacatgatattagagcaaaaccaaaaaagaaaaaaaaactctttaaggaccattcgaccccaccagaaaaaaaaaaaaaccgatggaatctcattcatcttatcttaaattttaacatggtatcaaaaaaaaaacaaaaaaaaaaaaaactaatgactatctgaccctaacaaaaaaatctcatggaacctcattaatcttatctcaaattttaataagaagtgacattatataattgttagcgatattttttaaaaattattaattaaattatatggtatctaatacttaattgtactaacatcgatataataataaaaaaaaaagtgctagagtaatattagcatttctctatatttataggttaattagtgggaccttctctttatacaaatgcaccacaaaaaagagcatttaattagtgcagtgatggatgagaataaagtgtaggttatatagcaaaagttagggtattgcgccaattatttctttatatacatgcttgagcaatatctattatctactccaaaaaaaagctccaattatatattttcctttgccaaaaccatcatcattattccaatatatgatatcccccgtgtgacaaaaggaaaaggaaaaccaataattaaattataaatatcttcaaaatatatacatatatgacagatatatatattaatttgaaagttatgtatagatatataaatattggttttagtaattattatgattaaagttactattttctttcacggcaattcatgtatattttgttatcattttcaaataaatttctgatgatagattatgaagctctcatttttgggttatattgttaaaactaaaagtaattaaaataaaatgaaaatttgtgttgggtttaattaattaatcatattataatttactttaatgagatattgacaagtgtttttaatttagacaattaagtcagtcaggtcatcagagataaattttatatatatatatttattggttaagaaaaagagaggtagcttttgtatcatgtaggtggagcaataatttacgtattatataattattaataataaagagaaaatcaattaaagtgaaacttagtgagtgagtgagttagtgaatgaattaagaatgagtaattattataattggtatggtggtgatcatgctttgagtagagggaacaaacataaagcaattaaagccatatatatatagcaccttacatatatatagatattgttatacctaacaatataaataaatacttggaaagaaaaaaagaaaataataaaataaaatacacatgacactaaacaactactactccttataactaagtatgataaggtctcctctttaggtggcatcaaaatatactctaaatttagctttaatgcccagaaatgcacgaattcagggatattctcttcttatatatattcattttatatatctcactctatacatataaatcattaaatccataataatatatatatatactatactttaatattcaacttttttttttttttatagtgccacgccattattatttatatatggttatatatatatacagacagagtagtacttgtaatattattgtatacttatttgatcagtgtactctagctttaattatttccataagaagacgcgtgggttagtaaatctttaggtttagattttataattaatttactcattctaatgcatgtttgtataaatatagattaaaatataacaaaaattagtaatattgtataacatgcatagaatataagtttttacttcgatggagcaaagtttatagaagttaaataagattatatatatactttttcttcacttatgtgtagattattatattttaatatatataaatatattcaagtttctactaatgactatatatggaagctcgtatcgggattattaataacgatccattagtgagaaatatatatatatatctttcaatcaatgtacgtttttctttgaacaatttttttaataaaattaatttacgtattatatatatagtttgcatagtttccaaccaagtgtaaaatcaatcgtaaaaagttatttataaaaaaaaaatatatgagagttattttaacatcttttgcaaaagtgatggttaatttgccaacttactgtatttctctctttgttaattgtatgttagcctgttaaaaattaataacaattagttaatattatttagttaattaattaccattatatctagggatatttatttacatcactacataaataagtcattgcaatagatacaatctgatttttattaaaaaaaatcaattatttcatttacattaatttaaccaactacatatatttagtggagtagaatgaatcactataagattattttgcaatttgcatcattttatattccacctttttgaccgtaaagtagaattgaaaattaaaagagataaatataaatggaactttcacaatacacaattaattatatatatagcttttgcatgagcgtgtcaaagtgctcagaatttgaaatatatataaattaaaggcaaagtatttatatatattatttatttaattataatacgatatgtgctgaaatgattccagaattactattcttcaactttaaatttcttttcataatttaattattacaactcatatatatatatatatcctttttcagaaattataaatctgtactaccgactttgtagaaagtaaaagaaattgctcttttcaacatttctaaagatatttttaacaaatttggtggtcaagagacagattgatattggatcatataatcttcttaccaccaattatgatcatcttatgtgtaaatattcataattttaaacaatatattaaaaaggtcaataatttaaacacaaaatacacggcatacgaaaatttaaaattcctttcaaacttactaaaacaacaatattgttttttttttttccaaaaatgattcttagaaaagttaattagtttttacaagatcaatataatttgtttggttttatcatttagatttgcatatacatattgaaaaattataaagtcaatgtatacggcattttttttttacttttacgttttattttatatacattattattttaaaattatgttgtttttatttcgggattatgctattttcgttttaatgttatgctatacataaacctaattaattagttatttctctttattaaaaatcaacttcctgccgccatcctttcaagacatattttacccattcgacgcatgttttattgaattcattgttagtggtctatttttaggttatgttgtttctatttttataaataaatataaaattaattataaaagtataaataaataaaaagttatgtataaaaatataaaaaaaatatcattttagtatttttgaaaataacatgattaattagtatatgatggggaaataatatggctataattatctagtttttcttcaacaataaatttaataatatataatttaaaaattatttaaacttataactaatgtataaaacagaatgtagtactatatatattaaaatattgaatatgcttagtaagtgaaaattaacacatcgatttaatataacaattgaatctttttgtattttatacactagtaaaattaaaaatatctcgttatgtgtatagacattctgaattattttgttgacacatacaaagttaagaataatttctgaaattatgttaatatgaaattttaaatatataatagcacagagaagaatcttcttaattagaaaaaaaaaatctaatatatgtgttgattatattttgtcaacacacatttaataaggggtgcatgcatactgaatcaatttatataaaaaacatagaataattattatttatacccttgaattttcgacactatgcaatcgtgccccttaaaatataaaaattacacaattatgttttttctattagctttaattttttttaccgttaaaaattaatatttttgcttactatacttctactaatactaaattttgttgtcttttattaaaaaaagttattttaaaaattattattttctattaattataaaaataaaaagaaaattattaaaaatctaatataattattaaattaataaaaaatctaataaataatataaacaaactaagattttgtgatgaaaaaatcatgcttatttttatttattacaaactcatatcttaaaaaataagaaatgttataaaaagtctaataaaaatatgaaatcaaactaaaaaaatattattttaatttacataaaaaaaatctagatttttgggaaaaaaaatagacgcaaattttttcccataaatttaataatttacacaaatttattttttaatatacttttatatctaaatgaatttattaattaaaaataattaattttgtaaatcgcttaattagttttaaaattttgatttcttttttatttttcttaatcatttaaaataatttttttaagatctaaatcaatttttcaagaatttaaaaaaaaaagatgttaaatctttcttatttatatttataggggtacaatttgatagttgttagctagatttttattagtactatttttaggttaattttagtatatttttaattaagttttactcttgtttggagcaattgtacgctttttatatcttttattttgtagatttaaaatagaagaaacattgaaaatattaaagaaatatgaaaagaaaatggtcaaataaattaattctcagggcaacagcacctacaaattaattcgagaaaaaaaatctagaatatacgatgtgagtggagcttttgaggtgaagaaaatataaaatttggaggagcgcctcaacattaaaaactcatgctaaggcatgaaagacttaaaatttgtcagagaaggtcgtattggaccaaggcatgggcgtgcctaggcataaattcacagaatgctcactgcccaaataaatgggtgtcatgcctaggcatgaaaatcccatgcctaggctcgtgtctaagaattactgaggcgtgtggctttgcatacacgggccgcacataggatctacatgtcgcggcccgccccttcaatttttaaacagaaaatatatttttctcaactttttttttctttttttttttgatataaaaggagtgaacttcgatatttttcagcaagcaattcacgaatataaaaattagagagcaaaatcaattgcaaaggctttttcaacgtggttttcaacatttttttttctctattttcttcttccattctgaattaatatgtatgaatttgctacaatgaacaagagtagctaaacagtttattcggatttagatggatattatttagcatcgatttatggttttaatttgatttaatttttttcccaatttctatgtatattttattcgtacttaattattattaattgtctgatcactaattaaatgtttataattttgatacgaaatctgagaagtgagtgttaattatgttatagtgaaatacaactaaattttgatatagaacgagagtacctatatggttgagatagcttatagggtttttgtatttgatgccttttacatgtttaatttat

SEQ ID NO: 16084 - DNA, 7109 bp, Cannabis sativa
  modified_base (6466)..(6479): a, c, t, g, unknown or other
tgtgtacattttttattcagttctctccttctacaatctacattaggaaatataccacctttattttgacaagaaaattaccattttttgttctccagtaattattaacttcgttttaaaagacccaccagagtatagattttagcaagagttgaatcgaagaataaatgtgctgatattccaacagtgataatactcaatgtgcagaacttgggaaatggtacatttatgtggtccgactaccaaacagtttttttgtttttttttttccaagaagcaaaattttacatttggaaaatgatacaaattaatgtaacaaagggaaaaaaaaaagttttgtttatattttttttgtacacattccaaaagatgcacagtggtagtagtagttgctatgttgagtattagaatatctcaaatatacacaagtagtgtctcagtcaaagccttatggcattgatgataaggcaaaagccaatgagaactgttggatcaagataccatggtcaatcattgttaatcaacactatagtgactttctccaatcaagattgtcatcagggaggtaatgtttctgtacatcattaggagcaatgaaacagtcaattgagagaccaggaacgttgaatgctatgtcatctatggtccagatctcttccattcgagtgattgcggggcctgattttagattatctccaaaccgtgtgatgatcacgtttgtttgaccagaatgtgcgatcatcacaccctccaccgttcgataatcctcaatttttgtggacattgtggtttcccaataagtagggtaggttccaggggattgaatcctagttaagtaagaatcctctaagaacacaagtaagccactcctttggctaaagtaaccaaatattacatgtttgatcatctcagctgtgctgtcactccgctcagctagatccgtctgatcagctgacaatttcaacatgaaacaatcttcgcccgagattcgcttttcgcctatgaattgtgctggggaaaatacagctgatattgccaaagggtctagtccctgcttatacaaattgcaactcaattttgagccattggtaacatagtaacatggaaaataatgaacatacacatatatatttaaaaaaagtttctttctcctcaagaacatgggaccatgaaacaagatccataatcttggctggtagctaggattattcgttggttttaagggggaccattaatgtgcatttcatgctatctagctcatcaaaatcaaatcacagtctagtccataacatatataaacatccaaccaatcaatttttctttaagagaataaattttttatcaaaataagaaatcaaagtaacccaagcttcaccttactaccttagtcaagtgctttacattaacaattttgaatagggacaaaatgtatcagaaagtgagaaaaaagtgcacttgaagccaactatgaatgtgacagcacctcaagagttatagtctttatttatatctaatcttttgtttgatttagatattaggtatactctacaggcagcaggtaaagatctaagatccattcattaattaactactttattatggtggattatatctagtttggatctttttggtaaaaatgattgttgattatttaaacaaaattacagcttggtgtcgcttaaattatatctaattaagagattgagaaccttaactcggaatttcattatttgaaaggaaaaaaatgcaagtaattactgtttcaaattttcaataagctttgcttatatttatttttccaaaaaatattattttaattatcataatatctcctgacctaacatgcaatttcacgagctcaaagcatcaccatcagtagttcaaccaaccataaaagataatatatgtataactataaatatgtatacatatatttatactaaaaagaaagcaataaagaatatattatacgcatataccaccaataatttttgaggctgctggacaaaagggaaaccatgaggaaaacaacaaaaatacaataaaataaaataaataatgtagcaaatagacaaacataagcatgggtcactctccaaacttttcatttggtcccccatatccgtacacaatttcatggccatatatgttatattgctatgagcaagcaatactattttgatggttataattatatactattaatagtgataaccactctacttgcaatgtgtgctaacaatgtcgtattaacatacatatatatagatacaagtatatttttataataacaacatgggccattttaccaaacaacaatatatgtgtcgatacattgcttgaatcagtatatgagttatgtacataccactatagatctatgttgttttatcttattggtgaatgtgtacggactataattactttttaagaaacgtaacaatttactaatctataaacaattcaacatgctaataagttctaaattacaaaagaaattaagaagcaatgttataaggcaccaccctaaatgtatataacatcctaatatattattatggctaatttagattttagtcctgaacttttatatctatgttttttgaattttttaggttgtaaaaaatttctcttgatttattgagattgttaaatttaaaaacttctatttaattttactaaagaaaatctagtatggatgaaaattagagacacaatttgatacatgttaaagtttaggggcataatttagtacatatcaaaatttaggggatataatttagtacatagataattgccacattagtaaaattaaatgaaattagacaaaattctttaaatctaataattttaatagtttggtgagaatttttaacagtctgaaaactttagaagtattatttagtacatgtcaaaatttagaaggtaaaaatcctacttaacgtgttattattggtagggttaaaagtaatttaagtatataatctccgatatttatttgtactaacatcctgattaaatgtttttgtttagcatttctcagcaatggaagcattataccaatagggtaggaattacttgcctgaagagctcgccggagaggtcgaacaccgcctttggcagcgtgagcgctgagccagggtgtgtggcgccaagccacattgccatcactaccagcaatgaccttgtgaccacctactactagctcaattaaccacttgttgggaaccatttgccacattacaaaacagcccttttgagaaaatgtgctactagtactactactactactggcggctccagaagccgagacgccagccgagccgaggtcatggtcccccattgccattgtcacttttccggtgacaaatatgttctttaccgtaccttctagcttccggcaaccggtggcagctgtgaagtgttgtattatgtattgtgccgaggatgacacctatttattatttaaacataatgtattaatttgttaataataataaataagcctaaaactaaaagtcccagcaaaaactttaccaaaaaaaaaaaagaaaaagaaaaaagtcccagcaaaaaaaaaggcctaaaagataaaatattgcctaactgtattttaaagtttattgtttagccaggaccaaaattgggtggagacttgttattgttagttaatgaattgcaactagctttgccctacccttttaattacataatgataaccatactaaaagctaatcaaaactctcatctaccccataaatgtgaggatttaaaggtttatatctttattaatttgagaaccttttgtttgcaaaagaaaagataataattattatttcgatatttaaaaaatattaccgttaatctcttattttaattttttagttaaatttcgtacccgaaacacatgttagaatattttttttctaattttttttatagcgatgtttgttataattataatatcaaacttataaatttttaagtatatacaacaaaattcttgatattctaatttattaggtgtgttcaaaattcaaacatgatatgtgataaatataatgaataatactataaaaaaatatatttcgccatatattttcacacagaatttaactgaaaaatcataataagagattatagttaaacactcctttcttctatattttatttatttgacaagtacataccataataatatgtttgaatagaattccaatgtcaaaatcttgatcatttcacacattatgattctctttgtagcctaaatattaaatagaagaacatgtgttatcaatttcctttttcttttctaaagaactaatttgacttatattagactttacaagtcataataatgtgttttcatacgccacttgctttcatttcacatgagtctatgacctaagttttattagtaggcattttaagtttgcccctattatattttttaataatcataagagctacacgttgatgtattaaactatatggcaagtaaattatttgagtgtttcaaaaattgtagcctcaaatacccaagtcagttttgactcatttgtcaactatagctagataaattatcttctttcttttaaaaaataaaggttaaataaattattataatacttccatacattcgagatcaaaggaaacaaaaattgtgaaaattacatcaatgagacgttatctaactaaaacctttttgttcttttgttggtgtgtgtgattatagaatcaaaatcaaaacacatattattaatctatttaaatatggggtaaatattattttagattttatattttacaaaagttactaattaaattttttattttgttaaatgacaatatggactttttattttctaaaattgtacaaataggaccctaaattgaatttttatcaaaataaaatttaataataatatgatctagagatgttataacaaagataattatattttttgtattcgtcccgttcaaaattatcttaaaaattgattacattaaaaaataaaattattaaaaattaagttcagagtaacgttttaaccactttagaaaatacgaggttgattttgtgatttaataaaacaggaatccaattagtaagagatttgcaggtagaaaataatatttgcacttaaatatatatatttatatcagtgggttgattatggcaactttaaggctgtctgagctgagagttaatctgttatgtaaagagtaaacaaaacccagagaaatactgaaaacaccagtcccttttgtttctatctaatcactattgtatgttactttaactaacacgagtaactttctcttggaaaacccaaaaaaaacttgtatagatatatgtgtatattaatataagttacaaatatttatttatttattaaaaaaaaaaaaaactactattcatatgactgaacttattgaatttctttggtgcaaacaaaaagaataaccgcaaaggtaagaagataagaaaaaagagctattcaaagtaggaaggtaaacgatccaaacaatcatatatatatatatatatagagcaaagttgtattaagtaaagtaattagcaggaaaagaacatttttctgtttggatagtgagaaaagaaaataaataaagtaattaagttacctcattaagagagtgatcagggtgaagagagagaggaaaaagaggacaacccagaacactgagtaggatcttaaggtcagaacgcttgttgaagacgagagaaatgtgggttttgatccagttccgccatgtttgacgcattcctttctttgagccatttgaagaatcgtcttcttcgttggttggttcctctgaaagtggcgcaagtctacccattttttccttttatctaatgaaaaagaaagaaagaaaagaagaacaaaatctctgctgtttggtctctgttttactcaaatgaaaacttaagagaacactacttaaagagagagactgttctctctattgtcaattttttttcttttttcttttttcttttcttttttcaagtctacccaccacgcagatttggcgcgtgtagttcacttcactttaatttttttgagatgaaggtttgtgtcagtgtcactttcaagttgatatttataatttttttggtcagatttattttggaaaatttgaagaagaattataaatcgtgaaaaagatagtatttgattgtgattattattattattattattattattattattgcaatatttttttttttgggttttgcataaatgaattaatggaattagatgtaaatttaaaatctaaaatggattagtttgttgtggttattgactctaaaagatttagacacgtttgaaagtcagtttgcttaaatgactttaatttaacagtatgggatccaaagaaagccccaaaataataaacaataattaaattatacataatgaattattattattattannnnnnnnnnnnnnattattattattattattattcaccttttaacagagtagagtaggagtcatggggtggggtggggatatttttattttttattttataactggggatatttcatctttttaagataatcttacacgtggaagctgttatatttacatgtgctcccttctatttttttctttctttatttttctgttaaaaattgtttaaaaattaattatattaaaaataaaattattaaaaattaaattcagatcccatttttaccattataaaaaatataaaatctattttaattaataaattttacaaaatataatataaaataatattcacccttatatatttgccatatatacattcacaaagtttaattacaaaaaagtacagtaatggtagtggcgagttttatatgggctaacaacttttgaccaattctatacattttaatttgtactttccaagatgaaaaagtaaaagaaagtttcaaactttagggaatgtcagtcacatgcaatatttgacagccacaagaacaatacttcccctatttgcaccaaataaatacatttataattcagtatttatataattaataatacccacatgcactaaatttccttgagatctattagttaaaa

SEQ ID NO: 16085 - DNA, 5855 bp, Cannabis sativa
agggcataaaacccaacacggacaatatcgaatggggcatgattagaagtgttggcacgtcagtttggcgttggcatcttgccacacatgctaccttggtcacgagtgacgaggcgagtgtcagtgttaggattggccttatcatagtgtgaacctatagacagtgcgagtatcttggctaaagagcctcgatgcatggatgcacttatggatgcttgtgagcatgactcggcgggagttgttcgtgagacgaaagtgtggacgaggcacacggtcgcgcaaaaattgagcctattgttactcgggtggttggaaggctaaccttggcttagagaagtcaaggtgtcgcacgggtgttctgctgcctgaaaaggtgagcccgtgacacttatcattgctgataaactacatcactttaattttagttgtaacgatatatgttgcaaaactcatctctaaacatcactaggaaaatttataagcttatttacatatatgtcgttaaacataatcgtaatatatcacgagaatgtcactaaaccataatcacctaatactaactataccattagtcaaaatattgtgaaatatcgtaaataatatcgacatatgtttctatactgtattcctatctcaattgactaggatattgtcaaaagttgctaatctaatcacctaatactgtattcctaaaccataatcacctaatactaactataccattagtcaaaatattgtgaaatattgtaaataatatcgacatatgttgctatactgtattcctatctcagttggctacgatattgtcaaaagttgctaatctaatcgaaaaatatcacaaaacaaatattgatatatcgttaatatgtcactacatatcgatatatgctaaccaaattgtaaacacacaataacaacaaaaaatgaaatgcattatcaaaaaaatatatccataagtaaaagtatatacttacatcatcctcgaattattggctgaccaccaacaactttgtgaagaaattgacatcattgacaccacgcgtggagattcctaggacgatcatttgggatgtccccaaccacccacatcttgaacatacataacaatctacaatctgctagtctttccaggtctatgttctctagaagaagtcgcttattctttttttcctcagtgtagtccagcatatatcaaggtttcttcctctttctcacaaatggtacccctagtgggggtccaggcaggagtaggacatcatcctgtgattgtgtatcaccaatggtcatgataatggcatctgttggagtagaaaattcctcatcaacatcaatatcatcatcttttttccaatattttaggtacacatcttcatgatcactctcaagaggtcggtcatctgttggctgggatggctgtggtgccccctccatctccttcaacaacgctatcacattggccaactgagccatttaaatctcattcatctctttctgattatcagaaagggagtgcctcatattagtttgtctattcaataactctgtttgcaaaagtataatggcagcttgctgggcctcaaggctatccaacctcttcactagtgctttattgtcagatgtattatctgcagcggttagagcggtcgaagttgacgacttggctgatttcgaagtcaatggtggtggaactatatttgccttatgcacaacttcaacaatggtcttgacttgcgtttcaaacactaaattctatgtaccatcgatgttcactatctcattaatgtccatctcaaaacaaagaggggatttaccctcgttgatggacttgaaatactcctcttcactaggtcgggagcacaagcacttatttatgaccaactgtaaataaaatgattaaaaattgttaaatgtcacaaaaatatatctgaatcatatcacaaaatttcaccgatatatcgctaactaacatagatctacatttcattcacatatatgtcgctaaaccgatcagactatgtcgcaaacaattcgctaattaacttaaagctatgttttatgtagttcctccacaaatatatcacaaaatatatcagtatatgtcgccaaaatgtcactaactaatagtgcaacaatacttaagttcacctgcatattcattgcaaaaataattggcttatgtcgctaactaattgtttagcagtacttaatttcacctacatatacattgcgaaaataattgatgtatgtcgcaaacatattgttaaacctataaacaggataacaagataagaataaattaaaatatcaacatgaagaaaatataagaacttactctttgtgttgaactgttgtgcaatgtcactcgctttcacgtcttgtttctgctggccctccttggtttttcaatttatcatcctagggaacctagtcccgccgcattcatcatacttctttcctactttttctatgacttcatatgtccaatactgtttggcaggtacgtagccatgtacggtatacttcgcctcctgagcaaccttccttcccttctttttctcaacgttctccttgtaatagtgcatgtctttactcatataccacatcaacttacaaaaagtacgctcaccctgaagatacttgaagaagaattcaaggtcatcagcaaatttcaacatgtctggccaaacttggacattgccatctttcgaaacaaatacatcatcaacaaaagtgcgtaatccaagcttgtagacaccatcttttatcttgcatctatgcagttggagcaacaatgtatctaaatgcacaccactcctcctttcaaaataagtcctcactaaacggtcactggacttggcttctatctcttcctctttaaggcacatacgtaagccggtattcagtccaaaatcaatttgtctgaatctcatgtcagttttacccacaagaaaccatatctaatctttgaattcttttttaaatttcatcttccacaatagtaggttgtggaccaacgcaaaagaaagtcaatctctagtttccctgaatgttccgaaagggctagccttaactctctcaatcaactaaagcgcttcaaacttttccttaatatctttcaatctatctgaaccccgataggtaagacgacctatgttgagaaactagaagtttaagtttaggatccatctacaaaaattttaagaaaacaaaaagagaagacattaaaacccaaaatggaatatactgttgtgatatcgttagcgacgtctaacaatatcaacaacaatagaatgggcagtggtctctttacgatatttagcgacatgtttgcaacattgctagatattgcaaagacaccactgcctattctgttgttgttgatatcgttagacattgttaacgatattgtaacaatcaataattgcagaaaaacaaataactcgaatagacaacaacaaaaatcaaatgtaaacttaactaaattcccttaaacttaagcataaacaaaaaaataaatctaaaaatccatttactgaatcgaatcaattgaaaataacataaaaatccaaatacatacgaaaatttgaggagaatcggcaatgggttgcttgggcttgttttccatgtcaacaatggtctaaatgtggtggagttgacggttgggtctcgatttttgatcttctgcgtggttgtcgtgggtttcacagtaccggaggtcgagatgggaggtgtaatagggaatggggttcatcgagggtttaagggatcggagatgggacagttagagggtctagttttttaggacggtcgaacagaggagatgggacagacagtggggggtcgaaaggttgctgagggacgtttatagtgtttgagagttagagagagagtgtgtgggagttagagagagattttttttttttgaaatggtaaaggtatttttgggtttattggttttagaagtatattttgcctaattttttaagggtgatctacttaaggaccatgctacacatttaagcatagtaatccaaatttccccatattttttattgtgccaatttgcaacatcatgtaacttcatgtttaagcccatattttttcttgtcaggtcgtgctagtgctatgttgaaaaacgtgactcgtatttacaactttaatttcacgctcaatgggttaatttttaaaatacaaattcgttccccacaaataatttatttgtttttcaaaaagatctccacaataaatttagggtaaataccattttagatcatgtgttttgtaaaagttacagattagaccctctgttttgttaactgataaaatggaccctgtatttttcataatggtacaaataggatcctaaattaattttttgtccaaataaaacttactaataatccaacttagagttgttatgataaaactatggttaaattttctacatatgttcgtgttaagaattatcttcaagttggttatattgaaaaattatcaaaaattaagctaaaagttatatttgtaccatttttgaaaatacagggttcgttttgtcattaaataaagagtaatttgcggcataaatacataagttttatctcgtgtagaatataaatacctaagtcgtatttttggcggtaaaaataccttccgttacactcttggaacttccgtaagtacctctccgttaactgtcaaatcagtacctacgtggcagtccttaataggtccatgtcatttaatttttaattttttttttctaacaatttaaaaaattaaaaaaaaattatttaaaattttaaaaaattaaatcattaaaaaataaacatatattttcccttttctcttctactatctctgtctttcctctcgacttcatctccttcaatccccattccattaataaccaaatcataatacaagaatccaaaatcattaaacagatcaaatcctcatcctaccaacctgtttttttttttttttttttttttgctttctttttctttctctctctcttgaacagtcaataaaaacccagaaaatgggtatgaacagtgaacacaaccataaaataaatttaaaaaattggaatgagcctaaaaaaaatctatgcacaaattcgaaaaatattttggcactaaacctcatcacacaccatattatctttgattgattgaaaaaagacagtgctaaagtcattactgtaacatatacatttatatatatgtaaccgtatggatcattttttaatgggtattacccatgaatggttactaaacaaatttaattataaatattaattttaaaaatattaaatcatcaaatttggatctaataacgaatattaaaagaaaattttaaatttttatgcttagtttaactacttaattaaaaaaaaaatatctcttttttatactatatcaaaaatatgttcatataaaaatatttaagtgaaactcaactttacttgtttttttttttttttgctaaaaacttttttttttattttttttttaaccgatgtaacaatctcagcccatatgatgtaaaagtgagagatttttctaattagatagaaaaattaagcataaaaacttaatttttttctaattttatccattcatgggtaatacgagtgcacccatgtaaatatatacacatgtgagagagaatggggtgtgaatagataaccaaatccaaacaaagagaagaaaaactgccaaaaatacgacttaggtatttatctgctacacaatataaaacttaagtaattatgctgcaaataaaccttaaataaaataaaaaatctaattaataatttggggattttataaatatatacgtagttaacgaaa

SEQ ID NO: 16086 - DNA, 7537 bp, Cannabis sativa
  modified_base (5154)..(5156): a, c, t, g, unknown or other
ctcaactttggagggtcagacaatgtatttgcatgaactaggggttatcttttctgatattaaagttttattgtctagttttcctagggcatctctttctcatgtgtagcaactttattgttaaggctcatagattggctaagcatgcctttaggatagacaatgaactttcttggatgaaagaaacctccccacctttagtgtaacttttttttacccttgttattttaacatttatcggttaccccaacaaaaaaaaaaaattatgatcaataacgataaaactaactatcaactaattacataataccaaaaagtgttactagaaatgatcataaaacttatattccatgtatcataaaaactaacagttatccgcattttcacaaacatcacacgtggaaattaatcagaaaaggctatggagtcattaagccgcctaaagtcctcgctccgcgatttcaaaggatagaggccccagcttcgcagaaccagcctccgcgagagaagtttccccgaatgcgggccacaaggaaaacgtctgcattttggctactctttccattccaaaatatgggaccctatattcctgcaaaggatatggaccttcctttcggatacattgattaggggtactctcttaacctgcagaagctcggtccgcacatgccaaactacgggcccaccgattggacctttcctatgtacgatgtcagaggttgtctcccacgccacgctaccatacagagcatgcatgtcttagtgtaccgtgcaaaacgatccaatgactagggatagggtaatttaaatgagaacgaccctggaatgacacgcgtccaaaacaccgccagtacagccagtacaatctgacatcgataaagactatgggtgttcataaaatacccaattcaatctgcacaatctaatctaatctgtaaaatgcaaacatctatacttgtgcagattggattggattggaaaaatttaaaattcgcacttgtgcggattggatgtttattgacatgtaaaagaaactgattcagttcaatccacacatatttagatatattttaaaaaaaaattatatatacaactaatatcttaatgtaaaaaatagcaatttaaaaaatttaatatatacaatacaaatatatttaaaatataatagattctatttgtatttataaggaaaatataatctaaaacaaagttaaacttttctttatacatacaatttttttcttcttggtttgaatttgttatttattattttaatttattgttagagacatgaaacaacattaatttgttttattttgtcgttagttatgtgaaaaaaaatattttttttaataaaatattaaataactcacttttaaaaagttaccaatccaaaataactgatccaatttgtacttttgcagattggattttatttgctatatgaatttgattggattcaaaatataaaattcgcaccaagtgcggattggatgcactatgagtaaaatagtgtagattggatcagatgaacactcctagttttcaatctcccatttgaaatttactccattgtgagagttgatcaccaccttagaatcactttctacaataacaaaattttactcctcagccgttgtctccaaagccaaacaacaagcaacaacctctccacacaaaacatttgtaaagtttagtcttgatgtaactacccaacacatcgtaccctgatgatctctaacaacaacaacaacaatatacatgttctccatccccactcaaacatcataattcaatttgatctagtcaagcagagagggacgccaaacatccagacgagtcgagagtgagtaagaatgatagaatctctataatttgtgtaacaacaagaaatagagtcaatataatatttaatgttacccaaattattattatgaaccttatcatttcgagcccgccaaacaatgttcgctacaatggacacatacataaatacctcatttacatcgatgctcttatcttttaagctccagataaacttaacctagtcccacatatgaataccagtgcctaagataggaagataccccacggagatgacctccataaataatatgccaaattgcactgaaagaaaaggtgctccatagtttcatcctcattcccactgatagggaaaagggggttgtcaataagaaatctcttgctcggatggagcgggctagaagcgcgcttgaaaggatactccaccacatgatcttgtgatgctttaagaatttactgttccaaaattattctagagggagggcgagacctcatagtgaggagcccattagagggcctgaagtaagcggacttgcaagagaacttgccactactttctttagtccaaacctaagaatcacttcccctaccagaaggttttccccctttaaaatggcagcaatggtcccttgatcaaacaagtagtgaagcttctagagatccaaattcccattctcagtctgaagatctgcaactaggggtgaaaatgagtcagttatggtcagtttttacaattttataaccgaccgtttagaaactataagcgtataaaatcaaccgtgcggtttttggcagtttttggtggtttttaggtttggcaattttggatggttttgaataaatagtatttttgctccccgaactttttaccctaccaaattttatcccttataatattctgcttgttaaaaatactcctcaaactatttaaactaattaaatttcatccttttgttactctccttttcactttggtttaaaactgatgatgtggcatttttcatgtagagaaattatgtaatgacatggcattacaatttaattatcaaattacaaattattccaaaaatattaataaataaaaattatctaaaaaattaaaataaaacgtgagttggaaaattaaatgggttgttcaactcctatttaaaaaaaattgaaaatgtaccatttttacaccgtgagttgagaagaagagggctagggctgatcgaaggtggctggtggcggtcgaaggtggctggtggtggtcaaaaattttcagacggttcaaaaaaaaatcatgaggctctgggggtcgaaggtggctggtggggtcgaaggtttttaggcaattcagacggtggttgatggtggaggtctgtgactgacgtgacggtggttgcaggcctggttcgttaggggcgaccggtggtggtgaagaagaaatttggtggactgaaatactcatgggaaagaaaagcttggccaagtcaaagaagaaggggttcaggttccccactaagcagagaatcgaacctccattttatggtaagtttgattttttttgttttttttttggtacatttcaactgaatatgaaaagtggtctcatatgtgggtatttgtgtagaataattttaagctttataggaagtagttgaggttttttttttggtaatttctctgtttgtatggtcaaattgcacatggttagatagagaataatttttggaatctattgggggatgggtctaaggggtctgtgagttactgtggatttatgtagtttattattcactgacttttgggtagtgtattcattatgtggagagctctatgtcattgataagaactggatttttagttttagaccctgcaatatataatccacgtttacttttgccagcaatatatagtatcaaaataagtcagacacataacaagactcaaactcacaagaagtaaatgtatttgagtttttttttaaatagttttggatcattttcaggttgacaccaataccccaaaaaggtctaaacgtattaatggaaaataatagggaaaactaggtctagttttgcaattaggtcttgtatttcctgttttcttctctgttttagttattggtgcaacacttgttaaatacatattaagttggttaaatatgtttaatatataataccattaagcaatttacccaacatattgtaaaaaaggagttctatgctaaacttgtcttattttggatttgtcattgaagacatttttagtctttttgtttttgctaaattccttggttttgattatgtaatatgtcagctaatactaattttataacttagaaaaattagctttgagttgtaatttaagtaataggttttctagagggtacaaacatagatataataaaattgtggtaattgactgataattgtggtagtttatgagagtttatataattgtctttttatgtagagtccatattgtatttagttctgaagctctatggtggaatcattgagccctttttaatgcattggttaggaaataaaactagaaaaaaataatttgccataagtatgtcctaaccgtttagctatttacaaaatatgaaacattctttgttcaaattaattgtttgtcggttttcgaagctctatagatatatggtcatttgcagcagtggttatgtttattatagttttgaacattggcagtttttggacatctgtgacatttgtgttaaattattcaaaaacttaaattacatgtattttgtggtctacacttcatgtttaaaggtcttatattgttgacatcaatgaaatttatcttgttttacattgcatatctgtctttggtgtgtgtttatactaatttacttttaatgtttattgatactcataggttaatgacacacaacttgaagaccctggacactacgctagaaatactgatcctacacctcatcaatcagtaagttcaacaactgtcacaccttcttcgcaaccaagcaactcagcaacaatggtacaatatcaaactcctctcaaataatcattcattttaaatgtttccaactatttgtgcattaataatcacattttgtcattcattgtagcaaaggacaccccaacaaatggcaccaacttactgagggattatggactatgcaaacagtatcaacgactagtggagaagtattttgagtagtattttgaatagtattttgagaagtattttaaatagtattttgagtagtatggatatcataccaaagcatcaacttacaatattttgagatgtaattagtatttatatgacagaaattaatgaaatttcatgtcnnntaactttctttgtaaagccaaaagttacatctttcatgaaatgtaactggactagtaatgtttttctaatagacagattgttttagttatgagattttgttgaaaagtgtcatgtggtaacatgaagatatatttctaagtacaattttatcgtacaagtttatcatggaggattcagtttgttttgatattttgagatgtaattggtatttcggaggcaaaggtcaatgaaaccaaagtcatggtttgctctgagacctttttatagtctattgtgtttgtctcctttttggttactgagtggttttgagtgaaggtgtcttaggttttttagccgttttcctgtgttctctatttcgtggttggtgctgttctgctattcctgttgtctttgtgtgagttggtgtgtttgctttagttcagttctgtgtattattgcttgtctttgtttcggtggtaggtaagatttggttaggtgtgggagttatttctttggggtccatttcttttgtcctctggtgtttagtatttatggagacagttattgctatctcttctcctcagaaaggcaaatgtttttcatgcaacgaaacatttgtgattcttgccccgtgtgcttcttcggtaaaggcattgtctgcatgctgtttgtatgggaaagttattgctcccatgtctgtggatgtatcctcagtgtgggattttgtggcaaaaacctggaagaaaccggtctctgtggtgcccatggcggaggataagaagatgactaatacgttcaagtttggctttgagtctacagccgacagggactgggctcttgacaatggcccctggtgtgttcgcgggtatacgttggtgatgcaagcttggtctccgagtgtagatgggcctaaaactttcaacctgttgcgggtgtggattcaaatccataacctcccccatgagtatttctctcgtgataatggcagccttctagggggaatggttggtaaagtgataaagattgaattggaggaggataaaccattcacctggacacctttcatgaagattttggtggatatagatgttcacaaacctctagtttcaggctattttttcgacttgacttcgggtgtgaaacaatggttgcaagtgaaatatgtaaagattggtattttttgttacttttgtggttgtctgggtcatcaacgcaggggttgtaagttgtcgtcgccggttacggtggcgaagaatgatggcgtcccgtttcccatgtatggcccgtggctctctacgtcctcaacatatcatgatgtgttttctggaccttcgtttggtactgctcgtcagatagaattctcgggcgtggccaatagtggtggtgcgattactccgttggagacgttctcggccgacggtggggatgctttgaagggcaggcctgctcgcgtgcatcgacgtctgagacgtcctctgagtgtcactgcacttgcagcgactgcctctgggaaggctcaacgaggcgtgtggttcccaaaacgtagctctgcaggcttggagaatggaacttccattttgagtattgaagccgatactggtttcctggacaatgagaaaggacctgcatctcttcctgttttacgtgaggatgaggtggaccggtccatggggagggaagttaatttaattgataaagccgttaatttggctttagtggatggtgggcctgctattgggccgaaagatgttgtcagtgggctgagtgtcttgtgtggggagttggagggtgatattgggagtgggccgaagactgttgggctgaagtctgttgggaatgggccgaaatatgttgggagtgggctgcctttaaaggatggcaagtcttgtgggccgtccatggtcaacaataatatttcccagtttgggccgaaggagggggatgcttattctaatactattacaaataataatgtggaagcaaatgggccgagggtgactaatatctcttctcattcttgtgggccggctattgaagaccaagtgggacatggccaagttggtcctttgtctcataaacccaatgttgaccgagagcctttggtgcaccctaatgaagacttagctttggctcaatttttcaaagctcaagaggacttaatgcatgatcttaaacattttgggaagctagacttatatgagattcgaaagataggaggtgatattggagttccggcttcctcagaagtgaatgaaaggacgactccgttcaaaaaaaaggaagtttgaatcctctgcttctctttgctctaggcctcataaaattcaccgcaagtatcccggtgttgtgcgtgatttcccctgggacccgagacgtcagagaatgatgctgaaattgtagt

SEQ ID NO: 16087 - DNA, 3189 bp, Cannabis sativa
aatacaaaatctaaaatagtatttttaccaattaattgataaatatatattttgaaaaagtattttctattttcataattattctaaaattggtggtctcaattaaactgatctcccatactagtattgaaaggcattgtatcattctaacttgactttgaaagcatataggtaaagtaaaccaattgttattaattaagggaaggaaccattcaaatttaattagaatatgatggaattataatatattaggaatcacaaatgataacatcatagaacttaagctggtgggaatcttttgtgctttctttaattaatagtttgtttcttcattcatattagccaactcaaacaaagattatggatataattagaccaacatggcaaaaagttaaggtcctttttagtgtaatattatataattttgttttattgtattattttctctatgctcattgctcattgcctcttgctctgttatttagctcttttggttttggcagtatctctatttggtaagattccttattacatggttgagattgtttaaagtacgaaaatattctttcaaaaaaaagtacgaaaatatttataaatacataaatgtttacatttttttaatgtattaatacatatgtcatataccataataacatattaacatggtatataattgtgaataagttgataatttgttggataaaatagtaatataattacctggggttttgagttggtaagtaggataatgtttgtacaattgtaatttttttttaagtttcattagtacaaattttattattgtttgaaacagggcacatataagactcaaattggtagattttaaattattggatttggccggaaacatcagtaacagttacttccaatcttcttttaatgaattcaaattgaaatttgtgctggcaaaattagaaaaaaaattatagttttacaaatatttagtacttataccgctaaaaaaaatattaaatttatgttacttacaaattcaaaactttagatattaatatcactatttacactaatattccaaacaccgaatatcatcttgaacatgaaaaacatatatacttcattcatatcacaacaaaagataaattaagaaaatacataaaagtagtaaatttaatggagccaatcacacaacatgatatatgtatagagagaaaaaactactagtgatcatgatgagtatcatccacaaaatttaaactcataatgaatttaccaaattaactaaataatatatagtaagtaacacaaacacacacaaacgatggtgacattactatgagtcaattatgtgatctagctgcgcgcaagagccacggcggagagcaaaattatgagtatgaaaacggcaacgccaacaaaagatccgatgagagaaccggagatgcgcccgcagaaggagttgaattgttggcatatcgcgaaccagttcgccgtggtgtttccttggtgtgctaaatagactatagctgcggatgctgatgctcccgcagttaaaaaaccaagcattacctataaaaaccgcaaactatgagttatgatcatctatgttattgacatataaaaaattataattcaatttttttataccgcggtctacattatagttattatagttataggcattccattcatttagaaggtgttaagtatcagatgcccaataacaatactattttcttaaaagaaatgctaaaagatgtcagtggtattcaatactatcctacttgttaatataattaagtattgaaactcatataattttaaataataacttttaagaaatctcgctaactagttacaagatgacttgtaccgtgtcgaagatgatcaaaagtattctactcttttgtggggtgcttcgtactatgtgtaggatagaaagagatagagaaacaaccagatagccacccacaacgccattcacaacaacgaacaacctattcaattcatcaatttattattattaggtcacataataataatgcatcaattaattaatactcaaaaaaaaaaaaaaatcttggcattttaagttgttcaactctatattgatatgatttattaaaaaaaaataccacactaataatatgatccttaataattaactaacagttttcaatattatttattaaattaagacttaaaatttactcaaatgcatcaataacagtttgtcatataaaaatattttatagtgcatcttaacatattttccaaaaaataataagaagaatatatttaagagtaagaaaacgtacgtaaaagttggaaggtcgtcataattagccttaaagcgaacgaaacgagtagcgaaaggaagagtttcatcggttgttgccatggcaattgcacttgccatggtaccaacaattccaataagccttagaacaaagtccaacattgatattcctcttcttgaaaatgacttactattactactactcttgccttcttcataaccaagttccacaacattttctttgctcatcatcatatataatgacccttaattttcttaagttttgattgattaattagaagtagtagtagtactatgtatattactaatgaggggtatttatatgtgtctacacaaatatatatattattttgcattgactagttcacaaacacatatatagataatattatataattaatgcatcgatcgtcatgacctaaattcttgatgaaatgataatacatgacctaaaagctagcttatcctaattttgtgacgttttattaattattagtttcactacctgctcatcatacttgcttttgcatatatatatattcatgaatattccaaaccaatataatggggaaaagaatattctaatatccaaactatatgatctaggtgtaatgatgatgacaattgtcattccatgccaactccacaaataatgaagcttatgtattagtagtggaaaacaaatctcaattaatagaatgataatgttcttaattatatatctacctagggatcttgagatatgatatcaaacttcataatattcatatagtttactctcttcaagaaagaaatttgggcaaatggggtagttagtatatatatgggcctcacttcagtggcagtaaagtttgacaatttgaattttttcaaggtttgagttggtatgt

SEQ ID NO: 16088 - DNA, 6360 bp, Cannabis sativa
tctcaaggacatctgtaattatggctgctgcatgaccaagtggttcttccgcagccctcttcaacatgaaagcctattaaattaaggcgcaaaattatttaatcaggagaccagatatctactggtaataataataataattattattatttaaaaaaaaaacaaacagaacagccaaaactagagaaaccagtaataaccattttactcgaagtgaaataggtcaccactcttgcaatagacaagcaacaatgtaataacaactacatcaagataaacgaaattatttaatgccagagagagggagagaacctggccatgatgagatatagccaatgtacatgattgctgaaaccatggttccccatcaatttgaacaggaaatgcagcaagtagctgtatcttgattgactgaccctgggcaagccttcgagcccgagaaagtcccacctgttagcataccaagataccagttgaaaaaaaatatccaaggcatctgagtctggataacagaaatcaagctggacagaacagaaaccatctaatccaattggaataataaaagataataagctaccaataccaaagccttgaagcatcaaacaatctttaagttcagttagacatactgtgaaagagaaagttcaatcactattacttggatggaaaacaaatgaatgtacaacattagatggctatttatagtacaaatagtaagggaaaaatcaagcagaccgggggttatacaggcaattaaagaatgaataatgctttatcttgtccaatgttggaacaccgaatttatgtacctgaagctttccaaggtgccaagttcctgatatgctaacgacctcaagtattttatcatgcatagattggggatcaaaattatcataattttcatcctcattttgccacaagtctacaccacccatatagcttccaatgtttgcaacaagcactccttctgcatcctgcaaaggtatgcagtaaaatgttaagagccaaagcttcaaacttcattgaacatgtcatggttactacttactatttgcctatttgggcacctcaaatcaaataatgtttaagaaacttgtagtcattatcctgatatcaaatgtaaaatgttcacattattacttagtgaggcctgcttgatgtcattcaatactaacctcaggcacctctatctctacaccatctacctcaactcgaacttgccaagggaaatcttcaaatgttctatccataatacccttagcaccttctcttgcataaagaactttattcataaactgcagtggcataacaatggaaacaacattgtctggatcaaaagtttaaggattacaaataaaataaaacagaaagaatcaacaagaaagtttaacagtgttcagtaccatctaatatttaagtaaagtgattcagtgatttttcaacttttctatcaaacaattttaatgttctctctataatctagtataattatgaactataatgattttgctcatattttgttggctgcttaatatttctcttaatagttatttatttgaatatatgaaataaagtgattttctactcttctgtcaaataattaaagttctctttatagtctagtatgattatgcaatgacgtataatgattttgctcatactttgttggccgttcagtcctcctctttataagttatttaatatatgacgacctccaagctttaaaatctaataactgattttacgactcaccagactccagactaatactgttattgtcatacaatccgaacctattaagatcaaataaagtccgaggcacttcagtgccaatcaactaactttttttactttctttcaaagacttacctggttataaaacttttctggattctcctcccgtaggttatgaatgtcaagagcaactttggcatcacagccaattcctgtaagcaaatcttgtcggaataaataacttgcatgtaaaagaaaacataatcagagaagcgaatgcagtcaccctgcaactaatagaagaaaagggttcccattctacaaagagaagatcctaatccaaactcacctatcagcaagacaaagtgaaaccaaaaaaaaatatcatcatttcaagtagtataaattaacatagtcagaattctcagagtttcaataaaggaggattactcatcacgagaaacctcaaaaggcagaaaagtatgcaaatgctaaaagtattatgtgctgagagtttggccaatcacaaagaaaaattaatcgaagtaatgatctgatccaaacgatacagaaaaccaatggatcattaaggatgttaggtagaaaatgagttaagaggaagatgaatgtgaagccaactcgacttaaatgcaccaacctagcttcccaaagtaggcgcagctcaattgtaaactgaagcacaaaaagagcaccaagacattacccaaaattattacaagctggtgatgtctaaaaagaagattcacataccaagataattattcatgaattttggaggttgaagttgttttccctgttgatttaaaattgctactttccacctgtcaaggatggttactgcagcatgctctatgtcatgcaacaccgtactgaggcctccttgtctctcaatagagcccaaaccacttccccaggagagaaccctcgctagatcatttcctgttccagctggaaggattgcaacaggaggaggggatacaaaattttgcttttctatgaagttcaaaacccaaccaacagtaccatctcccccacagacgagcactctgaagtgaggcacctttctgaataaataaaaaccaacctctggtccttgctttgaacttaactcaaatatctacatcaagcacaaacacgtaccaaatgtaagtttaataaatgaatcatactattacaaatgattttcacaactcccaaagaatcacatgtaaggaaagccccatattgttcaagttgataacataatggcaaaaagttaagtatccagcttacaaattgccatgaaaagcaaaatcattagatcattaagcttttaggctagttcatattaggtcccactgagagacacaacaaagatcattactaggtctcaataagtcttgaaaaattataataaaactattatggaacaagggttatattactggagaaggacaataagactgatagcctgcatttgaccaagaattaatatcaggatcccattatcttgaaatgttcccaactcactggagttgctctagtttttgtatctcaacaaggtaaccaaacacttccacatacacccatgacccatccacgtattcatcactcatgtgataacgcatacttataatccaaaggatcaatgtgaagtgaaatttagcaagagcaaaaaatatgatgtgctgcaaccaaaatggtaagtagctacagaactaaatgaataaaagcaaacctgaactggattcaggagaatatttagtcgtaacctcaatgaatccccacgctgagccccactcttcttgtttataaaaactaacaaaggcctggcatctggtgacaactcagtcagctcatatatttgtttctgcctcaatacctgatcatcctttctaccaatagatgaggttctaccaaaactaggcttggaatcgagttttttatttatatcatcatctttgtactgaacatctactctatttatgccattagtattttcatctattccatgagaaccattagcaatttgctgagtctcaccagtgctttctgtggacatatcaactgtactgccactatttccagagtccacagaggttccattttcattcttgtacttcttgctttgactccttatgctagcacggacagtagatgctatctcatttgctccttgggtaattgaactcaaaaatccaccagattgccgattgatttctctaacattaaggggtgataagatcagtcttttataaggacccaaatcacaaatatcaccagtttcattagataaactattatggcaatcaacatgtactagccgttgacaccacaagcagcaccatataggggatccatcgagaaaagaaccactacattgctcctcacaatagcaacaaaaagaagtctcatcagattgatccataaagtcagtccatcggacagcccactgatgcattacatgttcaaaaccaatcatggatacacacttgcaatccttgtgtgcttgggaagagcaatgtgcatgaactgctgcaccacaaatgctacagacttgaatagagctatctgatgacaccgtctgaccaagagtttgagaagggttcatcaaatttagacagacacagcagttaaaattctttccacgagatactgattcaatagtccaggtatgaggagccagggggactttattcttcaccttcgggtttatcttcgaccgggttatggctctcatccaactcaggttaatgtttctcctccattggaaagccgtataagctatagttaaaattccaaccagggcagcgacagtgcaagatattataaaaaggcgatcagtctgattcctgttgttccaacttgggaagaatatctcaaattccccagcatcatccatcagacctatcttttgttctacatgcaagattaaacaaacaatatatagctaaatcaccagaatgatccagtgagcttaattaggataaaaaacagcaaatacatctatctgactccatgatcgaaatggttaagcccattccgaatttcacttaataccctacctagcttcacttactgaccaaaattcagtcaagtgctttcaatctatactacttaacaaaacagcttcactctgcctcctagaccgagcatgccattgtgacaaattgggtgttagagacgtcaacaacaaacgtacctgcaaaatacaagacataatgaaaaaaggaaagaagaagaaaaacaaaacaaactgaaactgaaactggagaggtttcagagttcgaaacttaagaagtctaatccccaaaaaaaagcataaaagtaaacaatgatcttgggttgtttcacctaagaaaaacagagaaaataaatgaatgaaaacaatcaacagttaagcagtgcaataatatatttattggttcagatcatagttcaatgtcaataataatcttcatactcctccctaccacccttccatcttgaaacatcttcactttccgtttcaggatcccagcacccaaacggaaacttcacattcattcaatgcacatgcgaatcaaacaaatacagttggagcaaagctaattgtattcagataccaaataaattagcattgagaaaaaagggaagaggaaaaactcacagtataaaagagaacttcgatcgagtcgattacaagaaaccctaatcaagaaattagaaagagaaaaatgagaatcggagcaaaatccaaacgctagctattcaatattctctcaaaatccaggagaagcctcccgtgctcttagttcttaggagattattaatcttttaatttaaatacaccattaattaataccattaagttttatttcttttcttttgttatattttcggaaaggataaatttattaattatgggtgtaatacaaaaaataattataattgtaatatcagcattcgtttttatttcttttcacgtattcgttcctaattaattagtttttggtaccacaataattaattttttttactaattaacaaagattaattaatgtattatcaaaaaaaaaaaaaataaagattctgatgagtatgggtcggttggcgttgtatggaaggaagaagtgtgagatacgaatcttgttcgatgatgcacacgtggcagaggaagacggcatgtcgtttaaggggtggtgggtccacgtttggggcactgtggcacgtcctcagccgacaggttttcgggaaattctgacactgtggatcctactgcactcatgttaactatagatatgcatatatttttggtatgttttaacaagaataattactatttttctccttcaatttttggcattatttgttataacattcaaatttttttaatatttttttttataataatctattaattctgaaaaaaataataaaaattattaaaaaaatctgataaaatattaaaataattaaaaaatatattatttttacttaattttttttttttttttacacaagatgtcaaatttggtatatttttatatttttatttatgtttagttttttaaacttttttataaaaactgtttttcaattttatttttcaattttttttaattacaaaaatacttttattgctta

SEQ ID NO: 16089 - DNA, 6597 bp, Cannabis sativa
ttacagcgaacaagtgtaattgttccataattaattcccattgaaatcccgaaatcacccctattctcgaaaataaaattcccttcgttttcggactgagatggaagaagggcatttctgtcattcaacgaataaagaggaaacttcgtgggttgaaagactaccgaaatataaaattaacgtctagcccagcctacatggtgctttcagcttacctaccagcaagtaatatttgcaacccaattcgaataaacaaataattagaacaataggataaagtctcaatcaaaattcatcacagtgttcaggtcaaaaggaggtttatttttcttccttgattttcactgttcggttagcaattttctcacttaatttacaagggtgatcaatttgttttcgatatattgatctgggaaaatgcttgtttctgccctcttgacctcagtgggaataaactctggtctgtgtatcatatttttcactttgtactctatattgagcaaacaacccagcaattatgaagtttatgtgcctcgtttgatggcccaagggaaatctaaaaggagaggtaatttcaacttggaaaggcttataccttctactggttggttgaaaagtgcttatatgctctctgaagaggaattgttatcgtcctcgggtttggatgctgtcgtttttatgcatgttattaccttcaggtactttagttgaagtgtctgttgttcttagtgttattgaatttcatatgaaagtgaatgttatagtcttttgtaacatgcaaaagagttacttattttacccttgtttttctttatcaggttcttacttgatttcatatttactaatgtcgatgtggtatttgtttgttttacacgcagtttgaaagtttttttgtttgctggggttattggaatctttgttattctcccagtgaattgttccggagacaagcttgacaatcttgacttaactaatctgtttaataactcattggacgtgtttaccatttcgaatgtaaacaatggctcaaaaaggtaaatattaatggattcaaatttgaaaactttgaatttctttgagaatcgatatgatgatataccagaaatttgttcaaaataatgactgaagaattgaacaaactagaactaattttcatctataaattgtcttaagaacatatatatatatgtcctgtttaggagttctaaaatatgctgatattaacattcttttgcttttggcagcctatggattcacttctctgctatttatgtagttacaatatttgtttgctacctactctattatgtaagtagctttgtaccacttttctagttgatcatttaaacatttcaaaaataaacagttttctcttaacaatctaagcagagccaaaagttaacttgctactgaatgttatactctgtgcaggagtacagatatatatcattgaaaaggttgtcttattttgcttcatccaagcctcaaccacatcagttcactatcttggttcgtagtgtgcctatttctcccggtagcagtatcagtgactgcgttgacagcttttttaaagaatttcacccatcaacatatctgtcaaatgtagttgttcatcgaacaaacaaaattcgaaatatcattgtaagtattttcttgctgacttttcctgttatcaatgtatccctgctttatcttttgtctaagttttggattttctattgaatagagtcactagatgtgatttatagttgccttagtttcataccttaattttgacatgtgtatcaaatagctctttttgtgtcttgtttttgtgggagtcatatttgagttctttttagcttagagtatctgttcctaggaagagagactggagtagatccaacatcagatacaatgtggactttgacaatagggagatgaagacactgaaccaactaatgttttttgttagatgatggaaatcttgataacataagaactttacattagctaataatatttaatgagaaaatccaacatgcactttccaattaaactcctaaatctacactgccaactaaacatctacgagttctgttttggagcagaaataattcactttaaagatacataattgcagtttgttgtgtagaaagatgtaaaccaaattgatcctgtcctttctagctcaattagggaggagatttctgtatatatttatgatgtgtatcagtaggtgtttctatatattcttttatgttttattagaaaccactaatatcataatgaattgtttcataccagttgctcacccttttttttctagtatgatgccaagaaattgtacagaaggctcatatatctacggtcggatcccgctcaacacaagtatcaccgtagctgctgttttggactttgtggcaagaaggttgatcttgtagaccattatggaaagagattaaatagtgtagaggaaaatttaagactgcagcgaacaggggtctcattcacaggagaagtaagtgttagtctgataacttcttatcttataccacaaaacttgtttacttttgctgagatcagttgctgttcgtagaactttatgaaatgtatttgccataattttttcaaatatgttcaatggaacatgaatgagaactcctggattaaatttatgggcatgttggtattccattcatgtttctttcattagagtctcgacataaagttcgtgacaatcccagaaatcaagtcaatttttaatatgctttactaacaaagatgtcttcctcacttttaaatttcaagtgtaagtaaggtaccatgccatgaaacagtggaaggaagtagataaactaaagatagaatcaataattatgattttccttataatgtgtcatggaaaaactcttctggatggagtaccatactacatgacaaagcgaacaacaatgatgtagctctatatactagtatttttttacagttaagctggattctgcaaatgttattgtaactggtgcatcttattgatgttctatctctcttcataacttattaggaagttcgggcagcttttgtgtcctttaagtctcggtatggtgctgctactgcttttcacatgcaacaatcaatcaatcccacacactgggtcacagaggaagctcctgagccccatgatgtttactggcctttcttttcatcatcattcatgcgaagatggatatctaagctggtgattattgttgcatgtattcttcttacaatcttatttcttataccagttgtacttgtgcaaggtcttactaacttgagtcagctggaaatgtggtttcccttcctcaaaagctttctgaccatgtaagtgtaatgggaagtgtatttggtttttgtctcatcttttttgcgggtaatatcattattagcaaatcaattttgctggttgaagattgatttgttctgtaaaacatcctgtgtttagcctgacagttttagttagtaattcatctgagtgaatagagcaaaattttttggataaaatgagtcgctaggtaaatctgatacagaaaactaaacaaaaatgatgaacctagagatttctatgaggttgtttagttttccttgctcaaatattcttactttagcagtattgatctggttgttattgtgacaattgtgtggttgagtctgaaattttcagttattcacttataattttgttgatgccaaaactaagttgatataacatttgttcctttatgcagaactatggttagtcaaattgtcacgggatatcttcctaatcttattcttctgttatttttaaaaatggtccccccaattatggagttcctttcatctattcaaggatatatctctcacagtgacatagaaaagagtgcatgcaataaagtactttggttcacaatatggaacatattttttgctactgtattttctggctcagccttatctcagcttaacatcttcctcgagcccaagaatattccttctaagttagctaaggctgtccctgcacaggtgagcatatttttgtaattgtgcctcaaccttccgaattgacactattgcatgtgataaagggcataggacacgtctgcatatgttctttttcccgagcataaaaagtttgctgatagcttttcttcttggaacaatatgaaatgctaatattctgtagaatcacgtaagaaagcaagaagataatactgtttctttcttcagtattggtgcataatataaaaatatgaatgtcacttgtgaagcttttgttcaactaaattttgcttattcacttttctattgttatagcaactgttaatttggctgcaggcatcatttttcatagcatacgttgtaacatctggatggacaagtgcttcatcagaattgtttcgtgtaattcctttattttgcagtctgctaacgagaccatttaccgactgtaaagatgatgaacttgaagttccttctattgcattccacaaggacattccaagaattcttttctttggactgcttggaattacatacttctttctagctccgcttattctgccctttctcttggtgtacttctttcttggatacataatttttcgtaatcaggtcagttggcttttatattcccattttcaaaatctttggtacattttgtgactctgaccttgagtaaaagagtacctactaacttgttataccttgctttctttagtcattgcaatgagtagctgcaattcgcacttaataatttaacaagctagaggaagttcaattttcaattattgctggctttttccaaatcacttagtttcaaatagggacttttaaaactcttgtatgtaaattccatttgtttgggacagcactaaatacttttatgatattctaatgtggtaacgatgtacctaatatggaagctctgaatgtcattttgcagtttattaatgtttatgcacctaagtatgaaactgcgggcaagttttggcctattgtgcacaattcaatgatattttctctgctactcatgcacgccattgcagtgggaatatttacattgaagaagcttcctaaagcatcaacattaattattcctcttccaatcctcactcttcttttcaacgagtactgccgcaaacgcttccttccaaactttattgcctactctgccgaggtaatctgtaaaatcatgacaattttactttatcttgtaggttttacactcatactgagccagctttttcttttcattttccagagtttgattaaaagagataggcaagacgatggcgatcctgcaatggctgagttttttgaaaaactggtcacgtcatatgaggaccctgctatgatgccaattcatttctcttctgatactgacagccttcacagtcccttaatccattcagttcgagtttaagattggttttttcttttttcccttttttagataaaatctctttagtgtatacaaccattgtttttttttttttttggcaaagtagtgtcatgtgtgttactggttaaaatacattgttattcaaacttttctatttgttaaaaaatgaaattgtttgagattcattaccattctgtccattcattgtagtgttatatattttgagaaaattgataaagaaaaagtgtttgaactctatttcaaaagtagttcatctctttctttaaattttctaactcttaggggtgtttgacactcctttttgttttcaaaattaggttttcagaaataagaacagaaaacaagttttgtagtttttaaaatataagacatgtttgattaattttttctaaaaaatgtttttggattattttactaaaaaaataacttcagtattccacaccatctcacgaatccaactgcaccctgaccacaacacggactttggaagtcggaccagtactggatccaagatccaaacccaaacccgaatcccaacccagccctagacttgaaccttaggcctagctcggtacttggacccagacccgaactcggccccaccctcgaacttgaatctagccccaaactcgaaccttggccttcgacccgacctcgtgttaggagtgtgtcttacaagcttgtaaagaaatttattatttttaaattgaataaataaatacaatagtttgttattatcatatttgaattgttaaattattgattgaataatttatgtaagtattgaaaaatttcatattcactattgagaatgtgatcttgtattagtacgagagaattatgataagttgaatgaataaaatagtcatcaactaactaaagttttagaagtttttaattggggttgtaagtgcagttatctgagtatcatgttggtacagataatatagatttagattattgatgtgattagacatttcgataaaagtactttatataatatgattatatatgataaagaccgatataagtcaaagtctttatacaaatgctatgtaataataaagaatagtattcatatcataacagatgatcgtttttagatcaacctaaaagtgttcacgaactcatattcatgtttattaaattttttaattatttgttaaggtctcttc

SEQ ID NO: 16090 - DNA, 4338 bp, Cannabis sativa
aaataattaattacatttggtaagttattaacctgactcatgatttagtctttttggtaattcatgactgcacagtggaaattagtgatgcttgtttggtttatgaatttgggatggtgatgatcatttgttactgaaatgattgtgaccaatcacacaagcatgtcaggataagaaactgcaataatatgttgtaacaaaagattggacttagttaccaatggggaaaaagcatcattattcattacataataatcatgtgctgaaaaaaccccaaggcactatccaatttcatacacattcatatcaaactatgaaatcataatacaataacgtcatcagagataaataaacaaaccaaacatcaaccacacaaagcaaagaaaaaattgaacattaataattaaaaccaggggaagataatatgatgaagctactttttattgagtgtactagttgccaagaaccaatcaacagtacctcaaacaacaggggagcttgaatgaattattggatgtagagaggatctttaagcatggttgcaacgtgagaaactccaggacaatcctcaatctccaacttttttgaagttgcaatgaggctaagtctctcacgcggtattatcaacttggggcatagcttgatggagaatgtcctaagcaaatcagagttggtgatccagtttggaattaccactaagctatcacagcgccatatatggagttgttgcaggcccctcacttgtcgaagtcctttgagctgatcatttatgtcagtaacatgatccaacgtcacagaatggagtctttcaaggtactgccacatatttggatcaccattggacatatccgtgatatgcaattctcttaatttggagagaggaaaatctgtgaaagaacacagtcaagatcctcagtttggaataataactttgtataaactttttgattacttagcacataaaaaagattgagagaaaagaagtacaaacttgatgatgatgatgatgctgatgctggtgatgttggttttgctgctatagttcgtttgaatggctcccaacttgtgtttttcagcactagcagttcttctagccatggaaacataggcatggaagtgagacaggggcaatcttcaaccaccaatttagaaagacaactaaatgtagctttttcttctccttctccttctccttttgaagcatcctttttccaccatccctttagttgtggcaaattagtaagtctcagctctttcaaggatgaaaaccatgttgttgttgatgatggtgtttcatccataatgtattccagattcatcaactcatctactaccaatacttgaagattagtcaactgatccagccgaggtaggcaatggcatctgttgcatctcgacagtgataatttcacaagatttttaagcaatggaagccaactcgaaaacttgcgaccaccataggtagatatagacagcctcttcaggtttggatgtggctcaagatcttctagtgccttttcataatcatcttgttgatgaactgatgaagcctcaatatcccagatcaaaatcaaagataaaagatcatttttctctttcaagtttgctgctgctgtcttatcatcgtttggattggtcaaattttttattttgagctcgcctctcaggtagtttagactacttagttcgtcgagcttgcccttcggctttgagggaaaatcagtaggctccttactcagcccgaattctgataatgttcgaagatttgatagttgatgtagtcctcgcggcatctgagtcaaacaataacatgacttgttttcaagatgtctaagattgaataacttgataatgcctttgggtagcttccggagattactgcaatggttgagtatcagagtctgcagaagttgtagcctgctaatagagtttggtaatgccttcatattcacattttgagacagatccaaataagacagaaacttcaactcaccaatagattttggtagtatcttgatccttgtgttatgcaaatccaacattccaatccacttgaatttcggaattacatcacaaattgactgacttgatctgctttctattgcctgtggatattgcctgtgcaaaatcagactccgaatccctgtcaaattggatgatgggattgaaatctgccatgatgaatcaaaatgaaaatccactgatacatgaagaggttctccttcaaattgggcttggtttaagcttaaagtagcataagctttcccagctatgtttttggcaagatcatgcattaaattgtgcattttgcattttgttatataacccaactcatcactcttaattttacgaaagaaagatctttcaagtaattccaccacatactcatagcctaacttctcaagatattgttccttgtcatctgaccctataataaacccctgcgacatccacaaacttacgagtgtgtctacgtcaaattcgtaatcttttgggaaaagagcacaataagcaaaacaatctttcaaagcaaatgacaagtgatcataactcacccgaaccgctgctaaaacacgatcttcaatttctataatatctgaaaactccttatcatagaatgactgccactcttcctttgtactttttaaacgcaacaagcttcctactacttttatgacaagagggtttccactgcagcgtttcacaatctcttctcgaagtttgatcattttggggtcagttacataatttctttctactactgtagtcacttggcagaatagtaaagaagaatttatgtactctagctcccccaaatcaaaaatttggtctttttcacctgtaatccatgcaacacttctattacgagtagttacaataactctgctcccatttccaccaacaaataatatgcttcttaactcatcccatttgtcagaatcctgattccacacatcatcaagaataaggagaaatcgcttgtgtattatttcttgaaaaataagatttcgcagtacctcaagttggtagacatctcggtaagagtttgctcctgagttttttatagatccaacaatcgtttgcataattgttatcacatcaaacacctcacccacatacacccagattctcagatcaaaatgatctacaaccatctcatcgttgtaaatgatttgagcaaatgttgttttccctattcctcccaaacccacaatcgaaattaccaatatattatttacatcatctttcttcaacaaaaagtctttcacctgtcgtttttcatgaaccctccccacaacaatttcatcaaatacataagagctacttcccatcctaactgcatctctggtatcttttccgacactcggaattggaagatcatgaagtgatggtaatgataatgaacctgaagtcagtagtttcaccttatcaatgacttggtccattttggaggccatgtagaaaaaagtacggaaactatggcgtcttctcaaactcactaccaacatttctctcagtaaatcatcaacaacacgaagtgccatgtctaactcatcactatcatcaatctgcttcatcaaatcagctttatcaaataaattttgaaccttctttaactcttcctttatccacgacaacttacggcgaaagctcctgagcttgaatattgtagctgtagctgcaacctcttcaaaatctgaagaccgcaacagtacttgaatcctacgaagaacgcccaccgagtttcgttgagccatcagatcagacagaggagccaaccaacaatatccaaaatactgaaaccaagtaaagaaataaaaaacaatggaggtgggctatcaacttatgagagagctgttgtatcaaattaattaattaaactctagtggccggaatgaaaattggagggtaaatgtttggtttattccaaatgatataaggaaaaatgcaattttcacattctaaaggattacgggttccaaatgagatataagaaaaaaatatgcacaaagattacgggatacaaataagttatgaaaatgcatggaggtgtagagagaagacactactcggagaacacttgaagattcatactcgaaattacctgattacttgcacatgccaaagtaggggtgagcaacggtcagtttggtcggttttttatacaaaaacaattcgaaattcaattttcggttttcatagttataatccgaaaaccgaccgaccattatacaaatgtaaaaaaaaacctaccgttttaatccatggtttggtcggtttaacatagcttcattttttttaaaaaaaaataagtttttaaatttttttataattatt

SEQ ID NO: 16091 - DNA, 13254 bp, Cannabis sativa
  modified_base (6177)..(6181): a, c, t, g, unknown or other
atactaataatataaaatattttgtatatatacgtttattttgttttctatttattaaacatactaatttaataaacaaaataataatattcgcatatgtttattatataactctatttacaaacattaattacattaatctatttatggtaattagtttaatcattaatgatttatattatttaataattaaagtgtatggttttatgtaataagttttcaaaatgtataaatttttgaaataattttttttgcacattttttgtaattattttatttttgttgtacatttatgaaaaaaacccttcattctactcagttaatgacttttgtgtttggcttagttgttaatgaccgtaaaactttattatcttctcaatctgatgttcaattacattttgttagacaatcagcaaatcgtgcggcacactatgttgctaggcatgcacgatcgctaactggtcgtagcattttgaggctttctattccccgtaatcttcagattattttgtattcataatgctaatttaacgaagctgcaatttcatgtcaaaaaaaaatatttagcataatcaattgcttttctctttgctagaatacatcaaattaatttgcccaaaattaaaacattaaagaagcctttttctttagacaaaaaaaaaaaaagaagagaaaagcattaaagaaggttggtcctaactcataacgccaactacccaaaataagcagccaccgacccattcggaacttcgaatcaattcgatgtcgcatacggccacaaccgtcgtcgagttcggatccttctaacacttcgcatttcgatcagagtagtttcattgggtcgtagttatgagtactggagatcttctcaatgtccacccttcggagctcagattcccttgtaagttttatttttgctttaaatactaatttaggcaaagaaaagaaatttggcaactttcggtatcgtttctgtcttgcattgagttttgaagggtttaggttacgttaatttcgatcaagatggtttgaaattgactatggaggtaaatcactaccaaagttttcttttttattttgtaagtctgatataaggtaaggttagtcattggtattttatcgttatattttcaatttgtttggtttatatatacgtattgcttatagtgattagattgaacaacatttggttagctgtatgagattttttttaagtattaacatgtatgtattgattgtctatttgggtttttctttttgggtggtaaagttgaattgaagaagcagagctcatgttctatgcagttgatcaacaagacagataagcatgtggctttcaaggttattatctgagactgagaatacatcactccattaataattcatttctgcttgttagcttgtctatgcatttttttttaatgtagaacaaaaggagtttgtattatgcataatatattttgaacatttgattggtatataggttaaaacaaccaatcctaagaaatactgtgttcgacccaatgctggaatcgttttgcctggtgattcatgcaatgtaactggtaaatagtatagctctcagtaccaagtggaactacttcttgtgttgtgcatataattgtgtatgtgtgtgtatttccttataatcctatagttaagttagtgaattgttttctctttttggtagtttctttctttgtttttttgtttttatctatatgattagttttattattgttttcttgatttggatggcctttgatttggtagtgacaatgcaagcccaaaaagaggctcctctagatatgcagtgtaaggacaaatttctccttcaaagtgtatatgcaccagaagctgcaacagcgaaggacataacttcggaactggtgagatggagtttctgcttttgttcagctcttctatgttgattctatcttttcaataattgtaccttagtttctgatttatttattgtagtttaacaaggagaatgggaaagttgtggaggagttcaagttgcgcgtggtttacattcctgcaaatcctccgtctcctgttcctgaagaatcagatgaagagtctcctcccagtgctcttgcaacacagaatgggaggcaaagatcatcatcgtttgatgccgtttgtaccttctatttatttcacttttgaatcttattatgatctttttcgattagcatgatttttttttggaagtttgggtagatctgcttgtataagtcttgactgaaattttgtggagtacaggtatcaaaatctcttgagttgcccaaacagaaatcatcagaggtaaatatatgataattctaccagacctttgtatgtatactgattgttggaataacaatagtatattgtttaaagttccaattgagcacctttgtcatatagtgttaatatagtgttttgccttgttaccaaccatgattccatgagaattccacactttccatgagaggtggaatttgtgtgcatgtttgaccaggttgaaagtttgctccttctggagctgatgtttctaggcacattgctcttttaatcacatgctggttacggttgtttttaataaggctctgccttttattgttacaatgatacagggtttatacatgtagtgaactctttaggacctttattcaaagtagaatactagggacttttatcataaacttttgataatgttgaatcttgttatttttacttctggattaatacttaaagcaaggtttacccttttttttttctctctctctctttctcgtatgtcactttatgtttgattttttttttttggttaaaattgtttatttgaacttgcgtctgtgcattcttgctatcgtagacccccaaaaataacttcctcctgctctgggttttttatgtatatatttattattattccttttccaggcatggttgatgatctctaggttgactgaggagaaagcttctgctttgcaagagaatcagcggctccatcaagaactggtatttgttatattaatgcattcggaatactattttctacatcctcgtgtcgatattttatatatgtacattcatcaatatttactgttttcccaatcgagcagccccattttgatatctgttgctcctcttcatgcactgcttctattgctaaatctgcatcagctcagctcagtataatgatttattctctgcacaatcttgccataatgttacatattttcattctcattgaacaggaactggctaggaaaggcttgaacaagggtgtagtgggtggattttctttgttatttgctggccttgttggtctattgggtgtgttaattggctacctcatcaagagatcatagagaggagatggatactattcatttacttcggtgttggcttcaacaactgcagcgttccatttttattttaattttagaaactcttcatttgaacaatctaatcatttcatttgtatattatttaacaatctcagcggtgcctccatgtatttgagaatatgatatcttattagtttagtatcagatttagcttataatttgacaactgttactcccttttttcaaacttgtaattgcactttgctatgttattctaccttcttgagctatattatttttgtctaattctcgtccttgaaacatggaatactcaaacttataattttacttatagatggagtaaatctctaacactgttaattagtagaggggagaaaaggatgaataaagagaggtgtagggagagatataaaggagaagttgtaacaatcagtagcatataggtatattagttataccatctgccagaattaattagtttattactgtgttaatattctgttagggtcggttttacaggttaagtcacttatataaagtcaatttttgatctttaacaacttaacctttttatatagatttagagatataagtttctttctctcctatttcctctaattgtttttgcaggaacttcattgttggactggaattgttcttggagctccatggcagaagaacaagggattgtttagtactatctaaagggagttcagattaaagtgctgaagggatatcagtgagtttacacaaggggatcttgtggtaaattcaagggatttgactcaagtgtttcaaggggtcttgaaaccaattttttaagtaagaactcaagagtgggcatatactctttcagctttattaatagatgtaaatttacttttgtaatttgtggataggtgtttgtaaattgacacactgtgattttacattttgttatgttttttaaagaattaattgatctaataagttaaacttgcatatgatataacaactaactgaagtgaaatcctttgagaggaatggagagaagaaatagagagatcctctcttcaaagatacaaatttcaatttctcaaccactacaacaaaaagatataactatgttagaaatgataatattaattaaatttttgtccattctttcaattcacttctaatatggaataacataaaaaagtactacttctctccattcatagtactctttatctttactatcctctcctccttgcaactcaacataggctataaccacacattttacaattactataagtttatacatataatatcagagtatttctattatagaattgcacaaaagagttaatttattggatgaccagttgaagagcaagaatcattagttggagcccttatcattttcgttcttactatcaccttcgtttttagcctctggtttgcgataaacttcttctacgtgtttggccatgaaaatgcccgacttggccatattccttatgttgggaacgttgtagttctgagccacgtaagccccacaaaaagtcccaaacacgaaggaaaaactgaaccttattaaacccatttgttgaatcaaatcgaagctcgacttgcttgcttgatccgaggaaaagatcgattatggtttttcttttttttttggagaaaagtacgtagtataagaaagcaggtggaaatttgactctcgcttgtttttttttggatgtgtggttttataagtctcatttagaaactttcttatgggccaagactctttcttggaggaggcttaagattagtgagttggtgtttggttgtaacttgtaaccccttcttcaagggtcaactcgtcacttcgcgtaactttattttaataagtataataagttgttctcgccaaaaaaaaaagtataataagttgttatctcttatatatggaaatatattctaagctattattctatcctacttggtcatcctgacctgacctccccttacacctctgagtgttattctttcccactatctacttaatggtcatgtcctgtttgtgtcgattatgatttttcaaaacgatgatgccatgccatacaaattttaaaataaataaatgtatattaagtttttagagatagacttgctttattgcctgtttttctttaatatatgtcattttgacatatttgaagcttccgctctttaaaataatgtcgtttgtttggataaatacttctcattattttgttctttaatatatgtcgttttaacattttcgaagcttccgctctttaaaacaatgtcgtttgtttggataaatacttctcattatttgttttaaaaaaatgtttattcttttgttttaaaattctgtcactctttgatagatatttgaaaagtatattacctcctctccaaggcttcaaagtcaaccacctaacttaccaagaaagtaaatttgggcgagttgggaagcaaactcatctactacataggtcttagaattgaagaaattgagccgagtcgaaaggaaacccaactttaggcctggtaaattatattatatattaataaagggaaacttataagaatttggtcaatttttacaaaaatactatcacacaaaaaaattttcaaaaatactgtgtttttataaaacaatagtagaatacaaaacagaacaattcaaaacaacaatagaacaactaaaaaataccagtagaacaccagtgaaatcttaacacagtatactgcagtatgaaatttataaaaaaacacagtaaaaaaataaaaaatactatctgacagtatttttgtaaaaaagtaacaaaannnnntataccatgtaaatttcccttaataaatttgtaattgaatcacaccaagtttaaaaaaaaaagagagagagagttatttattaatttaaaaaattctctctcccaaaaaaaagttttgcaaagctaaattagttttgaaatttttttacgttatatttttatatttttactgtattctataaaaatataaaaaataacaaaaaaactaaatgaaaaaataatagaaaaaaataacatcaaaataatacaaatagtaaaaaatgaataacaaaataaagagtataatataaaaagacgtatttatataaataaaacttaaaaactgtaaaaataacaaaaaattccatacacaccttatttttataatttttttgtatttttttttgtgttgtttttttttttttgaaattatcccttgaatatatgtgtgcatacttatataatggaaaatgctacatcatgaaaatttatctgaatgacatggtatgccataatttttttatatttttttatataaatttatgtttcacttattttgattattttttatcaaatatattgccaataccacattattgatggaaaaacatgacaatttgttatgtagcatatataagagtaatgatattgttcttgtactaaaaaaattacacttattatactatatacactacacatacagacattttgaaaaattatgtatcccgttttagataattatattttattgaaaaaactgacagaatatatattactttcctttagtcgtcttaatgaattcatttgtagtacaaactgatttagcatctaagaagatttgatgtaaaaaactacaaatagattatattcactaaaattcagctactgtataaatttggcaaaatgttttttaatgtcgtaaaaaataaattaaataaaaacaggttgtttattaaaaatattctcctttggctgcattcatttgagttattaaactagccaaatttggttactgtgagtaactaccttaatcaccaagtattttaccgttttgtttgataaataccgagtttaataatttctaacgtaccatatctaaagaaattgtttagaaaaataccaataaccttcattcatcatggatagaaagctaaaagctccttatatacacagttaatataaaacgacagccaagttacagggataaatattcgtcaaatctcaaacaatatcctatccattcatgtgcccaagtatccgtttccatcttaaaatcaatatcgatgtattatatgtgggacagtacccgtagtatagagctctcaaccacaagcgtaagcaaaaagttatgctaaaaacacacgacgagcaattattgaagaatagcttttgtaatgccatccatgcattgaggaacattcatcaacaaagtccatacatggaaacaaaaatctcaaggatcaattttaaccactataacctcatctaccttttctagcctcttcatatcaacacaaagttcaagtgagtaccaacttcacttttttcatcatttcaaccaaacccaagttttttatttgtataaataaaaatttcaactgagtactaaacaaattcaaattccgttgaagaaaaaaaaatggccactcgaggtttcattgttatgttcttttttattgtgtttaactttgtgctgttcagttgtgttgcctctaataaggtcccatgccctccaaaggggactccttcccctgcagacgtccctatgaccaaaggcaaatgccccaaagataccctcaaatttggggtttgtggtagctggctggggctggttactgaggtcattgggactaaacccagtgaggaatgttgtactgtgattaagggtctggcagatcttgaagctgcattgtgtctttgcactgcaattaaggccaacgttctgggacttgtcaaagtcaaggtgcctattgctatcagtctactagtcaactcatgcggaaagaaagttccagaaggatttgtttgtgcttagctttcaaactttgaatgtgcttgtttctttattctactaaaatgtactcccatcattattatcttttttttttctcgatgaaataaagcaagttattagtcttcatttaaatgcttttatgttcagttcatttgttagtgatgtctgcattgtatttctcctgcttataattaaattagacttttgaacacattattttcattataaaacattatgtagcacaacaaaaacaacattcttgaaataaagacattatgttacataacctgtaattttatttatttattttttccattgcaaacactagactgatgataaaagacaataatgtatggaagcaatacaagcatttcaatcaaatcaacaaaagggtgtaaccaaacatttagaggcaagccatagatgacgatcacgatgactcaggcgtccgtagttgatacattccaagttgttgatgtttaattaaaaagaagaaaacgtcacaaatgatcacggaacatgatcttgtgaaaccgattataccaccaaattaaggaaacacatatataatacaatataaaatggtagtgagtactgagtgccataaacttatgcacatttgaagcctttaggggacttcttgccacattggttcaagagcaagctcaatgagacagggacattaaggttgattcccaaaacttgggccttaatagcagtgcaaaggcaaacggcagcatcaagatcagcaagaccttggagaagggagcagcatggggtggctgatggggttcccacaacaatgtttactaatccatttagcaagtcagcacatacccccaacttaagggtgtcctttgggcaactactcttagagccagggcttggtggagtaggcatcggtggggatggctttagtggagaaggctttggttttggtggtgggcagtaagttgaactgaccagtgtgaagaaaagaagattgagggacaaaagaaaagcagtagttgccacagtagaagccattgttttactctttaggcactaattggatttggtggatttcttggtacgtcgaaactgggtttgggatggtggcttttatagataaaagtttttttttttttttgatatctgaattcataatttgcaaaagtagacatgtgaactcttgggttagactttgatcaatcttttacgctagttaccattgcaactaggagaataggccatcctcaacgtattgaagggttttgtgttatacaattgctttcaaagaggagaaaccaacatgcgcaaaaggacagacccttttgctatatttggattcaaaacatttatttctacttttatatcattttcatgatgtaagatatttatttttcattccatatctatcatgccaatgacctcatgtcactgtactctacgtcccatatacaattgttggccacttatttttccctgatgccctggtcattcttccttttatccctggtaaaatccaaattggctttatactgcaacttttgagttaattgattgaaacattctaatttcatcagtatgaaaagtgatgctcaataacacgttaacctatttttatttcgctcccaacttgtttctgtacaatactgttccacgagtgtggctataatgcacaagtatcttcaagttcaaaataacttcacaaaggcctataatacgcaacttaagaaatttagaaaaaacaaagcaataaataagaggggtctgctcttcagagccaactgccatgtaatgtctatatcactattattaactagatcacagccataaatgaattactgtgcagaataaaacaagttctacatatatgtatattagacacagtaccgagttataatggattttgatggttacatgtctccaaatatagatttcaatggatactcgcagatcttttttattatcattattattttgaaaggatactcacagatcaatggtactcgtaaaaataaaattgactgttttatctttcatgtctacaaaggatataagtttggcaatttcatttctcagtggaccatgcatgcacgtaaagtcatcgtttgatgacactttgatcacattcacatgggtatgatttcattatggaaaaattccaaataaatttttaaccatcactttcgcttccccttgactactagcctaatatgccataaacatatatgccggacaaaaccttccaatttttttccaagctaaaatgataacattcaaataaaacatgcctcatcagtggggcttcaagagaatcatcacacggttatgcccaatacgcgtctcacttatacgaccaagatggcgaagaacctgtttaagcatattcaaattgtaaaaaaaaaaaatatccttatcgtgtcatgcatatgtaatgcatagccaagagtttccactttccagcaaaaacgaatagaaataaaacattttctatctttatctcaattgtgtgaatagtttacaaacgcttacagttataatagcttttccagtgttgtcaagcttcagtgctggtccttttatgtcactttcaagaaagaagtgttttccctttactacttctgtagttgcaatatctcttagttcctgcaagggaaattaccattataagtgaaaattatttcacttataagttttaagtttgaagaatgtttaaattcacttaccaaggctttttcccaaagattctccgccaactgcatggcaatagtaaataatgtcaggttctcggccatactaaatgatataagggagttctggaccataaatagagaaaatgggcagaaccttcttttttggagcagctataatctgagcattggcctcagcatatgatgccatgtcactgattgctgcattgaccttatcaagagtaagccttcctttcatatatctgcaattggcaggacttggagctataatataaatgaaataatatgcaaatcctagatatccatctcactgcatggcttcaaccaaactgaggaatattatgtcacgattagcttagaattagaactatataattccttgtaagcaaactttgtagatggttagtattgaagcatagttccttcccagtttcattactccaagtcaaatagataactatttaaatgcataataaaattgtataactggtactaactcttgctattaattgtaaagcttagaaatgaaaagtactcacgaggataaggaatcgagctcatcgtctgttataaaccacaatggtggaggggaacgaccctttttctcctgcaataatcgaaaaaagcaaaattgattctaatatataccaatctgtgttttgtcaaagtttctcgaggtactgttttccaatttccaggttaaagataaagttctgtttttccaaaaaggaaattatgccaacaatacgtcattatgtcgaaacatgaattagaaaatgggcacattgaagagcacttcaccaatctatctaattgccttgtagtttcatcacctatttgtatatgtgtagaatagcacaagttcaatacatgaataaggcagcagatgttttgtgttattactattagttattcttccagatagatgatgaactagtgatttgtttgactaattgtaatgaatttgaacatctaatccattcaagaaacaagccaaattattagaagtgctgacaaatgggaaagctacacaagtttgtcaccttggctggagctggaggctcttcttcaagcttcaaggaaccaaaataagcatccagtttagagtattctgactgcaacctgaaagacatagggatacaagctcaaccaaccaaacacaaagaaattcatagccaatttttatttttattgaaaaataagaactaaataccgtatattactgtccagattcatatttgacgttctttcaggaatatgtgaatgtgagggaacaaaaccagacatactctgcaacttcttctgctgcttcagcgaggcatcaatcaatttctgccatcacattgtacaatccaattgtcatttgttgaaatctactctcgagtctcgaataagcagctaatttctagaaatcgtttcagcgtatagagtgcccacacgataaaagttgatcatttcccattcttatagaagattagagaagtttccatatgagttgcttgttctagatttacccatactttctcaacttctaatcatccatcagcttaaatagtagagctacattaattcaattaatatctcagtttatttacaaatgtcgctaaaatgtagaaagagcataaccaagaccccaactaaattaatcactttgagtttcacttcagctctatcttttcgggttctaagaatggcctcaaaactgattgaactaattacccaatattcccaacaaaccagaaacccaaattacagcctgacatgaattaaactataataaataacgtaaaattgaaacacagagagagaaagagagaaattactttagctttgggtatagctagggtttcgtcgcgcacccgggctttaatgttctgcaactgaaactccatggccttcaaagcagcgtcgactgctgtcaaatcggtgacggtgctggccgggtacactgcaaaacagccatttcaagttcaaattatgcgaaagtaaagaatgaaaaaattgccagagagagagaaagtgatggcattttactgtttcgtgcaatgacaagctcttgaagctctgcaattcgagcattaaaggctgagatcaatgagtccaatgaggcccctgctttcttggaatccatcttcttcaagccgctgcttattttgatatgtattttgattttctaatgttttgatttccatcttttttttccattttttagatttggcgggaagatcgggcgaatcctactactttgttgtatttttttttagggtaatttgccgcaaaactttctaaagttgacagatttttgcaactaacctcctaatctaaaattttggtggtaaaactatctaaaccactagtccgccctttccatctatttttagctg

SEQ ID NO: 16092 - DNA, 3748 bp, Cannabis sativa
aagtaagatgtatgtaagaatttgaggtaaaatagactcagcttgtagcaacttattttagacaatagaaaaactgattagagtctatttgaaagttaattttgttggttctcttctgtattttagagattaatcacatttacagtagttgatgtgagtaccataagaattctaaggaatttcccattatgtgtccaccttaatatactcacaaaataaattataagtgtccaactagtacgttgctataattttttttttaataaaaaaaagtagaattcatgaaaaaactcgttgttatagaagaacttaaaaatcgagaataagcatctgtctaaatacaatctcttaaactagaaacagagattgctagggtataaacaacaccattggctaatcacaaaataagagtgcaaaaaccaccaccaacaactaataattcatatcacatcattaaataagtacttgaggtggacaatgcttccaaaaacacttggttcgaacaaaaactttcccctgttttatgaataatccatgaataagataagttagcttttatacactaatatctcctgtcatcctgaagtgctgaactttaccatgaatgttgttctacctccattaaattgggaacatgatccaaaatttcttcaatgcttgtggtccataattgataaatgcatagcaaatgaaaaattaaatatataaaggcataacaaatgaaagaaaactaaaaagccatcttattattctattcatcattaatacaattacaaaatttttgtatctacaatctaaagaaccaatgaaaaaatttcaattaattataataatactaatgcacaaagaatacactaatttttcttgcagtaatgcaaaaatacacgcaagcacgcagaaaagcaaattgttgcctccatgactatggtgataattcatgaaacaactgagaacatcattaacaacatccaaatctctgccttaatcattcccatttggtcctaatatgatgagagtgcctaaactcatggctaagtgctgtgcttccatccattcttttcaaaacaaacctctcaatcaacacataacacccaaatctcttccaacccaatgatcctccacattcctctgtcctctgcactctcacttctttttctttccgcttaacccatccaaccctttcttgctcccatttaattctctcaacaacagctaaactcaacccaatactagtctcttcttcatcactattcatacttctaaaccacaaaaccccatcagccacaaacttgtcatcaactacagcttcctcacctccaaccgcaaccgtttcgttctgaacaacagcatccacaaccacacaactccctcctccattgttattatgttccttttcatatatcagttcccaattttgttcaagtgtcatctcgtaaaacatgtagttcctcatctcgtctttcatggttttgggagttccttctttgatgaacacaaaagggcaataccattttcctacaaccacaggcttggatttcttagtggctaatgggaagttaaattcaggatggtgggctctgagggctgcgtctacaccatctgcttggcctagctcgaaccaaggtgactctgagaatgtgagtttccaaccaccatttctacccaagaatcctggagcaaaaccatctggggctactgagtccactttgaacttttcactaccccaaggagtgagatatcttccgtggagagaaagctccaattgttgatactcattatggggatccaacggctgtggttgagtctcaggagcatattcgtaaaagcagaaggtttccagctcatcttctttacagcatgtaaaagcttccctgaagataattccaaaagggtattcgttcgtcagtcttggttaaaatcaacacagtttaatttcatcagaaggatattaaaaattgggtaaatatcactacccattaagctacaccaagaataatttaaaagggtattcatcaatcttaacgaaagaaaacaaatttataaaaatatcacaatttagtatagattagaagacacaattttggatcactaatttaacacgactaatttagcttcttcactgagtgaattccaacagggtattcgtcatattttcgaatcaaaagctaaaaaagcaacgtaattccttgaaacaaatatctgaatttggataattaagactgcccattaagagcccctcattaaatttcaaaagggtatccgtaaaagttggtcaagaaccaaaaaatcaatcataatttcatttaaaaaaaaatgaaattggatcacacatgaaccattaaggttacttaccctctatcttttccaaatggatgtacagcataatatttgttagaggacaatggctgaccaagaaccggaatgaaccagacactgtgaaaatggagatctctatcacgagcgaagccttggacgtaataaacttcaagttttttattctgaggaagaggaagtctcctaatcctatcgctcttctttagaccaaaacaacatttgggctgagcttcctcatcttgaatgacgatgatcccagagctgggaccctcaggaggaggctccgacagagcagagggagattttttgtacaaagagagaggcctcgtcacatacattatcgatcaagttttgtttttttttttccttttccccttaatgaaactgctatcgtttacgtacgtttttgcaaaattgtaagagagaaagagagagaggttttaggtagaataacttggtgaaagaagaagaagaagaagatgaaggggttggtttgtgatagagtggatcgcagtggggcttatatacagtactactaagcctttttagtctccgcgttaagctgcccgatttgaacatggttgaattttgactgtgtacgccaacagcctaatacaggaccacaatcactaaaacccattataaaattatgcaaatgggattattattttgagattaattacttcactttatactaaatatattaattatgaatcgtttgtggaccattaattcgttttgtaaccatgaaaattatagtaattaactttcgtatttaatatttatgttcttaacaccaactaaagtctacaaaggaggtttttcttaataattatttatcagtgctgagctgtttctgtttttattttattttatttttttcactttctcttttttggtggaattttataccaaatacacatgcacataatataaattatcttaatgcaaaaataaaccaacataagacgtaggagtaggagtagtctttcatagtgctcgccactccaagcaatagatgggcagattgtgaggtgtctgacattagggaatagaacaaagtaacaaacagtggtatgaggtttgattgagagtttgagtgacatcaacttactcttcttcttcctctcactttccaaattcttttttcttatatatattattggagactttgttatgagcctattacagagtagcattgctattttgggtattagggttgtataggtaacgcattatcatttattaaagatatttttaaaatttattaaattaaattatataagatttgatatttaattgtaccaataaatgacacttaaaagtgtactagctactactaatgcttatagagcattcacacttctcaaagatattaaaaatttggctaattagtaatttttcccccgaactt

SEQ ID NO: 16093 - DNA, 6992 bp, Cannabis sativa
  modified_base (36)..(36): a, c, t, g, unknown or other
  modified_base (1447)..(1457): a, c, t, g, unknown or other
ataatctggattacattgaaacagagttttatttanggcataaaacccaacagatatgtcccagtccgcctgccaaagagtgtaaacagagatcataaaatcctcccttattggtcaaccctctccttttccatcctaacattgtcattgttggcggcctctagattttgtttcaatttatcctctgtcttcaaacattggtctcgatctgtagtgaccatccaaagatcatcctctaggatctaaatctgctcctgcctcttcttgagttacgtcttggatgttgccgcttcatcctctacatcttttagcttctcctttggagtttttcagtttctcctttgtaactttacacttgtgctcaagggaattgactttataatgggcttggttgtaactaattttgaattcactcgcctccttggccagcttcgcattcacctctaaaagctcttttttggcagattcgactatagtttggactacacattcaactcgagccataacctttttgtctgaagtctcttggaatttctgcttcatggcataatttttgtgaatggatttaccgttgatctccttgactctttcaagctctgccttggtctcttcaaactccttcaaatttttgctctctctaggttaactaaggaagaaatcttcatgatttccacaacatcaatttcaacttgaatgctttctagctccagggccattttggtagttgcctcagtgcaacacttaacaagaagagcctcatgagaaaatagaaaaaaaaaataagacttagtgaaaacttacatgcaattaataatgaaaaatagaggatacatgtctgaagcacttaccttgatagcctagtggtggtgggtttgagacaagaacacaacgtcttcatttgcgcacaacccaccttttcagcctcagttggcttctagaagtggatacatcgtcaaagaggtccaggacaaataaagcaatgttgatacctaactttgttcaaaatccatccatggcggcagacctatccactactttacggctagaaggagcattcaggtctctgcctgcaagctcattactttgcctcacggtgattaggccagtagctgcatgaacctcttccgtaccgatatcgtactttcgaaagatcaactggctctttttttcgttcaaagtttggtcaccttcatctagttgaacctatttaattaagaaagaagggcgtcaagggaatctctagaataggggtctgtcccttagacttttgactgagtcccttctttggtgccttaatatttaacataattaataattgcctataaaatcattatcatgaatagagtatagaatactttcaaatgtgtagcataacagaatatgactccttccgtttaatgatctaaccctcactcctttctgtcgcagagagagagagagagagagnnnnnnnnnnngagagagagagagagagaaatttatgacataaaactaaatgtgttaaagtctctccttaagctctctacttatagtcaaatgtcttataagaaaaaaaaaattagaatgcttttctcttaaaaaaactattaaataaataaaaaaaaaacaaaaaagtctatgcttagtcaccaagcaagcatggtcaaaccctatagtaaaagggctagggttctgtactcttcattatctcaaagctcaatagacttaaataatactctcatttttatttataccatacctaatttatttcttgcatttaaatactagtttatattaaataattgtatcaagataattattttttataaaatattatttaaatacttattattaatttctaacaccaaaatgtctaattaataataaaatctttattatctcttttttttacctacatgctggaatattgtgaaaattgaaaaataataatgtgaatattaatttagtaaataattaattattgtagtcactgttaaacattatcctagatattaagggaaccatggatccataaaatctaggctttcaataagatagattcaaagttgaacaaataaatttcttaacataataattattcatgactccactacacagaatattttatatattaaatataagtacgttataatattatctattgtttctatcatatcgatcaatgattctccatgtacagtctatacttaatatgaactaaatttaacattttactttttaattatattttacccttaaatctcttagttgacttaatgatattttagaaaactaatataatcaccgaaatgagtactctatattatatagttcaacttagctcaaaggaaactaccatttctcctcgaacatagaagttatagatttccatctctagttgtcgtgaggcataagctataactttgtctgcttgcatcaatacacaacccaaaacctgtttggatacatcacaatacactacaaacttctcttgatctgtcgacagagctaagatttgagctgtaatcaatcgttgtttcaactcttggaagcttttttcacactgatatgaccacacaaatcgctgattcttctagtcaactaaaacaaggggttacaatctcagaaattccttccacaaaacgtcgataatagcctattaagttgagaaacctttgtacttcagttactgtttttggcctaggccagttttttactgcttcagcctttcctgggtccactataatttcgtctttttcgacaatatgtctcagaaaagacacttgtgacagccaaaactcacactttttaagttttgcatagagtttatgatctctgagtcgttggagtaccaagtgaagatgttgttcatcttctgctttcgaccgagagtacacaaggatatcatcgataaacacaattacaaagttgtcgaggaaattcttgaatactatattcatgcatgagatccatataagttggtgacacattcattaatataaacgacataacaaggaattcataatgaccgtatcttgttcgaaaagttgtctttggaatgtcttcttcccggattctcaattgatgataaccagaccgcagatcgatcttgaaaaaatctgtctataatcaatgcacatccgaagagttctatccttctttttcacaaaagaactggagctcccagggcgacacactaggtcaagtgaaccctagatccagcatcctctggagttgtatcttcagctctttcagtttcgcgtgagccatacgatagggtgcctttgagacaggttcagcccggggtactaggtcaataacaaaatctatttcccgttgtggtggtaatcctggtaattcctcaggaaatacatctaggaattctttgaccactttgacctcgccaggtccaagtatcacgggtttaccataatcaatcacaactggttaaaatcctacacatccactgcatagtaaatccctagcctttagcgctgaaattcttagtacacgaggaccttgaactgatccgacataaataaaggttcctgattctccagttgaaaagttaccatttttcgttcacattcaatattggcaaaatatttaaatagaatatccattctaagtataatatcaaactcgaccaaaggtaactcaactaagtcagtacttaattctctaccctcaattctgattggcacagatctaatccatttcttggaaataatcaactctccattaggtaacaaaattccaaaccccatctcaaaaacatcactaggcctaccaacctgactaagtactctcatcgctatatatgagcgtgtagctccagagtcaaataaaacagtataagtaaatccattgataaagagctgacctgtgaccactgaagggttggtggctgcatccacctgagtaataacaaatatccgcgttggagcaggctcagcttctagcttaggttcttctttctttaacaggggacaatctttcttgagatgtctaactgattcacactgaaaacaagctctccggttacacgtccccgagtgatatttcttgcgttggtttaggttcaaatggcatagacctcttagactttaatttttagtttttgaaatttctgtttcacttcttggagtctgtacttttagaagcatgaagttttcttattttttaacatgattcaacttgtcatttatccaagtgtggtaggaagttcttacctgcgagccccctaagagatccaatttcaacagcctgaacctgctgaattttcacttctaccccaaaacctaaaggtaaacatttacacttaggaaaaattttaaatctttggacgtacatacctatatatactatctcctaagtgatcaaagagcctgggcctttggtcacttgcgaaaacataaattcaaaaagattttttatttttcttaacatttatttcttaatgtattaagcataagaattccattcatacatcgccttgagttgtgccctaaggctttaatttttagaaagaaattacaatgaaggagacaaaatagtagccccacacccctgatctattaatagtaccggcgtaggtggtccacatttaggctcgtgaaattttagatccttgaagtcttttcaattgatatgttttattgtgcaccttgtgttgcatttcatatggtcctttccaactcggtcccaagacccccactcctgactcctgagatgccgaaaagactctccttaagacgagatctccaactgtaaacttttggcttttaagttttggattgaagtgcttggcaattttttcttgatacatttgcaattgtacttatgatttgtctcaaagctctcagataatatctagtgacttttagaggaaagtatgatttcgggttaggtcataagtttcttatctataagaaggcactgttgtttcaactgggaagacgactttgcatcagtagaccatagaaaacatagtgtggatggttaaagttctctttgttgtaggtatgcctaacgaactcaggggagctcttatggccaatgagtcatgcaagcttgtaatttttccttcaacatgatatttaaaattttgtttacaacctctactcgtcatgagagtgattaatattggtgaagctcgtgggaccttggcagaacgctagtactattcactcttgtgaacatattcaatacaatctttcttcattatggaccaaaagtgtcgctgctagatgatcttatttgacaagtcgggctttgaagtttgatctccacagaaatcttcactggcttcgtgaaaaataactatgcttattttagtcctaggtatacactttaataaagaaagcttaactatattttggtcattgtcatatataaagtctattatatacaacaccttcaccaagatgtctatctacatcagcgatccaaattaagattacttgcaccaaataatgggcattagtgaactgtataagcaatcgttgattaaagattctataatcttaatatgttgctgaccattttattcatacgactaatcttaattctttgtataatataagtcacaacctcatatatgaataacgaagttttttatatttatacataaattattaaacataaaatattaatgattcaacattcaaatatatatcaaattgttcaacttatttttataatcaaaacgtctttacaagcttttcaaggcataaaacctaaccttcgggaaagaggagggggaatgttgggaatggggatgatcgggggctcgacttgggtgttttctcgaagagaaaagagaaaaagaagagaagagaatgggtggagttaggattttttccacttatataaagttattagtagcggggcctgctgctaataatatctaaatgtaatttgacaattattagaggtgaataatagcagcagacccttgctaataacttttaatttttattttgattagcagcatgagcatatattagtggtggatttggcccgctgctactacttcatctactactaataattttgttgtagtgtaaacgacgttacctcaatttttttttttttttttgaattttatatagaatatttgaaatagttttcttttaaaagttttgttcgtattgtttaattttgtcctcataaaatttaaactttttaattttttttcccaacaaaatgtatgtatctatattataatgatacatctttttaaaatgaatattgctttgaccccctttttaaaaattaaaattattttattgtgcaaatacaaaataagttatgctcttaataaaaatgaataaatattttatagaagtactattagaaaagaaaaaaaaactacaataattgtcatcctgtactacctaccatctcaacgtgttcaaagaaataaattaaattaaatagggttgtaaagctatacacattttggttttattcaatgtaaaatatattaacttatatatatatatataaataatactgtaaaagcttcactattttatttggactttataatgattacattacgaaattgatcaataataatggaattgatgaaaggagaagcattatcgtatgctattattttaggtggcttatggctacgcgccaaattagttaagatatcgtatatatagtacattaattaattctgtccttttcagattaaaccctcatgcatatactttatctttccttatcttggttttaacttcttttaataaataaataaataaataaaaatctttttgtaaagggtttgatttgtacaagtctcagaccattttacagaggacctaacgtaaggagaagagaaaaagaaaaaaagtgaaagttgtgtgattctttataatttacagatggccatgttatataataaaaagtatttggattaacaatattaattaaaaggataaaaacaatactttatagtctttgggccactaaattcatatgtatatattccgagaggaacc

SEQ ID NO: 16094 - DNA, 4587 bp, Cannabis sativa
gaaccatattctacatttataaattttaagcttcatttattaaactagtcaggaaggtatcagactaccattagaccatattctatatttataggtggtgtcgggctaccgtcagatcaccatcagatcttcgacttcaacttttactcattttaataataggaaggctttgagccatcattagactaccatcgagcctgataaaataactaattttctgtccaaaactcaaattcgactgtttttgaccctaaatctaacattaactcacagataacaaacattaattatacaatttattcctaaatcaacaaacctataaataaaatcatacatttcaaccctaaatcacatagaatacaataaaatgaaatgaaaaacttacattcatggcgcggtggtgtggttcggagatcctggatcttgggtgggtagtcgtcaatggattggtgtcttcggttgaaggcacggtggttcgaagctgtgggtttgctagcatcttcgtatgcgtgagaagaagagagcgagagagacagagagaatagaggacgagagagagagagaaaggatgtgtgagttatgataggggtatttttggacttaatgaaaaaaatagtctatctaactaattttgatatatttaagtttagtgtaccaattttgctcaaatgcatgaatattaattcaaattttcctagtgtgttagtttcaattgtaactgttttttctttcctttatattttgctagtgttagctaatagtgtagctaactatattaagctctctaggtttattgttagttagaactgcaggttgtaattagagagagagagggagattcgtgttgtgtgagagagatgattctctgaagactgttcaaagaagaagatcgagaagccgatgaaggattgctcttagtttgtaaacactaaatttggtttcttattgcatgaattgatcaatgatcaagggagttcacataaggggattaggctctcccaacacattgttaaattaaggaagtttgaacctcttgaaatcggttgtgttcattttaatgcttttgtgttcttgtactatttgattaataattgttcaagttgaatctgtgtagtgttatatttgtgtgtgtgcagattggagttggtttgatccgaaacaaacaattttcaatatgaatagaggaagatgcaacatgaaagtgaagtgagtgatcgagtttaaatgattacacacacgacctaattatcatgtcatcttctttcttaatccacaaaatgacaaaggtgagcttatttgaaagcatattaatctactttatttaagatattgtttggctttaattggaaggaaaggaatgctaattaattacttaattaaataatgtattttatataataataagtgtggtctgtagtgaagcatctctactttaataaattgaaacgcacatttttcttttggatgaattagacagttttcatttcgatccaagtcgttgtcggctataaattcatccttgtattattataatttatatataatgaaagataaaacgtgagcatcgctatgttaatgttatgtggtaggaagttgctaatcctaatacagtagtggtcgtattgtatttgtatcattgtatctatgtatgtatatgcatgcatataattaattcagaaaaaaaacaaaaaaaaaaaagaaaagaagattgggaaacaaaaaagtcaatatcatatcattaggtgtaactaacatttataaataatttaatgtaattagagactagagatttcagatttgaaagtaattacaaagatttatgacaaagatgttgcgcctgctaaattaattttgatttatttgtattttaagaagcaggcatgattcaacgcattgggttttgtatacgtattctcttcagtacttaggcttaattagcagcacataatattaaaatttaaaatcctacgtactgtggttggtgaatgagcacaagttatttgatactattatgtttatttatgtccctttgtccaattcaaccctatttattatttattatcaatagaacaatttattaggtcttgtttaaaaaaacaaataaaaaggtaattaatattggtgaatcttaataaaacagaatatgtattgaagtgttatgtgttaaaaatgaaaaacacatgaaatgatgagtttgtgagaagaaagcaaagagagaataattgtttgttacttaaataaaaagagtaaagagtagagatggaaatgaggtgcacgtgttgaattgagtagagggaaagggcatagcatagcaggggtaaggtaaggggcatcttaaaattgactgcattattattattgattgctggctgatgatgatatatgacatttgtatataaataaggaaaaagaatcaacaatgattttaaaatgaattaaatgttgcaactttactaatactaataataataataatatattttaagaattccattgaaggcttcaaatccgtgttgagagaccaataagttcataccatataggagtggttgtggctctggttttgggtgtggttgtggttgagggagacacttggaagcttcatcggagaggatttgtgtcagattctgccttcaaatctaacagactaagagacgagatcacacatttcaattgcacgcaccttcttctttcttcctcttcctaatcctaatccaaaaactactctcttctttattatatccatatatatatatgagaaagagagagagagagagatcttagttggactcagtactacggatcgattaaaagtagtattgtctggatctggatctggaattggaattggatctaaagtatatttgtctgatcatattaacttaactcctatggggtttgaattcctcaagttcgattgtctcggattgacccgaaccaataaacgcaaacaaatacataataataataattatagtatcgacactgctactgctactgagaaagatgatgatatcgtcataatggaagaccaggcttgtacaattgtcaaattcagctgggatgaaattaagaggttcaccatgaatttttccacctctagagttattggatctggtggttttagtactgtttactttgctgatctcacctcatcatcatcatcatctacaacaagtactagtaaatctcatcatcatcatcatcaatttgcctctgtaaagatgagtaacggcagccgtagcgttttcaaacaggaattagacatcttattccgccttcaccatcgcaacatcgttaacctaatcggatattgtgacgatccaggtactattaattgttaattatcaattatcaattattaattctatgctatgcttgttattaattactttgaatgaatcaatgaaacagaggacgagataggcggtggtggcgcccttgtattggaatacgtctccaacggcagcttacaagagaagctccatggaaatgagaatgaaaagacgttaataccctggagaaagcgaatggccatagcagctcagcttgcggaggcattagaataccttcacgacaagtgcgataccagtttaccagtcgttcatggcgacatcaaagcttccaatgtccttctggaccataatctgaatgtgaagctgtgtgattttgggtctgcgaagatggggttttcatctactgtagtactcaacagcagcacgagaagtaatcggccacgagtgttgatgggttcccctggctacacagaccctcattatctgagaacagggataccttcgaagaagaacgacgtgtatagtttgggagtcatagttctggagctcatcactggaatggagccattctcctcggagagaccgacacagctgttgacgtctttgctgggacctatgctgaataatggtgatgttgaagaggttagtggagtagtggacccctgccttggcggagagtttgacccagaagaggccaaagccatgctttcattggcggctcagtgcctgcgtcacccgcccactctcaggccttcggccgctcagatattggaaacaataaacaatcatattcccatttacatgaggatcacaaacaccaaatcttgaacataaaatataagttattgaattattattcaccatttctgctctgctcttgagttgaattgaacccttcaaagttatttttaccattttcttctttttatacttgtataattgtattgtatacacagttacacacatccacatgttcaatttaagtggcacttgtaaataattttagagcttaggatgcttggtgtgtcaaagacttatttttatgtattgttgggagtgacaaaacaatagtaggtaaggtacgttttgttttgttttgttttgttgcgtctttgtgtggctcgtgtgtgcatatattttgatgctagtctcatcaaattatgatcttaaacaagccaaaaatgtggagctagctaagctagcctagccatgtgagatgtgagaggtgagtgtgagtccttaattaggccagggtgacgtttgtcgtcattaatcatatgacccaataatt

SEQ ID NO: 16095 - DNA, 5114 bp, Cannabis sativa
ctaccattttccttcccatacaatgtaacacataaatatcattaaaaaaaaagttaaaactaacaattacccaataatactacatgtgtgaagaaagtagttgacagagttaaattgtgcaactaccagttaagacagcctacactaaagacatttttatttttatttatatttatatttatatttatatatataagagaaaaagacacatatgcaaatgcagagtgagtgtgggaaatggaaaatgaaatttttttacttaattaaattattaatttattaataataaatgaataagaaaggtcggtccttttgtattaaatgctcctaacagcgcccaccaaatttcatttattgaccaaaataaaaataaaaaaaataaacttataacacaaaaccacaagaaaaaaaaaaatatcatctttgatgaatgaatgaatgaatatgatatgattcacttcttcttcttcttcttcatcatcataacagtttcttcttcctctgtaatggtttaccattaatcatacatattgtcacaccaaaagggcaagtcttgtttttggtgttaagaggctctttttgcatgccccattaaaatctccttctctcttctttggtcaaatttcacacgaaacccatttctctttttctttctccttcacgtattttctttctccttcttataaagattaaaaatcccaacagattttcatttctgggtttggtttgaaaatgggttataataacgagagtactagtagtgatcatcagaagagtagaaactcagaagctaaccatgttatgatggagattgaagcaggaaagccaagtggaaatgggcttgtaatgacgagttgtggattgagtccactgagtgagagtctatggagagaaacgagtagtaatagtaatagtaataataataataatagggagttgtttttgggtgatgtttctgctagactcacatggaaagatctgactgtgaccgtaactttaagtaacggtgagacacagaaagttctagaaaatcttactgggtatgctgagcctggaagttttacagctttaatgggtccttctggttcaggcaaatctactcttcttgattctctttctagtcgtttagccactaatgctttcctttctggtactgttcttctcaacggtcgtaaaaaaaagctctcttatggaactgctgtgagtaattatatcatccattctttttgtttttgttaacataaataataattctgcttcatcttgtttgttatgttattagttagtttgatggttttggtgattattgtgtttagtgtaattaattttatataaatactaattagtctaatcgttatttaaataaatagtgtcttttagttgtttatttgtgtttcggtttaagaagatgtgaaagctctctttatataaaaacgatgcgtttcaaagtgtaaagtcgtatcgaagagatttcataattgaagttttgaaatcgaaattgcctgttaaaaaatagtgtatgatattgtgttaaactaatttaatttgagacatgttagttatttttgtttactaattttttaataaataaaaaattaatgttggtagaatttcttatttatttatttcaattaaagtgatgtttatgctaattttgtgtcttatttgttagaaaattgctcttctttaatggtataaaaatgaaaaaaaataataaaaaataaccatgtaaggacactttaaagaaagtgaggataagaatatagatatagtattttaatattcacttactaatcagtgaagaaaacacaatatattatccttaataataatataatttttctttactaagtattatatggggtctttgccaacaaaggaattctttgtttttgttttgttgttatataatatgttatctttttcttatatacaaaaatttcaggcatatgtgactcaagatgacaacttgattggaacactaacagttagagaaacaatctcttactcagctcaattacgtttaccagataagatgggatggtcagaaaagagagctttaatagagagtaccatagttgagatgggtcttcaagattgtgctgacactgtaattggaaattggcatcttcgtgggattagtggtggtgagaagagaagggtcagcattgctcttgaaatcttgaccagaccaagattgcttttccttgatgaacccactagtggacttgataggtaccccattttacccaatttgtcattttgtttaaattcattaatgattagttaagttgtacatgattgatatttggtttttttttattcttttttggcattatggggtgacagtgcttcagctttctttgttacacaaactttacgtgctttatcaagagatggtagaactgtaattgcttcaattcaccagccaagcagtgaagtttttgaactatttgatcgattgtacttactttctggtggtaaaactgtttattttggtcaagcttctgatgcatacgaggtaagaaaataaccaaaataactaacaagtgctttttttcttttgtgtgttatttaattcttaacattatttgattggttttggtgtagttttttgctcaagctggctttccttgccctgctttgagaaacccatctgatcattttctaagatgcattaattctgattttgacaaagtaaaagccactttgaaagggtccatgaaactaagggtaagtaagtaagtaagtactatacatgtatagattttatatgtttgacttaatgttttcaactttctttaaatggttgtatttttcagtttgaggcaagtgatgatcctctagagaagattactacagctgaggctatacgaacactcatcgaaaactatcgaacttctcaatttggctatgcagctagagaaaaagtagaggagatatccaaagttgtaagtgttgtttaattttctcaaccaaattgattactcaaaattttgaccataacaacaaaattttgttttcaattgtagaaaggaaatgttctagaatcaggaggaagtcaagctagtttcttgatgcaatcctatacattgactaaacgttcattcatcaacatgtcaagagactttggttattactggcttagacttgtgatttaccttgttgtcacaatttgtattggaacaatctatttgaatgttggaacaggctacaattcaatcctggtatgtaaattaatttcttaacctcttaatttgtttatgcaatatgaaatttttcttaattattaatactagtgtatttaattggtttttgttcaggcaaggggttcttgtgcatcttttgtttttggctttgttacattcatgtcaataggtggttttccttcatttgtagaggatatgaaggtaataaaaacaaacagtttagggtaaccaaaatggtaaccagttaccttcttaacatgtcttgatattttttttcccttgattcccaaaacaggtttttcaaagagagaggcttaatgggcactatggtgtttgtgcatttgtgataagcaacacactttcagcaatgcctttccttatattgatcacatttctgtctggaaccatttgttatttcatggtacatcttcaccctggtttcatgcactatcttttctttgtgctttgcctttatgcaagtgtgactgtggttgagagcttgatgatggccatagcaagtgttataccaaactttctcatgggaattatcataggagctggaattcaggtataatcttcttacccctaacccgaaaaaatcgaaacaaatgatgtaacaaaaaatgtctacttatttgttgtcattgtacacattttaattacagggcatattcatgctggtttctgggtactttagactccccaatgacatcccaaaacctttctggcgttatccaatgtcatatatcagtttccacttctgggctttacaggtaaaacttattaatcatcaaacattaaaaaaagaaagaaatgttcctttttgagtaataaaatagctttgcggtttctctcacactacaaaaaattttatttttagtcacaacagaatttaggactaaaataaaaaaattgtgactaattataaatcatcatttttatgttgtgactaaaaaaatccgtggttaaaagtatcagttacataaattacaatttgttgtaactaaatgtatttttagtcacaatatttgttatgattaaaattaaatcaataacaatttgtttccaaataatatgttttagtcataagtaattttttgttgtgactaaaaatatatctttttttctgtaatgccacattgactagaaataaaattttgagtaataatatgtgcagacaattcaaacacgcttgacacgtaatatttaataagtaatttcaatcaataatttttatttatgataggtttcacttatcaaaagtgacttttgtcatgtcatgtttgtgtgcaattattatttatttagaatttttctagttcaatggctatgttataagctcactaaatttgtaaagaacacctaacaaaaggaaaatcattgtttgttcttctctatattcctaacagtttcaagttttgtagggacaataccaaaatgatcttgcagggttgatgtttgacaaccaaaccccagatgagccaaagatttcgggcgaattcatcttggaaaacatcttccaaatcgacacgaacagatcgaaatgggtggatttgagtgtgttgttcagcatgattgtgatatacagggtgatattcttcttcatgattaagatcaatgaggatgtgactccttgggttagaggttatgtagcaagaagagtaatgcaacagaaaattggtaacagatctcctgagggcctcactcaatccccttcattgagaaattatgccaccaacaataggaatacatctgcaaattctaaaagataaatgagacacacacacaccaccaattcaaaatatcatctctaccccacttttatacttttaagttttcaaatctgaataggttattttgtatctaaatgctatgatatagaatcaagtgaaagtgttttttttt

SEQ ID NO: 16096 - DNA, 8805 bp, Cannabis sativa
acgtggacaacatgcttatcaagtccaaaaagactagggggcatgtggaggacctagaaaaatgcttcaaaatcctctagtactacaacatgaaactcaaccccctcaaatgctattttggagtaggctagagtaaatcccttggcttcacaatcaatgccaggcgaataaaagcaaatccggacaagatccaaggccttttggacatgaagttgtccacaaccagcaatgaagtacaaagcctaaccagacacattcttgcactcaacagatttgtgtcaaagtttacagaaaagtgtgtagccttcttcaacattctgacaggcaataagaaatttgagtggacaaaggaatgtgaaaaagcattccaggagctgaaaaacaatatgcttaaccacctatgttgtcaaaacccctagacaatgaagagctaggtgtgtacctagcagtcaaagagcatgatgtgagtgctttcctaataagagaagaagacggtgtacaacaccctttatagtacagcttgacactaaaagtcaatacccaatcatggagaagatggcctacaacttgctcttggcttccaagaagctaaggctatacttccaagcacaccctataaaggtgtacactgatcaactattgcggtaggttttacaaaacctgaagcattagactgactactcaattaggccattgaacttggtcagttcgacatcacatatcaactaggaatggccctaaagggtcaagcccttgaggattttatggctaagtgcacaaactcgtctcttgaaatctctgaaaattcaggagaaaaacaagagcttgagatgcagcaagagcaagagcagcaacaaaaacttaaagaactaacatggaaactccatgttaatggaagttgtactgaccaattatccggtgtagggttgcccttataacacctagggacaacagttgcacagaacaataacatttggcttcaaagtctcaaataatgtggctgaatatgaaaccctaatagtcgacctcaagctggcacatgaagtatcggctaaccaccttggcgtatccagtgactcttaattaatcgtgaatcaagtcttaggtgaatacacaacttaaggttaaaaatggtggcctacttaagcaagatccaacacttgctagtcagctcataggaaacacaatcaggagatccctagagaacagaatgctatagcagatgcacttgcccgtctggcaagtagcaccattactaacatggcaaacctagtgcgaatacatttcctaaaggaaccaagcattaccatccctaaagaattcgataggttggatgacaatcgaacatgatgacacctattgtaacttacctccaaactggagccttgccagaaagcaagaatgaagcaaaaaagataacaagaaaggctgctaggtatctatcccagacagactaatgtacaaatggagcttctcaatgtcactcttaaggtgtgtcaccaaggctgagtccgagtgactgatgagagaagtgcatgaaggcttttgcagcgaccatgttgagggaacaaagcttatcgaaaaaaagatactctgataggggtacttttggcaaacaacgatcaaagactcaatggactacagtaaaagatgtgaaaagagacaaagattctcaaaaactctcagagctctaccaaatgagctcatgatgatgcagtctccttgaccctttgttgtataggggatagaccagattggtcaactcccaaagggaaaaggaagggtgcagttcactatagtcgttgtagactactttagcaaatggggagaagctgaacccctatcaacaatcaactccaaaaaattccttgactttgttattaagaacatcatatgtcgattcagacttccacggaagattgtgtaagacatgttcactatttctgcaatagtcatggcatcatcaaaagcttctctttcaatgcccatcttcaagaaaatgggcaagtagaagctgtcatcaaaaccctcaaggacaccctaaaaaagaaccttgaggaagcaaaaggaaactagactgaattgctcccataggttctatggtcactcatgactacataaaaaatagccaccaagcaaactccatttgctccagctcatggctatgacgagatgttgcctatagagctggtgccaccgtttgacaagaggacaacttatgactaggatacagaccacatcctgctgacagagtcccttgatgaagtagaagaatgaagagatcatcccaacctaaagctataagcctactagcaaaaggtagtgtggcacttcaacaaacaagtcaaggagaggaaattcttcataggatatctggcgctccaaagagttttcctaaacaccaaatatccagcagcaggagtgtttggaaccaattcggaagggccctatcaagttacgttgataactagtaagggagcctacaagctgtgaaggtacaacgagaacatgaagctcattcttctaccaagatgctagaatggagagcacttttgcaaatattatctgtaacaaacttatagaacactactttgcagtagcagttctacaaactcaatattatagtggaagagagctagtagccatgaactttttggcgtggccgccttcttcaatggtggcctctgctatggccaagaaagggtagccatttgaaatctataagccaaactttgttatgtaatcttgtagattccatttatggaagttgccttgtaacaaagacaaattaaagcataaaatacaatgtttatgtttgaattattgtgtcaaaaaaacttgcttaacaagattaacttcttaaagttactcatttttcagttccacgtgcgtacaacaggcaggaccttaagaaaattgcaaggtctatgaaacttggtgaattacaagtgaccaagagatcgtaagtctgcgtgctcacttcgggggcatccacaccgtacaatgcatcgaacaagcacagagaacttatgcagagaaattttaatggttagaatgagctactaaacctgcctctaagtaatgtgtagccattcatcggcttggcataaataaaagtaaattcagatacttgcatgtcaaggccataagaagatagcaaggtttaaagaccgcctggtcggtcacacaatccatacaaaacagaaaaaaaaatgtctatattgataaaaccataatgctgaaatactaataggctgaaaactacatgtgtgcaggtacaggtggggctaaattaaaagctgcagagtttggatcgtcgcagtgtgggctggccatagcctccatggctagctggccacctggtcaaagccctagccagaaacctcctcaatagctgggtcagtcatttccttgtcaagtttcccaaggattatcactttggccagacagtggtctggtccgcttccaactttctcttgaacaatgctcttccttaggccagtttactatctaggaaagaagcattccccatgtatgaaagattagcatttgtgttgtgtagcttgaactcatagatgagttccaaagataagccaaggtactcatcccttatggcctgcttgccatcgagggctgcctttagcttctcctcacccctagtgaggtcaatccccaatcttgagatttcaatacctttcatggtgttttccttgttcctggtgtcaagcatggcctccaaacaagaaatcatggtctagttttgtaggccaagaacctccatatcagctaaagcctttccctctaccaggagatcagcctccttcgccatgatattagcatccaagctctttatttgttcaccaagagcacccgaagacctcccagtagttgcaatgacaataactcagcttcataaaggactgaaaacaaaataaggtaaaaattagtgtcagaagacaacactggccggccaggctggccaaaccctcacagacacagcattggctggccaacttcatgcaatagtgactattgccgaacaacatatattaatgccaaaaaatgagttaagttaagtctgtgactcaccgcggtcaaataccaaaggctagcaaaggggagcctctgtggctcgtcgtcatcaagatcttggagctcatcatccaaagaaggaaaggctttgttcagatgccctatagccacctccatggctctttgccacgtggctgagcgtgttcctccactaggcttcaggactcccctacccgaaggacgttcactccttgctggatggtcatctatcatgggctgcttggctgacacaggccctagaggaggaagagaagagaagaccccgcaacatttctagcatgagtggtccgagccacgtttaccctcgaatgacccgaaggctcctctaaaggtccatcagctagacctctcaacctgaaagacatatctgtaaaaaaaaagtagcaaaatcaaaatacaagttacaaatattcattgcaagacaagaatataaaatatggtgcaatcaactatcaaataccttcatcctcagaagaggaatcattttaatcctcaacaactgccttgctcttgcctttagagatagacaaagggtgagtaggccctgtagagctttggcctctaggactaatctaaagagaaatatctccaactgagcccccgggagccaagcgctaggagagggccctctctctctttactagacctcaggctatccacgaaagaggcacatcatcatccataacgggaacttgtccttcaccaagacagacctcatcaagctgccaaggctccatccacaccaattgatgggccctcaacccccacaactctagaagcagcaggatacaagatgtacttctataagttggctacactagttaacccaattatgttcctcttctccgcagggagggacatgatgtgacttgccctattattcatcttgaatgtagggatggagtgtttgtagaacggcactcgctagaagtggtagtatcgaatcttatggatgtctcaagaaataaagtagtttggcatacccaccaacttttgacataggtctgttgttggtctcacccaacaactgatggtcaacttgagtgaagtagaagtatccagttcggttttgctttagagaaaattccaaatcaaagtaatatccaatatcatgaagagtaggctgaggccagcctagctctgcatataaaataaacatcaccgagaggtattttatacttttgggggtgatttgtgttggacacatcctgaagtaagcaacaatatcatggaagtatggatgtaactgcaacaccgcccactactgaatatgacgctctgaccatgccatccaagtgagggaaatctaatgtgctctatgatccctggtgtatatctcacactagacaccccttactacagcactagaaagtatcgtgtcaaaagtctcggtaggattaatagatgcaggagaaaaaaacttctctccctgagatctagcatctaaattctaaggctctaaagaatgaaacaagacatggtccagacctatcactgaaggttggccaagcttattcaatggctttccattaaaatcatatccatctagaggacagttgggaaggacatcacaaggtttataagtcctcctcctaacaggcgcaccctcctccacctcaaatttggagtcaaaactctagaccccgtggtcaacctttggcacctctgcctgaccaacctccaaatctaaaaatctcgaggttgtgtgccctcctcaaaaactctgactctccccattgttaccactctggcaacatgaggatcatatggtggtgcactctaactgatcgttttgttctggccatgactataagtccagaatcacataaaaggagcaaggggataaactaaatgctgtctctcaaaagcaaagctaatgggacctatgacacaatggttgttaggtccctagatcaacacttaaaatcacctgcatgtaagagacaaagggaggtgagaaacatgacaaagctataggcaatgttcttgtcaaccgtacccaagggtactttctaggaaaatcacattgtacaacgctaagtatacacaaagtaccgtcttaacgacatctacttagacaaataactaaacctaagttgcacacttgactataatggagtcactaccagatcttatacagagtccccaaggggaaccacacataagactacagttgtatatgcctacaaggccatcacgagaccttagccgaggtcaacaaaggacaaaaggctgaccgccacacttggaaccttggttttggtcatccaaggttcctaagccttctaaggtcagcgaggtcccatgacccagtctagggctggcctagagttctacttccacgcataggccagtcagcctatacggtagccccctatgttttgctagacccatggttggtcaggtctttaagaagacctccttggtcacccaggtcgcataatggatccaaacatgtgttttttcaagaactcaaacaagttctttgtgttcttcgtgactcaaagagccaagaatcacaaagaattagaattagatctattttgtctagaaattacacattacacatcctaagactatcatgcgaatcaaaatactgaaaagattataatctaacgtaggaatctacaaacatttaaagtaaagaaaacgattcatgcaatcatggaaaaattaactaaattaagtaaatagcgggaatagaaagttaaccactataagaaatcgttgatgaagagaatgggaagcttggatcgtcaaaacggtgcaaaaatctcaggagatggagcaatgtggtttttgcctctagagagagggaggagcttcttcaaagttaatttttctaatgagaaagtgaaaagtgaagacgactttccctctatagggcttatatagtttttgtgggaccactccttaacttgccacacactgatcaactaaaaatcatgtaggagtacaatgccatcaacttactacacaaaataagattagacagtcaagagtgggtatttcaaagactaaatatgcaacaacatttactcagctaatgctatatcagttccaactaagttgaaaagtccatatatgcatagacatccgcacaaggtcatggggggtaaatgttatcccaattttttcctacctgatgtggcatgtttacatggccaatatcagcatcatgtggtagtacaactctctaacaagaaagtcaagtcatctaccccaacaccctagccaacagggtttcccaacactcaaacgggacgacgagtgacagagtagccaccttaaggggcctggccgaccacccctagccggccctatggccgactaacttttggatagcacaaggccagccatcctatatcctacaagtgcatcaccggccaggacttggcttgcagaactttggtgcacaacattatatgtggacaacaagctagactgtgaactgggccttaacaacccacaaaactaaaggaaaaaatatctacttttaaggggcattttagtcttttttattttagtaatttaatatttaaatatatacttattttacatgatttaagggtttaatctctcctaaatatagagccttaactaaaccctaaagatctaagtctcacctaagccatgaagctctaagtctgataactcacttcatatctctctctcatatgcccaccattgcttctctcaacacttatgattttctatctttgattcctactttgcaaccttaagagagctatattagatcccacctatagtgattggaatactattgtctctcgttatcactacatctaattaaatagggtgtgggttattactcactaactcagaggggcaaatctctataaaaatccttgtgttcttttactttcatgttctaattgtgttacatgtgacaagcatcattgtaaatatgactctgctatcggttggctaaatttgaggtcaacaatgcgtatcattttcataattttttatgttttttataataattggtacatcgaataataaataatgtgtaatattttaatttttatgtaatttaatattattatacatttaaatttttaaaacaaaattcattgctagataaggggactccccaccttatgcttatacggaataagttgggatggggactaggggagcactctccaacaatttccctccatgtatgcatccttatatattacatcaatattattctaaatttactctaagtagttaagggttatatatataacattcttataaaagtaagtttaaaaaacataccttataccaaaaatcatatacttgaattctaataaagtcacataacgccacatgttattcatcttccctagtaataatgatgtgtatatgagatgtcataaatgtaacattgtaatgaaataaaaaaataagtacatggaatgaaatgatgtgaaaaaaaaaataagcttctagtagaaagagagaaactcaatataacaaaagttgaatattgtcctttgattacctttttggataagcttagcgtgataatcttcatgagaaagcgatcatatttagtgtaaagctcagatgataaaattgtaacaagatgatggaggtcttgggttaatgagtttgactctttcttaccaacatagaacttttaagacctaatctcttctatatggtgctttgtctctctctaactctctctctctctct

SEQ ID NO: 16097 - DNA, 7751 bp, Cannabis sativa
aagtccccttttagcttcaaagaacccatgtaaggacccattgaacataagagagaacctcggagttgtaatacaattcattatcagcttaatgaattccttaggaaagttaacatagaatttaatgttaacatctaataaccaataacaaaatctaattagaatattccaacttttactatttatctaattaatccattataattagattggattgaatcgctcaatgaaatgttatccacacatatatacacttcaacctaactaaagaagcaaacataaattaaatatatgtatatataataaaatgatggttatatgtacatgcccaagcaggtactgcaatgcagaaagacagtaagagaatcacaaaatagataagcttggaaagtaaaaaccagctgtatcacaaaattcacaatgcgcgcgcagttaccagctagtctctcatcttgaagaggcttattataaattaatatacaacatgtattggttggaaggcacacctataaaaggccaattcactcacctactgtactagtacaccatacatcgtacatgcactagctagtacttattcctccctagctacctggctaaagtttttataattatacaaatcatgatgaaaaatgtgaagctatatacaactgttaagtaccagtaagatgcacatacattaatattatatatatatatatatgtgtgtgtaaacacctctctttcaaagctagtagtataaacatatttattcattgaacgtactacatacattttgctacatggaaatagtactatagaacactgtttattaaagtttaaaattcttgccagtactactttacctctatagctagctcaggtctatatatttaattttctatttagtactcaaacatacaacaattcaaacagaaacctattgaatatgatgacaagatataacgatgttataattatattttatattaaaattgtatatacttttgcatccaactttgagccacatacatgacaattgacatagatatttccctaacacacctagctatgtgtatgtgatgctaagtagtgtacatatatataaatatatataatatattggaacttgttcgagattagatggatgtgtagtgtcaacgccaaaatattatttaaaatatgtaaatatatattatatggtcgatctcatttgtatgtgttctacatgcctcatgtatatataatattcatggaccatggaaaaataaaggagaacataaaatccagtaatcaggtggattatatgcatttcaaaaccatgtacagcgatcaagcatatagaaaatacagtttaactatataaatatatatttctagttaaaaattcgtttatcccaagttaattcagtctaattatatatcacagatccaagtcagggattaacaacgtccgtaatagtacacattaaaatatgagaggtcccctcatgcacgatcatacatatatatatagctagtaatacgctgatactttatcacaaagggtgttgctgttggttgataatatatataagtttatatatagatcatgtgggacttgaaattattagtccatgtcccaaataaaaatccaaaaatttaattccaaattagaagagatgggagacctctctttgaaatatatatttatatattaattcatgcagcaaagcatccaaggtggcatgaatataatggctcaagagtaaggtccagatcgttccttctaatttcttgtgttccatcctcgtaacctcccctgcacaatttaaaattaaagcattaattttgatgcacttgcttaaatcaggaatgcacacttaacacttcttcttttttccttattcacttgcagagatcgatagatttattaattgtgaacaaacgtagcattttctcttgagtatagaactatctatctatatgtacatatcattacatagaaggggctacaactggtaactaattaatatactattattatatatgtgctatgtggtgcatgcatggatgcaaaatattctacatgttgacatatgatacaggaaaattctacataaaatttaaaccactaataaatttgtaagaatgaggtgtgtagaatatgatacatcaggttctatctcaaatttaattgctaataaaatatatagtattctttacacattatcaatttaagactttctaacaatattattaatttaaacattatcttttgcatttccaaatttcttaaaatatttgtagaatatatatcttaatagctatattataagcaccaacatctaaaagaaaagaaataaaagctagaattggaattgtctcaaggacaacaaatgaaaaggtgcatcaatacacacctatcttttgagagtgctgaagcaccctatatatacacactaatttgtatctccaatgatgtactaaataactagctccacataaaagcacatatatgtatatatatatcgcatgcatatgaacggaagtaacagatgcatatacatacatattggcatgcctataaacgtacggaagtaagagatgactgttgtttttggggtatatatacactactacacagttaaagcatatatagaaatttgaaatgaaatatatatatatatactgagtccgaggaatatttgtaatgattatatacccaatgtttaagcagggaagtggttgttgaagcaggtatgatgatgtactagcagggccatggttttgctgctcccactgcatctcctgctgctgttgttgctgctccactgccaccattttccccctttccttgatctttattattatatattattaatcatttccaaatcacaacaggcatctagttaatcacccaatttttctatctaatttttaattaaatggtcacttatatctatattttatgttaatttattactttatatgtctaacaaattaatgcctttcttgtgtatgtgcgcgcagtttgataaacttaatatttatatgtatgagtagtgcagatgtgtctgtaatattcactatatgtatatatatatatatgtaccttcttttccagcaagttgttctcctcccgcgctgccttctcctgccacgtatgtatatatacatcagaaactaaaaacgacaaaactctgaagttccaaatacgtattccaatgtagcatatttcagatgttcatcattgtgctgcgaaatatgtacttttattgtttcttatatatgatggagctgtaacaatcgtcttctacaatgatttagagtcattaaaaatgaacttttttattttatttttttcaaattaaaataaaaaatataaaaaaaaactccccctaaatatatgaatattcttaaccattgacttgttaaaagaagaaaagtagaattgatataataaagtagacagtggcaatttcctttaccctcttctgaagatcagagattgtctcgttcatgagttggttctgcaaaaaggggagaagattagttttagtgtaagtaatcttatataagtgtattatgatatgttacgtgtgtcataaatttagctgaaaaagattgccggaataattattaatagttacatccttgtattttttgtacgattataattttttcaagagtaatcacattaaataaaatcattaacacaatgacagtttacatgaaaattattaaatagttaacccgaactacttgatctgatcattcattaatatagtgctatacatatacatatatatagcaaactctataattggttaacatactcttcttgctcgaatttgtttaagagaaatatcaatttgttgctctaaacccgtgagatcctttagagtcaacgagtctaaatcttcacctaagtagtgcctgcaagggtttaaagaacaacgtaataataaggatataaaatccaaaagaacatacgtacatttaagtattttaacataaaatacttggaataaaccactatatgaaagattatgcaagttaaaaagaaaaatacaaaagttcccaccaaaaaaaaaaaaaacaagttttaaaaatatacgtacctacggttcctctgcaaaagctcgattttagccgtgagtctagagtactccacggtccagtttccctgcataatctatgacagtacaaatcaataaaccacaaacagttctaatttgatgtggtctgcttaattgctcctatttgaaaccaacataaaagtatggggatttatttataaattttattttatttgtagattattcattagaattatgttgcacaaataaatataaagggctaagaaaattattagttatgaatgaagagtattgttattagtcacataatacttatattgaattgcactaataacactttgtcacctttatgctttgaaatatttagaaaaagaaatgtgttgaaaagaattaagggttataagaaacatttgatataattatacatctagctaggtacttagccaacgcctaaagaaaaaaaaaaaatagccagccatgaacatataaaaaattttctagctagctagctagctaattagcagtactgtgtattgaaattaaaaattgaaataatgcatagagcaaacaacaatatataaatatatataaattatatgagtgaattaattaaattgagggaaagggaacctgtaattgtgtttcagaatccattgacaccaactgtctctctgcataagagtatctctcataccgttccaatatcttctccatgctgtaagtaaattttttttggcgttattagaattgtttaaacaatgcaacattatgaattaattgattccaaagaatttaatcatgtaaatgaaacataaaattatgtctttacggctataaaatatttattagcctttgatcagttcatgaaattcaaacacttattttaacggatgaattttagcttaataaataattaacatggcgtcatataaattagttgtaaccacgtaattaatcaaacctgtattatactatttgtaatgcccacacacctataagattccttcaagaaacttatatgcagtgaccaaaagaaaatggtggaaaactaaaatatagtgacaatattttctttttttacaatagtgacaaagttcattaagtcctcatgatattaaacaaggagcttaattctaagttaattgggggatattgttgtatgtacccctacctgagtagtactattcatgacaaatactacaaagaatttcacttttttttttcctattaattaacaagggctattttataattatattaacagttgctatatatatatatatatatatatatgaaaaaatcaggatctacatatatgcaaaaagtagctgaaagagtacatgatctttctgaaagtcgctataacaactatgattctatcaaggggtcacaacattatatatactaactatatagacttgtacactaccattttttctttagaaatacagttttatgataaatgaaagtacgtactccataaaagttttccttccgcaaaaaagaacagaatttaagtacacccataaaaccagcaagagtaacttctatacatacatacatatatgtatataagttagtatataatatatagtagcagcaaaaactaaaaggcataaccttatgatcctaacctggatgcgcctctaatcagactaaacatttaaatatatatataacatatatatttatatgtatctcagtgtcaatcaaaagcatttatatatttggaattcatactatagatcttgattttagcaatcactaaattttataacatgactactattaatggccacataatcacaaagacacaaatgggttttgtatatgtatccacaaacaagaatgtgatttcaaatcaaacaagaaaagatatgcctttttatagggtacggacgagcttccttagtgagcatggtagacagacatgccccaccaataacataaaaaatgttcagtgatgattaatttgcattaagttaaaacttataagataaagctagcatgtcatatgattaacatatataggacaaatgaccaaacagaaacagctagttacttagctcttaccatcattgcttacttactcttatataccaaaatcttcactgcccttataccaaaatctttcactacaatatcaaatttataccttaatcatatttttaaattaccctacaggcattcgttggaaccatactaattgtacataatggacacatgcatcattattacaacaacatgtctaaaagacaccaatttacaaaaatatatattgtcctttacatggtttacgtaccaatgtgtgatgaacatatgaatttttatataaaaaatcttttaattcaaaacatatatatatatgcatgaagtcgtgaactgttaacatataggagaagaaataggaatgaaaaatttctaacaaagtaaaaaaggatcgaaagtggcacatatatatatataaaaagaaaaatctaacaaatgcagagattttaagattatatatgtaaaaaaaaacttattagtgaagatatggcagtgttagttcaaagaacacaaaataagataattttacaggataattcattttaatgtcctcatcactagtgaagataaggcagtgttatacttcagtctgtagtttcaatttttttttcttcttccatgcttataaaaagttcgacttctaaactgtgattattttcatatagatctatattaattaattaatttccaaaaaacacataaaagtaatagtttaatttttttttttaaaaaaaaaagaaaaaaaactccattaaaacttcatgagtaaactcagtagacaaatgtaataattttttaagaaaactaaatagaattcttaaatattaattagtaacaatgtataaatacaactttacacacccaaagtttttgctaaatatatatcatatatgattttattatagcaaatcctttaattaataaagtataaaaaaatctttgaaataattaaaaaattcgaagaattttaaatataaatgcatacaacatcatttttttgacctaataattaataattatttgactttttagtaaaaaatcagatataataataaaaaaaaaagttgctaatattagattcaatggtaaatatatatattcgttttaaaaatcacaattctcttgagaaatatgtaaaaattgaactataaatatatatatgatatttagcgacaattaagaggtttaaaatggcataaaccctgttatattacttatctttagttaaaaattgaattacttaatataaaatcatgattgttaagaaaatgtccaagagatatccaaagctagactctaatactcgatctcctccctttgattaagagaaagaggctggatcgacgcgtgtaagactgtataatccttaaagtcaattacgtacatacattcactgaaattaatgagccatgaataacaggattaatcatttctctaaaacatcaaaaagaataatattggggttaattacatcaataataaaaccaaattaaatagattcatcattaaaaattaggcgcaagagaattttaaaagtaatcagcaatttcttcttttttttttttcttttatcacctttcatcttttttattattattttattgtgtgtttaatgtatagtttattctttttttttttctt

SEQ ID NO: 16098 - DNA, 1806 bp, Cannabis sativa
tagcactagagctcttttagctccatattaacaatccctgttctaatttaaaattcaattgtaaattatagatatgaatacatgcaccctataattccattagtgaaatctttgactcattcttagtccttgccatgatgtaattccatggaagtaatcttagtttgatttttttattatgttcacatatcactacttttttttttcttattattttaatatctctagaaactaggctaaaagtttcaaacatatatttaatacaagaagaaaatcacattaggtgaagaacttttgaaacggcgttggcaagtgactataaagaagttgaaatagtcaatctagtatttttgaaatctaacaagttaagtaaatatatttgtatttatatataagcctcatggaagtattgtaatgtaaccctgaaattaaaataataaaacaaacaaaccccttttataatgttctcaaccacctcaataaggacggcagaccaataaataattccctttattaaattataataattcaaatatttctaacataatgtgatcaaaaacaacataaggcactagaaaaccttattcaacacacatcggtgaatttgaccaagttttgtcacggacactgcttttttgaatttctcaagtcatgaattgtatattatatcataagatgtttgagaagctattttcagagattttttgttcagaaacggcggtaggattaaaatatattgattaatactaagtgacaccaaaataatacaaagtaataaatgccaaagttgtaaacatgatcctttccttatgtccttcacctttcaaatctctctggggtatcttaaaattgagatatagattttttagagttaagaccccatgaaaatcacaatgacacttcaccttctaatctacttgaagataatgtcgttttatatatttttgggttgggttgttaaaagtgtgaggccagtaatggattggattccccaaacacaaataaggtagtaattatatagttactttagttttcaacaatgagttgagctttattcacttcttacctcttctcttctcctcaaaaaaacacatgtagattaataacagcaatataattaggtattagtaatgtctagtactattcaaaagtaacatcttacaattagttaatgtgttctataaaaattattgtattaagttatataaaattagatactaaattacaaaacattattatatcacgagtcttagacatcactaatgtgtaaaaaactttttctaaatgctcaaatagataaagaatttagggaaatattcttttaggggataaactttgtatgtagacttacccaaaagataggggtcttgttaattttatggtggaaatgacattgacaatgtgggtattatccattcttgcaacataaaggctttcactttctctcctgtaaaattagtattgggaaaaatatatttatattaaatttatatatagtgactcatgagagctgtctggttgtcgtgcactgctgggataataaacattgttggtgagctttattttcagggaattttgttatgttatttggattagcatgcttggaatattaatcggattctctggaaaatgatatctcatatggcgaaattgaaggaaattaattcatacttttttgactcataataataataataagatttaagtccaagttagtggatgttgttttgtgcttgtttaattgcactaaaaatcatttgaattctcaaaaggtgagaaaataagaaacggaatttgagtatatat

SEQ ID NO: 16099 - DNA, 7032 bp, Cannabis sativa
ggatattatatataggtgaactttgattattaggcactccgtttctgtttttattaatttaattttgaagttttttttatttgttagtttgtagggtcaacctaagttgcaagttcatatatgatgaggtttcgtagaaagttcacatgctttcgaaactaaataaaataaaacacaggttttaagaacatttattaatattggccttacatcaaacaaatattttattattattttttgtgggcatgagcaactctatattaatgctcacaaaacgtagataaaatctaaattagttgaaagaagtcctcatggagaaatcaagttttgccattactgttctccttatattttattgtatattcagtctagttattccagcaaaatgttaccgtcactatccccacccatcaaaatatgaaactcccaacagcttgtttatctttggagattcattatttgatgctggaaataataactatatcaacactttaagtcaggccaattactatccatacggtggaaccttctttaaattcccatctggtagattttgtgatggccgaactatccctgattttattggtaagacaaatttattgtttatttaagttaattgacattaatttctatttatacctaactaaataattgttaaaatatgtttattttgttacagctgagtatgctaaacttccactaattcccccttatttgttccctggaaatcataacttcaaatatggagtgaattttgcatcatcaggatctggtgctctgattgaaactagaaaaggaactgtatgtatatataggaaacatgatcagtttagagataagagctaagacatatgcactcttgttactttttgtgtcttaaattaattttattaattattagcagcacattattgtacatagtaataattggtgtcatggtattcggatgtttgtttcaggtgattgatctcaaaacccaacttagttatttcaagaacgttagtattcaactgaagcagcaaatggggtatgctgatgccaagactctgctttcaagagcagtttttctcttcagtgttgggagcaacgattactcattcccttttgagactaactccacagtccttatttcccacactaccgaagagtttgtaggaatggtcattggcaatataactgaagttattgaggtatacttccatacataatcaatacaacatctttgaaaacattcttttttttttaacccattcgcataatattggaaattatgtgagtaaatcaggaaatttacaaatttggaggaaggaaatttgggtttctaagcttgggaaaattagggtgttcaccatccggtagagtacttgaaaggggaaacaatggagcctgttttgaaggattcacaccgtttgtaaaatcacacaacactcaactctccatgcgactaaagaagttagagacaaagcgcaaaggattcaagtactcgctagttgacttttattcattagcagaagaaaggataaataaacccttaaaatatggtatgtatgtatgtatgtatgcattgagttattttttcttcttgattagctaatttcttaattttatggctttattatatataactatgttgtttgtgttgtgctatactaaaatataaaggctttaaagaagcgaaggtggcatgttgtgggagtggtccgtacagaggacatccgagctgtggaggtaggagaggagagaaagagtatgaactgtgtgaaaatgtgacagactatatcttctttgactttactcatcccacagaaaaggtcaaccagcaatttgctaaagaagcatggagtggaaagcctggtttctcagggacttacaatctcaaagcattatttgaatccatgtaaaatgtgtgtgtagactggagatgatcaccttcaattactttttcattgttggtcttttaatccttttatttcctgtttttttttacgtgttcgagtgaaagaccttgaaatattactctttaatcatcttattatttttcgttttaagttttgttgacgtgaaaattaatattccggtacgtggagtcaatcgccaccaacttaaatgggaacatcttaacgtgaaactcattttaattaaaatgtacattgtaactgaaattgatcaaaccaactaagtcaaacgatacccgctctctcaatagtatcatgatttaaatattttacaaaattgagagtatgattctatatatttcacgccatgaataaaagtaaagggtatttgcgtatttttttgttttgttttgacaaattatcatgtataaatttgagtttcagtttaatacaattggctttgatgtaggaaattcttttatttttataaatttttgttttgcttttctcattaagttattttatttgctacagtataacaataaaaataaaacttagtagggtggtaaaacgggttttgacacggcacataaatatacaaattttatggcttaagatcgcaaaaattagacgcggatcgaaaatatatcaacacgacttgatacgaaataaagtaagttacaacacgatccgcttaacaaaaatttgacacgtcatgatgaatttgacacatttttttaaataaaataataataatataattgtgtaaaaatatatatttaatgatttatcaatttgacatgtcatgatgtaggaaactttttatttttatatagttacttttcaaatgcattctaagtgatataaagtaatataagagagagaaagtagtgagattaatatttaaatgtctagcaactcatattgtaaataattgacaacaattaattaagtacataaggaaaataagtaaaaaaaattttaaaaaaaaacttgtcaaaaaaaatattgataaaaatcttcaatgccgcttttcgcttctaattttcgttattccaaagttgcctactcaaaagtaatgttaaaaatgatcctttatatagcttaaaaaaagataaccctaatttttgaaatttcaaataagtaggccgtgatatgttcattgagtgtcgcggccagtgttttcaaacacattttcttcttcaggtttttatatagtgggtcgcgtcattacaagggaatgtcacggtgcttgaagcccaatttcgaacaacgatgaattaacatttccatgcttcaaaacattaaatcccaatgtttgaggctcgcctataaacttgttagacacgaattctaacgttgaggcgctactccacactttttaattttttaacattaatctccaatcgcactgaatcttttgaatttctttcttgtattgttttcatagtgctctagcaacacaactttatttaattaatccttcttgcacatttttttttttgaatttgctctattcttcttcactgtcaaacttggaaacattatcaaccaaaagcgtaaaactgcacaaaacacaactaaaaactaattaaaaatacctcaaaaacctacttaaaaatagtactaacaaagtcttaacaaactccccaaacttgacatttactcgctcgagtaaaaatcaacactaaacttaaactaaactaaactaaagacaaacaaccactaataagccttacttcatttcacaccacactacaccaccgctacttgcaatatttgaaaagaaaatttattatatattgatagggttttatacaatttttattattttattaagaaataataaaatattataatttttaaaattaaattttttttaataaaaggaggcaaaattttattttggttaatattcagggtgaatgctaactgtaaaagaaacagaatctagcagaaaggacataataatataattattatattttagagagaatttttaacaagttctatattttaaaaggcataatcatgtagtttcaaaaatttaaagagcaaaaaatactaattatgatctaaataatatagatatgtatataccattacaaagaaatatgcatttggctgagtgtagtatgcttttgtacatattcttttaaatattttttcatcaactaaacaattacttaccttgcaaaaaaaaaacctacacaattaagtagaaaaagtctctcccaaagaagaattaaataaaaattatttagtagtgattttttttaatagaaaattccttactagtggtcattaggaaggtagaagaaaaaaaaaagtaagaaaaacaaaataaaacatattaatgttaaggtaaaaaaaaaaaaaaacttgatttaaattgaataaacaatggagggtgttaacgttggtgggttagtagctgttaaaagagttaactgatggttttaattcattaaatgatgtaatagtttagttttattggatagactgaacagaaaaaataaacagagacgatcttataaggtttgagagaagcgaataggtggcatgttaagtgatccttaatcgagctgtggaggtaggagaggagagaaagagtatgaactgtatatgtgacaatgtcaatgactacgtcttctttgacagtgatcatgcaacagaaaaagtcaacgaccaattagccatagaacactacaatctcaactctcaaggcattaattatttgatcaatccaattaagtaaaattcaaggagacgtattcttctatatatgtattatttgtttttaattacgtattctattctattgtattatcttcttcttaatttttttttgtaactttacttttatttatacataataatatgtttttccttttagtttacgttatacgttatgttgacttgaaaaggtcaaaatatattccagtggaatcgatttcttttttaactgatggattctcatgttaattaaaatgtatatttgaattggatttggtcaaatcaatcatgtcaaacgaactaaggttgtattttttaaccaaaaaaaaaaatgaaaaaagaattgctaaatatatgtaaaccaccaaatgttaggataaaaagggaaatgtaaataaatgtacatatatgatgagagatgggtttgaatgtttttttttaacaataaacaaaacgatttattgaaaaatttaaagagaatagtatattatgaaagaagatggagagtacatttaaactagttcactatttaccttaagtagatacacggttaattcatcaatataaacatgaattaagggcgttttaaaaaaattagtaagtaaactagtaaaaatctttaaaaaaaaaatcataatttattcaacacagataaaaaaatctcgtagaaaatacaaagaactaaatttaactgttaatctttttaatatatattgtcaattttgaaaaaaaaaaagtggaagaaaaccatgcgtcaaagactaatccaacattattatcatagcaagcttgaacagctgcgagcctctctataaaataaacaaaaataaattagcatattaaaatagtaatatacattaaagtaacatccacaataataatatagaaaacttatctgctacaagagagtatattaaattctttaatataataaaaattattaattaaaattagatctattaaaataaaaaataaaattaatatctcaaatattattattattattattattgttattaatgacgtacgtgtagtagaacatgaaagcacatgtaatcaaattgagtgatctaatacgataatattaattgatgcggtagtatcggtgagccgtgagagtagattattagactcagtctagtacatgctttttttcattttattaaattcttcattcaaagttcgaagttcacatttagattacaaaagtggctaaaaaatttatgaaacattaatttcaatggtttcgtatcctgattatgatcttgagtatatataaattaatattattttagattaggcgacttttgtaaaaatcaatatttggtctccttattttttattatttatttattttaataaaaatgtatgattatgataaaactaaaaattctactattataatattaggtactttaggagaaaaattattttcctgaaaaacacaatttgtggagaaataagaactacgagcgagataatgaccaattttatttacagattgatcgttctacaaaatgtgaagaaataatatcaagtaaaagactcttacagttatgaaccaactgaccaaattcagaaggcatatgtaaatcctatctgttttaagaaaaatactaggccattgatgacaaataatcgagcttaaagcttcttcgatgttaataatttttgcaattttaggttgaactcagccaacatgactaacggtgaaagcctcgatccaacatcctcgtgatttctcgcaatatactccatcccgaacctaccaactccatcaatcagagctatcaacattgactttaacttgatttaaaatcgtagtagtctaatacactttaaaactcaaaccaggaatagacaaggaaagacttgtccttgaaattgagcccaattttaattgaactattttttttttttttttttatcataactctaaaaattcatctttctatttcttactctaacaaatgtaactcaatttctatattatttctaacccgagaaaagttcgattaaaataggggctcaatgaattattatgttcttctttaaaaaaaaaatattatggtccaaattatcattaataaaatagaatactaatgggtaactttgcaaaatataaatccaaaatagtatttacactttatttatttatatatattatttattataaaataatactctttaatttaatgtcatctatcatagcatcgagtatagtagtactctatatataaatgttcacaagaaacgttgctttgttattaattgacgaggtctcatatatatcatggcaaaatctagctttgttattacttctctctttatattttcttgtataagcagcctcgtaattcatactaaatcttaccgtcattatcctcaacctgatgtaaga

SEQ ID NO: 16100 - DNA, 7040 bp, Cannabis sativa
  modified_base (212)..(216): a, c, t, g, unknown or other
  modified_base (278)..(282): a, c, t, g, unknown or other
  modified_base (345)..(356): a, c, t, g, unknown or other
tccaatgtatactacatacatccgatactggtatactttgccaatgccctagaaaggacataacacttatccaaggtgtaagtataccttatcgtcgattatgatatcagtctaaatcaagtgaactgacaaaccatgggaattaaacttttgaacatataatcatgtttatatttcattatgctgacgaaactataatcatgaacaaatannnnnatatatatatttatatatgcttttgacttaataaaatttatacattaaacataatcatgaannnnntcatgtgaaccatgcaacaaaatgatttctgatctttatgaattagtaaatctgattatattnnnnnnnnnnnnatttatggcacaaaacccaataggtcactcatatgaatggatcaaagataggttgccacacatgagtggtagacaagttggaactccagcgcctccgggagaatagctcgggtcacggatgtgcaagtaccttagggagttcttccccatcacttggcacatagacagccccaaaggaccaacggaagggtagccatgatctcaggaggaccacacattggaagaaccacgaggaatgagctaaagaattacgacaaatctctagaccacgatagagaaatatgggaagttaaccagctcttggtgcaaagaccatgacttatggattattccattaccattacggaggaagatgctaagctagtgtgttacgcacatcatgatcctttggttatcgaaacttttattgccaacaaagttgttgccttaatttttgtagacaatggaagtttggtaaatattctattcaaggatgctttcattgccatttaacacactgaccaagatctttccccaactagttcacaactcaagggatttaatgggactaccctatttcccatgggaaaattagattccctataaatttatgtctgaacacccccaaaacatgttcaagttctggaccttcatagtagtagactgccccacgacttacaatgcaatattgggtcatccgactttagtagatttttgagctataacctccaccatgcacttgtgtctcaagttccccacacaggcgacgagaataggaactttctgtgggaatataggaaaagtaagaaagtgttatagtgtggttgtacaacaatccatttttatggtctgggaaactagcaaagcactcttacctgaaagccaggatgaattggattctcgcattggctttaaaactccattagagcctataaaggagattgagaagataggaatttatgatcaagatccaacaaaagttatccacttaagaaaaggtttggtctctgatgaaaggcgcacaccaataaccaccaccgaagaatcaacagatgcctttgaatggtgtcatggagatatgacttgagtaagcccacatgtcattactcacgttttgaatgttaacaaaggtatgcctttattatggcaaaagaggcatcccttgtatctagtgaatttagaagcctttggaaaagaggtggataaaatgctattgaacacctttatccgagatgtgtactactcagaatggctggctaatcaagttttggttccaaaaccaaacgggatatggcaaatatgcattgatttcacagatctaaacaaagcttgtccaaaagatttcttctcgttgcctaggattgaccaaatggtggatgccacaatcagtttcaagctattatcttttatgaacgcatatttttgatgtaaccagatcaaaatgcatgtggcagaccaaaaaggtactagctttagaactgacaagggggtatactgctagtcatgcccttcagattaaagaatgtaggaaccacatatcagcgtatggtaaactagatgtttaaaaacctctttgaaaggaatatggaagtctacgtggaaaatatgttagtcaaatccaagacaagcaagggtcatgaatatgaactcaaagagtatttttaggttgtaaggaagtatgtaatgaagtttattcccaagaaatacacctttgatgtcaaattgagaaagtttttgggatttatagtaagttaataggaatagaggcaaacctagaaaaaaatacaagccttgttagatatgccttccttgaaaagacataaagacgtgcaaaccttaactaggaaatagcttccctgagccgcttcatctcccactccattgacaaatgtattccattttttaatatcttaaaggaaagtcaaaattttgaatggtctgaagaatgtgaggatgcattcataagattgaaagaacatgtggccaaaccactagtgttgttcaaaccagttcaaggagaagacatgtgtttatacttagccgtctctaagaatgtgattagcgctgcactggtctgagaggaagaaaaggttcaacacccggtgtattatgttagcaaacatatgatggggctgaaatttgataccctttgatcaagaagttagctttcttccccttgattgtattgagaaagttggggtcgtatttcccagcacacgcaattaaagttttcacaaaccaccagctttggcaagtcctaaagaaactagaagtctccaagaggctcctcaagtgggtgatggaacttagcaaatttgacatacaatatgttcctgccgtctcaattaaaggacaagccctcgcaaattctatggtatagttcaatgaaatggaagcgaccattgatgtgacagattaggttatccctactttgataatatatgtcaatggcgcgtcaaacgaaaattgatctaggttagaggtagcaatgatatcctctgatggattaagactccagacagccttgaggttcacatttcttgtctccaacaatgagctgagtatgaagccttgttagcaggcttaaggttagccaaagtggtaggagcttacaagatttgaggtattcagtgactcctaattagaggttaacaaagtgttaggagaatatcaaacttgaggagaaatgatggccgtctatgccccagccgcaagagaattactttaggaattcaaaagatagaagattgaattaattcctcgagaaaagaatgttcatgcgactgcttggccaagttagcttcggattatgaagtagaaaaattgggggtagttcccataaagtatctcaccgagccaagtatcacaccaaacgcggagattgcgacaaatgaacaaatatcatgttggatggacccaattatcaagtatataacaaagagagaattacctaaagacatggcagtgtccaaaaagatacaatatcaagccctatcttacctcatgatcgatggtcacctcttctagagaggccttagcatgttgtacctaatgtgtgtatcaaatcctgaagctagatagattgtgcaagaaatccatgatgggttctatggagacaacactaggggttcgagcctctctaagaaagttctgagacaaggctacttttggcctaccatgaagaaagaatgcatagactatgtccttaggtgtgacccatgtcaaaggtttgcaagtatcccaagggccccaccaaatgaataacactaatgaccagcccctggcccttcggggtgtggggtatagatctcataggatccctccctacaaggaaaggcagagtcaaatatgtaacagttgccctagattatttcacaaagtggacagaagcagagcccatgaaatctataacgaccaaaagggctttcgactttgtagtcaaaaacatcgtgtgttggtatgggctacctcacaagatcatctctgacaacgagaagcaatttgacagtgatgaattcatagaatcttgaaaaaatatggagttataaagagtttctccactgtcgcaagacctcaggaaaattttcaggtagaggtcgttaataagatattaaaggtcacccttaagaaaaaactttggcctgtaagaataactagccaatggaattaacacgcgttctataggcatacaggaccactgcaagaactaccatttgatattctccatttttaattgagtcctgatgtgaggcgatggtccctgtgaaaagcgtaatccctccgacagaagaactacttatgatctagccacaaattaagctttgttataggaggcactggatctcgtagaagaactctgggaggaatcccaaatacgcatggcagcatatctgaagaaattcgcaaagtatttcaactccaaagtcaaagacatgaagttttccatttgagatctactcttaagaaaagtctttcctgcttcccaagaaccagcagtgggggtactcgacccaaattgtaaaggaccgcaaaaaattaaagataaataggctccgagacttacaaagtaaagcgcatggagggatccataatcccaagagcgtggaatcccaaccatcattgaaaatactatcaatagttaggagtttggtatttaatttcatatttacatttcaaagttagaaacttgttgcaaactaagtataatacatgcattatcctgttaaatttaaactatgtgacccaaaaagttattttaagtgacttagggggtattaaggcatatatatgcaaatgcaagtaaaataacaaaaagcataattagtaattaaaataaacgcttaaaaaagcatgtcatccaagaaagggataaagaaagctcggggaaacgctataagaaatgtctcccaaaaagaaaaaaaaaggagaaaaaatagacatataattaaaaaattaaaatattgttctggtgggggtagtagtaaaaggcagtgcaatagaggttgttaattaatccgccatagaggaaggtgaggacccacccattcagccagtgacttctcaagtttcatgttcttttcccaaaaacgacccgcagtagcctcaggattcgacatgaaagttaggcgagtttcaaatacgttcaatttccaacacataaagaatctgtcctcgaagcattttatacaatgcttacatgtcactagagttagcagggcatctctcgtagcttttgcggcctccttattggttcggtcctggaactcacgcaactccttaagctctactaataaattcgctgcagtttccatgtcggccttttataaatcatcaagagtcttatatttggacgtcattccctggacctcttcttggacatttagcaaaatcatctttgccttggtcaactaagttcaggtcaaagcaataatctcatccttggacttcaaagcttctgggtcccgttccttgagggccttctccgccagtgtgtcgttccagagagtctccatcgggctctctgcccccttgagcttcctcaacactctgtccatgccaccccgttttgagacagtgaaccctttgtcaataaaagtcttggaaagacaatcagcctccacatcaattggcaataataaataataactggggttgggtcagatctctagagaaaggaaaaaagaaacttgaaaaatgttgtgtacttatggaggtaagggccacactcatgtcctagatttgatagacagggttagaagaggcaaagaccgcgactctcttggtagaaagctgagtcaagtcaacagcgaaatgactcaccatctctgaggtgaaaggtgctagagaaggacctaggtagcgcttaaccagtcagtcatgggatcaaggttcaattcctagaattcattagtgtactcaccttagaaagggccatcatgagcctccctcagcctcctttttaaggccttagcgtcttcttcgcccttcatacactcatcaacaacgtagttatgtttggcaatagaaagttgcacccgctcttcgttaggatgggtcagggttaggaggatagtaagagggacgagagagtcttcaacctcaaatggtatcctaatgtcggtgcttggaccaaatgtttttgaacgtcttagcttcttgaaggtttcagggttagaaaccacacccttctgtttccagtcaagtcgaggaacctcttcttcttcatcctctattagcactacctcctggtttccaagaacctcctcgtttggggctttgggagttaccacctccagttctgggctatgtgtaacaaccagcatggccaatagatcatccataggttttgttgttaaaagaaaacaaaggaaaagttaaaaaaataaataaatacatgaaacacaagcacaagcatgaggcagcaaacgaggaaggttaatcctaccctgatgccttaattttcctgaaattcataaattaaagagctggtgtcatcatctcctaaataactaattgaagggagaaaccaactcgaggttatgtagaaagaatgatctacaagaataggaattgaaggactagaacccatttaagactagcccaagaagccactcatgttagaaaaataaaaatcattttccccattaccccaccgtgcatggggcatttaaaatcaatacggcctcatttcaaaacaaactggccgtgagcgaaaatactcttgagccaagggaacaaaatgaatgttcaaaggggactcacgggcactagaggtactagctctaggggtcccaaagttaagaactagaaaacaaaattttggtgtggccaaattagccctatttctaatcttctcatggctaagcctcccagaagcactttgaaggtaggcataacaatgtttttttcttttttgtacttgtacttgttgtatttatcttcggcagttaataattggagtttggagcttctttttagtccccatattctaggtgttgggagaagataccttagaaaagttgaattcttcaatttattgacagtccatgattagcttagccctgcgacaattggcagttgtcaccaaatcacccacattcaactcctccttcttatagccgtgaatactttggcatgatttaaaaatatttgggtaggggatgtcctgtacaacggaggaatcctaatccaatccgtcaaaaggtc

SEQ ID NO: 16101 - DNA, 4294 bp, Cannabis sativa
tcaattctttcgtttatgttcacatggtatcagagcggattctttccctcttttctggtctttgccttcgtttcttctctgcaacttcaagccttcgttcatggctatcaatggaggttcgtctcaaaactcaggttccagtctccctcgttcagctcctgtcacgttttctcactccctctctgttcgattagatgaacacaattaccttccctggcgacatcaagtttttgcagctatcaaaggaagtcgtcttcaacatcaccttgattctacgagtgctcctcaaaaatatctcaccaatgaagatcgaactcgcaatcggccgtcacctgagtatgagacttgggatcaacaagatagtatacttgtttcttggttactctcttcaatgtctgagaaattactcacacgcatggttgggtgtgaaactgcagcacaaatatgggagactcttggcacatactacacggctctgaacagagcaaatattggaaaatataagactcaactcagaaattccaaaatgaaaggttctctcaatgattttctactgaaaatcaagaatcttgttgatcttcttgcctctattggacattctatgtctactcaagaccacatagaagccatcttcaatggactatcaagtgaatacaatgtttttgtcacttctgtcaacacacggctggatgattacacagttgcagacattgaggcattgctaatggctcaagaagtcagattggacaaaaatgcagaagaccttgacatcgccaaaccagaagctaatgtggcccttaccaaaccttttacaggtggtagaggtacattctcatctccttactatccttcctctaattttcaatctcactctactatgttcagaggtgcccctggcacttattcccagcaacatccaccacctggctttagttcttctcagcagcattcacagtcacgaggaactgcttcaggccgtggacaaatgcaatcgaatagaggaggcaatgtacaaggccgtggtcattattcagcttggggacaaagagttcaatgtcaactatgtcacaagttgggtcacacagttcagaagtgcttctacagatttgataaatctttcacaggtcctgagacttttcaaggcttcaatggcagtgccaatcttgctgaatgttcccatttatatgcctctcctgaggtggttcaagacaacagttggtatcctgactctggagctactcaccatctcactcccaatgcccaaaatctgatgtattccactgaatatggaggagatcagcagattcacatgggtgatggctctagtctcaacatccaaaacattggtaaaaccttcatcctttctcctttccattcacaacaacttgtattaaataaccttttacatgttcctcacataaccaagaatctccttagtgtgtctcagtttgccaaagataattgtgtctattttgaatttcacccttctcattgttgtgtcaaagatcaggtcactttgaagaccttgttggttgggaagcttgatcaaggtctatacaaatttgactctcttcaacttcaaagtcttgctacatccaaaagaagtctcatgtcccaaaccgagtccaccactgatcttaggcaccacaataaagaacaatgtaataatacatttttaccaccaaaaaattctatattttctctttggcataatagactagggcaccccactgctcaaattgtacaaagtgctctttctacttgtaatatcaaaataagcaataaaactgatgctaatttttcagatctttgtgcttcttgctgcctaggaaaacaccataagttcccttttcccatttccactactgaatatactgagcctttacaattactgcactctgatttgtggggtccagcccctattgtttcatctagtggttataagtactacatcagttttatagatgcttattctagacacacatggatttatatgctgagaacaaagtgtgaggctttaccaacctttatcacctttaaggcacaagttgagttacaactaggctacaaaatcaaaaagcttcaaactgattggggaggggagtaccaagcctttaccaaccttttaaatgaccatgggatcattcacaaattatcttgcccacacactcatgaacaaaatggggtagctgaaagaaaacataggcatatagtggagagtggtttaacccttttagctcaagcatccttacctctaaaattttgggatgaggcatatcgcactgctgtatttctcatcaacagaatgcctacacccaaattaaatttcagtacacctttggagttactttttcatgtcaaacctgattatactatgttgagagtctttggatgcttgtgttacccaaatcttagaccttataatagaattaaattcaattataggtctacaccttgtgtttttcttggatatagtctttcccacaaaggctataaatgtcttacaaaggagggccggttatacatctcacgtgatgtactttttgatgaacacatattcccatataccttttccacatttcactctcccatgtcttctcatagtacatctgccatacctccttttccacaaaacactctctatagcacggtcaacaactcctctccacctaatgtcccattcaatgacaactcatctcaacccatgcctatctctcctactcccatttcacctactgttgctcttgtcccatcttcagcagcacccgtacctgatttggttgcaccaattcagcaaacaaatgttacagttggatcaccagcaagaccagtcacatctccacctactgctcctattcctacagcacctactaattcaaccaatgatgctacagctgcatcggtttccagcagtatacaagcagtacacaacaagcatcctatgtgtactagatcaaaggctggtattaggaagcccaaagtcttaatggcctcactttatccaaaaactgtgcgtgcagctatgcaaaatgaaaaatggcttaaagccatggatgatgaaagacttgctttacaaaagaataaaacttggattcttgttcatctccctgaaggcagagaacctataggttgcaagtgggtctacagaataaaggaagatgaagaaggcaatgtcattcaatacaaagcaaggttagtggccaaaggttatcatcaacaagaagggtatgatttcaatgaaacatttagtcctgttatcaagccagtaaccattcgaatagtgctcactattgctctcaccaaaggttggacagtaaggcaacttgatgtcaacaatgccttcttaaatggtgatttgcaagaagaaatttatatggttcagccacctggctttgtagatcccacggctccacacaaagtttgtaaacttcagaaggcaatctatggtctcaagcaggccccaagagcttggtttgacaaattatcatctgtcttactcactcttggctttacttcagcaaaatctgatcactctctttttgttaagatagattcctactgttgtttgtatgttcttatttatgtggatgacattttgataactggctctaatgatgctctagtttctgccttaattaccaggttacacaaatcctttgctctcaaagatctagggactttgaattattttcttgggatcaaggctcttccaactgcaaccggcctacttctttctcaaaagaagtatattcaggatttactttgcaaagctgaaatgcaaggtgccaaaactcatagttctcccatgaatagtggtctcaaattgtccacttatggtagtgatcctgtccttgaccctacttcatacaggtctattgttggtgctctacaatatgctactattactagacctgatattgcctttagtgtcaataaagtttgtcaattcatgcataatcctcttcaatctcattgggtggctgtgaaaaggattcttagatatttggctggtactcttgattatggtcttcacttgcataaagtccctaattttcatcttgaagcctattgtgatgctgattgggcggctgaccctgatgatagaagatcaacaactggcttttgtgttttctttggtggaaatttaatatcttggcagtccaagaaacaaccaaccatttctagatcttctacagaggctgaatttcgaagcctagctgcagtggtatctgaaataacttggctcaaatctttactcactgagcttcaaattcctacagccgctcctcccatg

SEQ ID NO: 16102 - DNA, 4638 bp, Cannabis sativa
  modified_base (4346)..(4363): a, c, t, g, unknown or other
  modified_base (4455)..(4458): a, c, t, g, unknown or other
ccgtccgatctcatcggcggcgaacggcgactccaccaccctcacgatcgagacttcggtccctttcacagcgcacaatatcgaagagccctcgcgctccgttgaaaccacgcccaaggagcttctcaccttcttccgcgacatggctctgatgcgccgaatggagatcgctgcagactcgctttataaggccaagttgatccgagggttttgccatctctacgacggacaggaggctgtcgccgtcggcatggaggccgcaatcaccaaaaaggacgccattatcactgcttaccgtgaccactgtatcttcctcggccgtggtgggacactcttggaggtgtttgctgagcttatgggtcgccaggccggttgctcaagaggaaaaggaggttcgatgcatttttacaaaaaagagtttggcttttatggcggtcacggcattgttggggctcaggtcccgcttggatgtgggttggctttcgcccagaagtattccaaggacgaagctgtgtcctttgctatgtacggtgatggtgcggccaatcaggggcagctcttcgaggcccttaacatctctgcgctttgggatctgccggccattttggtttgcgagaacaaccattgtaagcattgctcaagaattgtattttaagattggtctttcgtgggttagtttggttttgatttgggttctctttaatacagatggaatgggcactgccgagtggagagcagctaagagcccggcgtattacaagcgtggggactatgttcctggcttgaaggtgaggctagtaaattcgtgatcatctttttgttgattctgtattacgctgcattcaaattttattgtctttctgggttttgtccacacttttccagctgaaaagagttgttggaaattgaaattgcatatttagcaaagctacaatgcattgcatcactaaaaaataccacttgttgaaatggatttagttggaatagttggtggagaatgttggacggttgctactagttaaaatggagttagttgggatagaaacaaatttgtagcgcttgtttacttgttaaggccattcactttatttctgttgcccactagtttcaaagctacttttcttttttccattttccctctccgttatatccttttttttgcctcgttcattagtcatgcagtttaatagggagattatacgtgttttttattacaggttttttggttcgaataattttgctttatacaagttaaagcagttcttatgccctttatttgttgtgcaaatgcttgtccttttttttttttttaatttcaattgtgatgaggtgatatataggcttgaaaatatgctgtagcttgtatgggtccgcaaatcgtagctactcaactatttgctctagtaactggggtattcagtcaacgatacatgatctatattctcttttgaacaggttgatggcatggatgcccttgcggtgaaacaggcatgcaaattcgcgaaagagcacgctttgaagaacggaccaattgtgagttattgctagtgttctctaactttcttgcgaaagaaacatgtagtcgatactggatagtattatcagattatttaaaggatacaaaaaagaatttattgctccagtactattgctggcaactcaaaggtttccaaacacagaaaagctttgcggttgttctaggttgtttttcttcttatgttctgcagctgaaagtatagaatttagggacatttgcttgttttaaagtgcatgggtctagggttagtttcgggtcataattcattaaaatctgtagtattggttgggcaagtagattgttaatagttttttaatgaggagtgagtttaaccttaattattgtctatttaaataaatgttcaataatagttgattgataacatgaacatgcattagtaagtaacatgccatgaatgaaatcctacacaattattcattaatcattaaaaaacaatgaaaaccaaatttcaaaattcaaaattgaaatcaaaattcaaaattaatgatcatcttttaatcatcattatctaaataaaataaatcaaaactgtagttcctgcatgacttgttgtagataagtatgagactctggtttgagaaatggaatcgggtaacaaggtgtacgctacaacaataagaagaaaaactttataaaatatcataaaactcataatattcatatactaaattcataaaaggttgaagttctaatgaaaattcctaacttggaggaatggtaaaaatctaaatatataaagaagacattttcttagttccaacactagcttaggagctgccttgactttgagaaagagtgaagaaggagatagctcttcagggagacgaacagtgggagtggctgccgtgactctgttaagatttattgtgacttagaggcggaagggacgtcgtatgcctcgatggtttaagatttttaggctttcatttatctttcctattctatttattgaaaatctgttaataaaagactcaaactaaagcccattcaagtcatttaaaagcctaaaaatagctctgaaataaagcccaagggagcccacaatacaacagccctaacacacaaagccaagcccaaggctgaggtgtgtgtctcatacgcctcatcagtgtgcggcgtatgcctcaatagcaacagctgaggcgtagcctcatgtacatttttggaccacccctcgaatggatttgaaaacaatgatgagactatgcactggtaatttaagctcttatatgcagcaccatatagagtagaaaaatgacaaggaaattgtattttcttaagtatattggatccatgagatgatgtgagtaagagcttaatttgatgagttttctttgcagaattttgcactttacatatagaaaaatatagactatgctttgaaaaccaatctgaggatgtaaattgtgtgattcaattcaaatatttggaacatatttactgccattttaagtctatgctcctttggataaatgtttcaaagccacatgttatgtttattaaaaaatagaaagcaaaaaagatctcttaggcattgtatcttcatgtataaacctccaaacaatcccatacagagttgatgtaggttcttcacagtacaccccttctatagctgacatatccagaagaccactttgtggcggtccattctaggcttctccagttattcccctttctgcagctcaccacttctgtgggcctcctctttcataatgtgagtcccaatagaggatgcttctctaataccatttgattacttgtgagttcttttaaaaatttggaccattacttgtgagttctaagactagcgtatttgaggagggtgagcaagtgattataaacaaccaacagattctatatctagtcgatgtggaatgccaacacctttgcacttgaattttaccccatctggtcttgtcactctcccatttatttttgttatgcaagtatgtttaaatttttgtaaggttactccacatgtttgtgaagtttccttgtatagaaatactatgttctatttattctgtataatgtgaatctgaatgacttagaatatttgccttggtttcttttctagcgtcattggtactttgtgtctctcttggccttttcctctctatagaattttttggttaacctatgtaatatctttgtaattttgttcagattctcgaaatggatacttataggtaccatggtcattccatgtctgatcctggaagtacctatcgcacacgtgacgagatctctggtgtgagacaggttggtgcatgtacttttgagatttctctttaggagataacttcctttgtgtttgtttgtataatactgaagtgcttttctttattaatttttaggagcgtgatccaattgagaggataagaaagttgatattatctcatgatattgctactgagaaggatctcaaggtaagtaattcctttctctttttctgccctttatcatttcgctggaaattgtttgtttgttttttattcatttggaaaatgataatgataataatgataatagtaagaagaagaaagagtgaatttgattttttactccccaaactattatcactatcttattatgcccccacgaactttcacgttgttttaaatacttctgaactaggtgtttggtacgaggtgttcaaaataatttgattataggaaatattgtgaggtttttaaaataatttgactatagggaatattatgaaagagaatattatgctttaattgaattacactgtttggttgagtataggaatcttatatattannnnnnnnnnnnnnnnnnaaaatattttttttattatatctatttaatgttaattatacataaaataaaataattatttattaaagaagtatatttattaattagtaaannnnaaattttattgtatttttttattaattaaaactatatattttatcactatgttatatttaattaatataatggaatggaataattcaatcccacctcaacattttccttcccaagggtagttatattactaatagaataacattccaagcgtagtgttttatctaacgtgtctaaaagaa

SEQ ID NO: 16103 - DNA, 16825 bp, Cannabis sativa
  modified_base (14534)..(14537): a, c, t, g, unknown or other
  modified_base (14702)..(14715): a, c, t, g, unknown or other
ttttgaagtgaaaaaaaaaaaaaaaaaaaaaaaaaaaaaaccctaaaaatatttagctatctgcaacatctatagccattttgtctttgaattgtgatagttttacaaaaagaaatgttgacattgatttgaattttgaacatagtaatatttgctgaagtaattgctttgactaacaatataattaactccaaatacatatatttaaaacgattttatttcaaatcgaatttacatagttaaaaaagagttgaaatccaaataattgaattagggaatttcttatctcagaaaacataaaaagaaattaaaattaaaaacccaccccaccccaccccctccactcacactaataatacaaagccatgctgacatctgtatatgtatcacaatgaatgttatattaataagtaacctctcatctcaaggcttgcaataacttcaaccaggtagccaaacgaactaaccaaattcaatgcaaagagaaaaatggatatattatgccatactaaccgagattttccccacatatagattcatcgatatatagatctcttggttgagaagtaaactctttccattttcccaaagagatgaccacattgaatttaaaagcttatatacaaaacaataactgaaaagtcctatacagaaaaccgcactacataaaggtatagccagtagccacatcattctttccagcttttctgatttgtccacccacctccactccacagaattcatttctcaacaatactaattagtctattaggaaattaaatttaaataccacaatacattttcataaatatagagaaatagaagacatacctcttggcattagccacctcctttgcaacatcctagcaacatcaaagcaaacagatgaaaaggcaaacaagaataaagttccaatcttttccactacacagataacaagtaactatgtaatattaagctcgaaacaaaaactgaatatgctattcttaagtacctcaccttattttgcagaatctgatggtaagaaacagagtaacataggtgtcttgtatcattttcaggtgctaggatgcgaaacgccatcaaggaataacacgcatacacatacataagaactcaaaacaattcacaggaatgtagatataagcccaagaaatctaggcagcagttaaccgaaagcaaattttttgctcaatttttggagagcaaagtgaagaaattaattaaacttgaaaaatcaaggcaatgtcaaaatactttagacaatgaatgacaaatattctgtgagctcgttttcttgtccctaaaacagtcctacactgtacagattataatagtcataattataattataataataatataataaataaaaggtcaaaacaattagtatctcatctttggagactcaaggatccctgaataaaaactagggcctaaaccttccacccttggatgcacaaccttgatgaataagtgatgtctccataccattatataatgcgccaaaatgatgtacaaagcaacttgcgtcaacctcatcagtagttgaatttgtttttgccatttccaaaatctgccatagcccgctctaagcacatttgaagaagtcaccatattttgggcaacgtgcatgggagtgaaacatgtataatttactgggcaatgacaatgctattttcattcttcaattgcactttcatatcattaaaaacttatttggcagttcgaatcaagtaccaatcttgcatcaccgtgccaccaccaatgtgtgctgagatcatgccggtgcgaaatgcttcataatatctcagatgaaagcacgttggaatcagatgttaatcaatcattatggccatcacgattttacaattggcttcaaagccgccatgtgcctctcaatcaatctatccacaaatgcacggatctgcaagtgtaagatttccatgaaagcttagtaaacagcaagtattacaatagaatgatctgttcatcattactgagattcagacattctcaaacaatgacaaagatacagtttttcagagtgtagaataatgaaacattcacaaaataatactcttgaaatattttataaaaatttcaacacagctgccatttacctacattttgttttacattttgaaagtaccaacgcaatgtgaaatgactttctatatcaagttaaaaaaaaaagcctaataaacattgatgaccaaatggatttctgttttaaattaggaaacagtaacacaaaatgtgaaaaagagatctacggcttttaacaaacatatgttttgtgcaccttgttcctgcgcttgaaatcgagaaactcagaaacagccatggctttctctgcatctgtagctagctccataacctgaaagtcatattcatagggaaaaaaaaaagtgagagtcagctctaacctcttttaatattactagtatcacatcaaatcaaaccaaaaataaaaaaacatatatacagaaagtaacaaaccttagttgcacttttcttcataattgacttgtatccctctctatctatttttttagctttatacaggggcatgagtaatgacgcgacatagtccacaacagcctgttttatacggtctgcccctcgatgatgaccttttacggattccttgttaattgtaacctgtgaaacagagctctcgtttgctcgtccatcaaacttccacgagggttgttttgaactagcatttgaatcttcctcatccctgatatgcccagatggatcagagaaattggattctgctgctgctgctgctgcttgtgactgccatctctcaatggcatgataatccttaattcccacactaccagctgtgtcaacccatgcttttgtataaatactgctgtctgcagcagcactctcacctgagtgctctctcaagttcaattgagtagcaatctcatttgaatggcttcgctgagaaaggttatcagctgaaattcttgaattatcaaggttgacacaagtggcagagaaatcaacagaccaatcacgcaccctgcaattcctagagtctatttctgataaacaatcttgttttcccaaaacaccaccagaccatttcctcctaaaatcatattcatccatttgagcatattgttcacgtctagcaaatttgtgaaatgaaggaatcttgggaagctgcagcaatgaagtgctctttgcctctgacgatgtatacgcctaaaatggtcagcaattgtttcatgcaagaagacaacaaaacagagtgagatagttcatctaatataataaaaaaataagatagttcatgaaataatctacataacaattaaaaacagctctatgacaccaaaatatttcctttgaaaatctagttgtgcttcctttattaataggtaacatagctgcagctgcatccctatctattatgtatttcaccaagtaataataatgacaacttgaaaaataacaattcatttacaggtaccctttcacatagtgcagactgcagatgattatggtttttgtactaactaatcatattgtacctttcaccaacaccaatgaaaaataatttttggatgggcaaatgagaattacaataataatggaaaaacatatgcagaaattttgaagaattatagaaaaaactgtatttagttcagcatcactcaacatggctattacatggttcaaatactaccaaataaaaggaaattaaataaacatccatactaattttcaaaaaaactgcaaatgaaagcaaatctctcattgaagaatttttaaaaagaaaaaagatccaatggaaaacaaacctcaacagcagcaagcgctgcagcacgggctgcttctacagcagcaatagcagtcttttcttcttcagtcatgccagcagcagcatctacctcaacatgcaaactgcttgttgagccctgggaccttaatgaattggtttctggtttgaaggtagttgctaaaacctgaatgtttcctctgttctcagaggcaccatgatttgcgtgtagaggtggctttcctgaagctggatctttaataggttttctctttgaaaaatccacagtagttgcttgccttgataatttcaaaccaccattagaagctttttccttgcgaaagacttccagccatacactaaccagttgacttgctatggcacgtatatcacggctagtatgaacacaaaccttttcttttacagttttcccaatgcctacactcacataagaaacaagtggttacataatgaaaacagcacattaactatatcaccattgtaccttgcactcatgcacaaaaatattatttatacgtatcacaaacagactgcaaaagtctacatgtagaacatcctcaaatatctttaaacaaaggctgcagatgaagaatcaggaatacaaataacattttcaatcaagcttagctgcatatcaggaaggaaggagcagagagacacaaatataaataagcagattgaccaaaagtactctaaaacacataaaagttcaaattttaatcattaattacaaacacgtctacacatgtactaacaaaattaatatacaaccaggcaaatatgaatgcacgagataaaaagacaataccagataagcgcacagcaagtaagtctgttgaaacaagcacaagaagacgaacacagtgccgcaagagttgggtcccatccttccccatcgaatcctgtaataattacataattagtaccctcagaaaccgtgtgcataaaataaagatcaaatgccgtgaacagaaaatagcacccagacacataactgacttgatgagtgagctggaaaataatacatacatatatatataaatatagatatataatattatataaacaaaacactagaagaagcaaggtaccagtatccatgagttgagagtattcaacccttctttggtgccagcaaaggacttcaagattggaacaggaagattcaagaactctttcacaagatgcaaccgtccagcattagtttttgtcttaaagaacatatcctttagaagagcttccttggtcaaaatttcagctccatccaaagagtccttataaagtacattggacaattcaactgcatcaagtctccttgctaggtctctcacttcatccctttcagagtctgattgtctttgtaatgcctccattgcctctacttctgctgtgtaatcatttccagtagtcaatatatcaattatacgaactgcttcacgaagcccactcatcatagcaccaccaactgtgtcagggtgctccttgcaagtagcttcaccagcaaaaaataagcaattctcaacgggcctgcctaatatatcataatcttctccagaagctccaacagcaacatatgagtaggcaccgtagctgaaaggatcctgaccccaatctgtcacaacagatgcaattggatcaggtactgattcctccccaaataatttccgaagaactactactgcatgttttacatggtcagaagagctcatattttgaccatctatggctgccttaccaaccactagtgctataagaacaggagccccaactgttttcctgatattccagaacataaagcactggcctctctgatttgtttcctcagcagttgctccaaagtaatccacagaatcatcccaaaacacatcaggaaattctagaactactttattaagaactccaaatccaagccgctggacagaagaatgcttccactggggtaacggtggggagaactttattgtctctgcttttaaacaaccaagtggcactgtaaccaagactgcatcaccagaaaactcaccatcatttgatgtagaaactttgactttgccatactggccatctaaaactccagaagcctttgtactatatgaaacatccgtcacaacatggttcaggtgtatcgaaagtccttctccaagagactcaaccacagtgctgtaaccccctttgatcatacaatgagctcctccaaagccaccataaacatcatcctggttccagtagggaagagagacattcttaagcaaagcagcacacccatactccaagttggcaaaatgccaatccataacccttctctcaagaggactcaaaagctcttcatcaaaagaatctttccggggaacttcgccatcaatacttgtcttggactctacaaaaccatccatgtcaaagtgctgtttcttctcttccacattcaccccaaatcgtgccctacgacgcctttcaagagcatattctaaaccctcctcaagagacattttcatagcatgttctcccttttgtgcaacaagcaatatcatatcatctagaaggctgttgaactcagcttctaaagcttcatccagatctgattgaactttttgtgattgaacaatgtcatagagggggcaatcactgtttaatatggtcaactcaaggcccaactgggcacaaaccaatgacgatggatctggtcttctttcagtggcaacatcagcctcaacaccagtaataatactagcaccaagatccacaggaactgatagagatgaccgatctgtataaacacggcctcctattctattcctagcttccagtacagtgacagagaacccttgacgttgcaagtggcgtgcagcagtcaacccagcaggaccagctcctatgacaataattttctttccaacgtttgtatgacaccgtggataaagattctccttggcatcatcattaaacgcagcttgaataggggatgactctttttctacatccagagtcacaatagggactttaccaacttccaatgtttcacatgatatttctgtacttccaacatctatattaatcagtctatcaggtaatttggcattaatgctgcttttttcagtaagatcagcaacacacccttcagattctatagcatttgctgattcagttgtcagctttggaacacactcactacctttcatggcttcatgtgtcgggttttcattatttaaaataactccattttttgcttcaattaaagttttagagctcttaacctgaccagtaataaaggaaactccatcctctgaatcagcaactgaaacaccagaactttcctcaaaaggctttcctctaagaagtttatagttatgctcagtcccagattcttctttggccttctcggaagcaattccaaaatttatataaccctgttcaaaaaatttaattaaagtaaattcttaatgcaatgtaagctgaatagaaaagataaccattatggtcaacaactgagactttacaaacttacactctgatcaagaaacgcataaatctccctaatcagggaagcacgtggtggttcatttgaagaagcagtttctgtaactccacattcagaaagaggcaaaagtcgactgacatctttattccagagacctaaaatttgattcctgtgtaggatcaatcaatgagactagcacttagaatgtagttttctttcagatgcataacacagcagaagactggtacaaataaaagggaaaattcagcatgcctccagcacttttgtttgaaagtgataagacttcacatcataaacatataacatacattcccttgtaaagtagtatttcaattcaaaaaggaaagtaaagacaccaaacaatacactcgatatctaccatgtaaagacatttgcattagtaaggcataacagaaaaatccaaagtggtatcattaatgaattggtactggagagaaaagtctaacatggcatcattaatgaatcgtatagacatatcaaaagaacactcttttagaaccagatccagtatagaaattactaacctgcattccaagtagtcctgaaggccgcctctgcgcttcaagatctccttaaattttatcttctcaacagggccgactgcacgaactttaagccccacagatacagctgctgcaccatcaccttcaacctcaatcccaacacttgaagacctgtcaattttcactctcatacggtccccatccagagaagattgactttcaagaaaacactgatcatccattagaatatcccaatcagcatccccctcgtaagccatgtcaggcctgcgctttttaggcttgcgcaaacgataggcagctgatagcttaccatctcttttgtcaatgtcaggtaaggatactgcatcttctaggtaactttcattttcatccggagccacagattgaggagatgcttcacgagtctcttcaccaatcaaattacaatcttcgcttttcagacaagttcctttatgttcttcaagattttgacctacatcagaaccacacttgtgtgctccaggagaagtggccagaatttgagacatctcaacatcacatgttacttcattttcctttcgtggagtaccattacaatcaatgcaatcttcttccttcttttttgaattagaggcagtacaagacacaagtcgttgaacatgctgagaatcctttagagattgatcagaatcaagctcctcttgacaatctaatacttccgacgtctttaaatggccatgcaacgaattagaggatagaagtccggaaggcagcgctacagtggtttctccggatactattttttccaccttagagttattttgaaatccattcttcagtaagttatcatcacaatgaggtggtgaagtttctttagcaacaaaagaagacaaaatttcacagtttgcaatggccatgttttcagtaccactacacatcagttcatcctcggaattgcaagtttccaaggcaacattttgtgcaggagatacaagttgaacgctagtacactgcttgctatctctgtcagaaactttatttgagctacaaggatccaccataagttcatcttgatccattgaacggcaatccagcggatcatcataaatcacttttgaacgagaagctttatcctctgaactaaatctggaaagcctactttgttttctgttgttggtctcataattctcttttggaccagaaaccgggcgaaactttctcaataaaccagattgcaccttaaggaaaagtgatgataatgagtcttccatattatcatctgaatgctgactagtaccttcctctaacaccatgcctgaaacattcttgtccttcaaaactgaacacccagatcccgtagaatccaaaccaccatcatttgtccttgcagctgatttaatcttgggtctcttcacctttcctttaggcttatcctctaccccgatttccatagtcatatcagatcccccatcagccaccaatgaaccattcgccgcagcttttgataacagttttgcatctgaaccaccatcatcctcgatgattctggcggagggtggatccaaagattcaaccacagccgaagcagaactccttcccctcaatgctgcagcaacaatatctttcttaggggctttcaacttcttcctgaaactcgccaaagtatcattcattccccccaaatcctcatcttcaacctctacattcttcacccttacagcaaccctctctaatccctgcttcagctttttagggtttcgttgtttcttcaacttcaacaaagacccaatgggctcgtcatcatccgaatcaagaccaacttccatttgtttcgatcttttcttccaaacagaccttttctcctccccgtccatttttgtcagccctatctttccaataaatgttcttaaaaaaccaaaaaataaacgaagacaaaatcacccctttttgtaaccctaccctagcttcagtgcccacaccaacaaacaacgatctcgagcacgaatcattaccttcagtttatccaaattcaataaaataaagctcatgcttatgatttaacacaaaagctaccaatatagcgaaaaacaaaaacaaaattgaagcttgaagttgaaatccacgacctattatttatgcacatatatataataaaatgcaaatataaaatataacactctcaataactagctccacaatccacatatcagaaatatactccctctactgaaaccaaattattatagatatataaaaacaaatactgataataataataataataaactttgaagaaataagaaagccaaaaacaggcctagggtttttcagagagtgagtaagccctaatgaatgagaaagagaaagacacaaatgggatttggaattgggatgggtatagggatagggatgtcggacctgtaagagtttggagctctgattgagcaacgttaatggattttgtccaggagagtgagatgcgtacgttagcgtccaatcgtggaattggtaagatcgactctataaaactgcgccgcttctagtagtgggagagtacgcaatcgtaataatatcaaaaacaaaataaataaataaataaaacaaatatgtaataaataaaatagtaataataattagaagaagagagaaaaataggaataggaaattataaaaagagcaaacgaacaaaatcgaatcggagtggggcgtttgtgtgcgcgcgccacaatggagagcttaccaatttagtcgaattatgaattggtcattacaaaagtctatgttttgttttcgagctttggaatttactaatcttcacttatattttttatttaaaaacaacctcatgttttttgggttgtatcttatctcaaaatactaaatccatattaattttagagatagttgctttaaaagtgtttaaattaaattattaagtttgtagtacttaaatatttaaattaatcaatttagcaatttagttaacaaaatatattttagtttaatttagttatttaatgtatattaaatattgtcttttatattgatttttttttttttttttgacattgggaaaagaagattcgaacttgaactttctttttatgagaaatatgaaattactaggctaaatatatgaacacatcttttaaattgatttgaatgaaagatcttagtttattttgtttattttcataaggagaaaatatttctttcatggaaataaaagatataaaggtatagtcaaattcccttcttatttggttcaattattgttatagcaaaatcatgttgtttttatgacaagattcatagctagtttcgtgggcgtgaacttatatggaaacaaagaaaagtttttatactgttgtacaaatgtgtataagctatctctagagtttttataatgtataaatagaatttagagatcaacctcttctcttatctcttctagtatttcattttcatatcttagttttgtaagaagagtgtttctttcgtaaaaatctaaagtattttgataggtttttgtgtctttgttattgttcacttgttgttcatagaataagttaaagataagctttgaacaagtgtaggtctttaggagaagatttttctaaactcatttcaggaggaagtgagtacatatctttgaaaaaaggtttttttgagactcacttcgagaggaagtgagcacacgtcaaaggggttgaagggatttcactatttgatgtgtttcggaaatcgaattagtaaggtgtatacaaagggttgcgacaaatcattagagggagtctaaatttatttaggtcaattacttttgtaatctttgatactttaataattgatatcattctctacataatttatctttacaatcattttgttgctgaaagtattatttctatgtgagcaagtaaccaatttgttattgcaattgcaagtttttacaataacattacattaattattattgtagaagtaaaatgttttttttgcaaaacacttgctttcatattctttaacaacaaaaatattaaaattaagggccagtcgtcacttgacttttgaatagcttatcattcttatcaatcctatgcttatcaaaaagtggctaatgaaatttaagactttggaggacctttttatggggtgaaaaaggaaatttgagcaaaatgcatcttgcttcttaagacttaacatgtaagtcgagaaagcatggaataaggcagcagtggctatttgggcatttaccttgagacaatatgttttatgggtcaaatgagttagttgtatctacttaaaggattaaaatatttggtctcgtgagttacaattgaatgtgagttgatattagagaaaactcatgagactaataaaaactttttcccaatctgagatcatgaaggctgaaaaagtggaaaaattcaaattgagtaaatgtgtgaaagcttcttgactgataacacattagttacttatgggaaggttgtctggtgcaaattttcagctccaatttctcacttcattgtttgacaagtatacactaatttttttaccagagacaatcttattagaaagaatgtgtttgatgagatagacatggtatattgttattcccattttttcctgtcttgccctttttttttttttttggtgagttacctttggcccagcaactttaaggagatgaagcattcggtgagtattgataggcctataagtcttgtggctgatattttttatgcagctgtggcaggtgctatctatggcatttagacaaaaattttgagagaaaatgtttgtctccacaatgtatagacagattagttaaatagagtatcaagatacgtgtgagttttgtaaatgagaataaattaacacaaaaagatagatatgctctgaattttgtaaaatgattgtaagttgaaggtactgataatgtttgggtatgctcctatgtaaattgtaaatagtttgtctgattaatgatattttatttcttcataaaaataaatattaaaattattattagtagcacttaagtatttaatttttattttattttttcaacaaaaatactttaattattagttattttttttctttagtaaaagtacccaaagttatacgactatttgataccatgtacagacttaagtatcaaaaaaaattaagtttataaacataataatttagctatttttgttgctaaaaataattttgatacgctaaagataacttgaatacttaagtcgtacaaacataataacttaggtacttttgtcacaaatatccctataatttataattcaaatgctttgaaaaatttgttgattgtaaaatacactactactaaaaaaaaaaaaaaaaaaaaacctcttccatgtccattaaaattggacatcataagtatttgcttaccattttgtattggacatgatcatttccatgggcattaaaaagtatatatatagggtttttatactatatactgaaattttttaacttttttatttttttgttgtggggcggaactttttcaaaaaaatactgtgttttttcttttaaaaatattatgtaagttttatattatgtactgtgttaaattttcattattatttcacagttgttttttagttattccactgttgtttaattgttctgttttgtttttttatggttgttttataaaaagacaatatttttgtaaaaaaaattctgtgtgacagcaaaattgtaaatttttatccaaaattcagtattttttgtaaaaactccaatatatatttattaggttaatattatgtgcaaatgcacgtatatttaattatattctttatttttattttggttaggtacatttttagttgtataattagttttttttttctattattcaataaacaacattattttttattaaaaaaatttaatttaagggctatttataaaagaaaaatgcaataatattcaaaatctgttgtaaattataattttagtttaaccataatactttttatttttcaaaaaaaatatatcacactttttgtgacttaaaagaaaaatacaataatattcaaaaattattgttaattataaaatcacttacaatgttattttgaaagccaacatttaaaacggagtgaaaaaactatttctaatattaaaatgatttataaagcttttcatgtgtactgttttttttttttttgaaattaaacacaataattagagattaatacaacaataagaaataatagaaaattaaatatccaagccattttactatttatcctgaatgtatatacaactaattcataacatcatgagataaggatgtgtatcgcttttaaatcaatgcaaaaggcgcaaattattttagcccaatagttgaatcaatgtactcatattcgacaaaattattctagaaaaacaattcatgtaccatttttgtaaaagaggaaaaaaattcaaaagtgtcaattgcacaaagatagttttaagggtaaatactatattttgaatcttgtattttgtaaaagttactaattggaccttctttactaattggaccttctgtctaattggaccttctgttttgtttggaccttctgttttgtttaatgataaaatagaccttatattttctaaaattgtacaaatatgatcctgaactgattttttgtcnnnntaaaacttaataataatctgatctagaaatgttatgacaaaactggtgacattttttgtatctgtttgtgttagaaattatcttaaagatggttatattaaaaaataaaattgttgaaaattaagctcagagttctatttttacaattttagaaaatatagggtnnnnnnnnnnnnnnaacaaaatagatggtctaattgataaattttacaaaatacaaggtctaaaataatatttaccctaattttaatttcaagaaacacaatctcttgaggacttttgcaaagtaaaattaaagatagagaagtaaaaggaagctcattttgaatttttaaattgaaaatgcatgtggttatacttctaggaatacctagatttttatctttattttgattttacaaatactatttttcaaaaataaataaggtctttaaatcgataaaatctttttacatagtttctaaaattttgaaatcaattgttattttattcttataaacaccatgaattattgtgtcacatgttaaagtggttttggatagaaacaaaaatagtagacattggcactgttttagtaatatttttatttctatatatataaaaaattattagccataaagtataaccttaaaaaagaaaatatgtcataaatatctaaaaagtaaacaagtaaaattgactcactaacaacttattatttacataaatattaaagggcatcgcgcagtaccatgtgttatattgctactgccagagctacaagaaaaatgagatttagcgtcgctttttagtgtaatgtttccttggcataagcatcgatgctcattagcgtcaatttaacgtcttaaattacacattataatatataaacgtttaaataaaaaaaatacttgacgctaatatcacaactgacgctaaatatacttagcaattgtcgccaatgaagttagtgtagggtaataaccattgctaatgaggttttaacgtcggcttaaaacattacaagataatgagattttaacgtaggcttaaaacattacaagctaatgaggttttagcatcattcataaatatacttggaaattgtcgctaatgaggttagtgaattatgatacttttatgttttatgtccaataatacgaataaaaattatttgtcccctattctctatctcttctctgtcgcaacaatcacaacacgtgtctatttgtttagaaactcacgtgatgtactttcagctccatgtattttttcgtttggttttcattttgtaaaataattaagcaagtattgtgtctcaaatgtctctgttagtaacattttttaccgtacttgtcaaacaattagagttttttggttttaattttgtgtacaacaactaataaatgtattaaattttcaatgaaaaacttcatccctcttcgttcttcttctcctgtgagaatttgaggataagataaatgaggttccatcccaaaactaattggcaatgggaggagtagcccattcctcttatatattctattttctttccacacattggcaatgtgagactctctagcatctccctccatgaatataactctataaaaaaaatcactttctataccacctataaagatctcaaagatcaaattgctatttttggtcttggtaacttagctcgaatgctcataatttttttttctttttctgtcatcaacggtaaaaaaatttcttactaaattaagtgcgaatagttataccattacctcctcacccactcccactgcttatcgtccttaatttagaaattaggaaaatataaactatcacatggcaccaataaaatattatttagtaatgtatgcattgaatcattatgtatgtgtaaattaagtttccattacttaatattatttagccatggagcagttactcagctcatgacccctcactgcaacaacaatagctgctactaacaaaagaaaataaggaaaagaaatgagaagagacaaggctgtaaaaaagtattcaatttagctacaagacaagtttcctttactttttttttaagctgttcaaaaagagcacacgttgatttttctatagagagatagatatataaaattaaggccatacattattacattgaagtagtaaataggatacatactataccttgcaaaatgaaaaagaggatatatactttattatttacagatggactttttttttttttgaaaagatttacagatggatttagtggaacaaatattacctactaatctactatatatatatatata

SEQ ID NO: 16104 - DNA, 6018 bp, Cannabis sativa
aattggtaacttttgcaaaacagaagatccaaaatggtatttaccctaaaaaaaaattcattaaaaaaaaaatccaacttaatttttttccccgaattgggttgagacgagccggtaaaaggtaggcatacgttattaatttggaaccatatatagcagtagtacacaattacacatgcagataacactgacataaaagcaaaagtagtactaaaaacagccatactaaatatagcatgacgaaaatataataaaggaaaagataagtattacacaatatatagctagctagaaactaagcattattattactgaaaacattattaaagtagttaattataataagtaaataagtaccatatttcttgactgtgagatcgagaaaagggaaaatccgaggattgacgtcgtctgagagattgatgggtttggaagtggcttctttgatcaatttagagctttccttcaggtctccaaacagaaacctgtaaggattccctttaaagccttgttttctaaggcctttttcaagccttttgggcctcaaccatgcccaatccacaaccctccaaatccatgtcacacctattagtataccaactaagctagcacacagtgaaaggattgatgatgagacctccatttttttttttttttttctttggtatagtaggagttgaggtagaaaataatgggtatttataagagtaaaaactaaaagggtataactacactattggttgctgtttattagtgagtggttggagaaacagtagagaaagagtgtaatgagagcctataatcttttattcatctagaagaaccgaagccttgagtcatgcggctttgatttgttaataatgatatgtcgaagaaaacgacacatgagatgagatgagcgtgtgagtgaaaaatgagatggaagatagaaacgacacagattttcataatacgttgccacgtggcctcaatttgcaatacatacttgaggcctacgtaacaggacaggtccactaattaatctcattcgttgaattgtccatatgaaatatttgtaaataagactaaaattgatgtagtattattgatacgtctattatcagagtgttaattaaattgatagctaattataaaaaaaaatagtctttttttaaatttatggcatgaggaacgatgaatgcgatcaaaattgaataaattaagtattaaaattctagaaaaaaaaaaaattaatgcaacaaatataactgtagtgatacatatttggtcataataactgatttagaatgtaactgatttagaatgattaagaacttgatatttatttcttacaagtctacattttatgaatttgtaaattgaatttaagagtattagttttatggaatttgaattataaattagggttgaattgatatttcataccaatttttttacaatttaactctctgtcaattatacttttcgtgacgtcgtcaaaattaaaacttaggtgtgggtcagagtttggaggtaattggagtgagggatagggttgggggtagatctcgaagatgcccatgggttccactttggagttttcgcattgtctactaatgcggaagtggaatcaagatctcctagtgtcgagatactgtgttaaaccaatctaagtttgatacgtcaactaattttttatttattaaaaaattaaccatctatatatacaattttttttccttaaaatgctcaaattaattgatgggttataatgagattagtttaatacactgttaacagaagatcttgattcgcggcaatgacctcgaggagacattttggtggttttggggggtatgcaaatgatgtggcatatgcataagtctattactagtttgataggagttcgtatttgcacagacatttgtcctaaattcttaagtgttcatataacaattaatttgatttaatatattaccacatatttcttaaaaaaataaataaaattaaaaaaaaactataaaaatttatataaaattattatattcaaaatattttttttttgaaaaggtatattcaatatactttgattaacacattatcatttcaaccaatttatgtgttataaattccaaattataactaatttaataaagataaatatatatgattataaattataattctattgaaataaaccaattaatttatattattgatcactcttacgtcaacaatattcacaagtaaaatctgatgagcttccttatcaaaaaaaaaaaaataaataaataaataaaatctgatgagcgaagctgatccatacttggcaggaccctcatcatctaattagatatgattactgcaggaacccaatttcagtttttcctctccatatagtcaacagtacaactatgacatgcacatttaatatagaagatattttatggtgtgataaatgtaattatggatgattaacgattttttatattatttattattaaattaaaatatataaaatttaagattaatttatactaataataatatgtaatattttatggtgtttgacacgatactgccttagcatttctcttaatatatatgtacgtacttctaatatatagtaaggaaataaattcacaagtcaatatgtatgactagaccatgtcggagggttaaaaagctttagcttagtgtggattcagtgtacacttaacaaatattacatcatttgttgtatatactttctgctacattaattaattacgtttatatatgtagaattaggtgagcacaatattttggctacagggaataaattatgtaaattatttttaatttttaattttttattattttttttatttgttatctaaacttttctaaatcacttttttatcctatatataaaaagttaaaaactaagcgaaacaagtatgcagaacgaaatttataaattattattattattattattattattttatatggaagagttattcaatattttactaaaagaaagctctattagtatgaattaataatgtgccaacttaagtcaaatttactttgcttaaaaaaaaaggttaagtaaaatttaaaacaagtgaggtaatctatgacgcgtgtgaggaatgctaattgggtattttaccctttaacctaactttgaatatggtgtaaatacataaatatagtatatattaagagtgtgctccattccaaaaaaaaaaaaaatagtgtgcttccgagttggaaataaaaatataatttagatatgagtcatatgactaacttattttgtctttttccttaaaaaaaaaaaaaaacttattttgtctttatatagttatagttaaggagagcatgttaattgttccaggtataatattatttttagtctattttaatattaaattgtatattataattaatgtcagtggatataagttgcattatctcatctactcattttttttacttatttctgtaatttttttatttaaattttattttaaatcatatatttaataaaaattattaattaaaattttgattgttagataataatttagatactttttttttaagtggtactaaatagtatcttaggtttaatttttatgaaataaaacataatataataatttaactgatattatgaccaggctaatttattattatttttttgtactaaaatttagtatcagattagttatattaaaagaaaattgataaaaaattaagctccaagatattattttgtaccaattttaaaatataatacatgatttattatttaacaaaaagtaaaaaatccaattaattattttacaaaacacaatgtcaaaatgatcaatatttggtggaagcaatattagctaaagctagctattcacggtcggaacatgtaccaaaagaaaagcataatttaaaagtttgatcataaatattttaattgaaaccatatcatatatagcaagatgatgaggtggtgtggctgaaaagtctatgaaaaaaaagaagaagatcaaactgattaaattgccaaaatttaaattatctttcatattaaaatatgaaaggtaaaatatataacaataaacaaattaaacggacaaaaatggaaaaatgatgcaggttggaagagctagtatagatacttagtgttcgtgtaagttttaccaacaaatcatgatctttcatttccaagttggcataaacaaaagggattgactaattgaaggtgaaaaaagataatactactataaaattggactttaaagatggtttttaaagtttttcagtgtcaattttggcaaaattcgttactatacactattctaaacgatgttataagagtaaaaaacaaccgatagcatacgaaccctttgcgtactaaactaatctaaaattatgtttttcttttcaatcattttaataaatatgcaattttaaaaaagaattgaaataaaaaatttaccttttcacataatatgtttagttatataacatataataaatatgataaatagtttaagaaattcatcacacaaaataatcaaaaaactatacatatatgagttctcaaacatacacaatattcacctagttacaatgttaattacgtttatgtataattaagtgagcaccatattgtggctgaagggtaataacagttgcaggagcatgagcataagagggtgaaagttcaaaagtaaagcgttgtagaatcaaggccatggccattttggcttcattcaaagcaaaattttggcctatgcaaattcgaggcccccaaccaaaggggaaaaaggaaacttggcccttggtggccttagaaactccttctgcaaacttctctggcttgaactctttggcatcttctccccataactcggtatcatagtgaacaaggatagttggtaataacacttgtactcctgctggtaatgtcaaattcccaagttgtgtctgcttgtgcactcttcgagccagagaaattacaggcggataaagccttagaacttcgtacaaaatcatagtaacctacatatatttatatccatgtaaagatatatatcataacaaaataagtaacatatgtatacctatattaaatatatgagcactggtattaggtactagtagtacctaaaactatgtagatgtaacattttgtgattgattagcactatcccataaaattttttatataaaattatatgagactcgataatacttaattgtaccaataataatattacaccttaaaaattaataaacaccactcacagagggagaatatataagatgaaagagcaaaattgtaaagaaattaatttgggactaattatcaatcataactatataaatggcttaacactctactatgttgagaatcatgaggttctatcttaaaattaattggtcatgagtggagtagcctatattcttatatatagcttaatactttaccatttattctatgtgagacaatgtccgagcctttacatttctctaaatatatatatatatatatatacatatatatatctgtacttacaactttgaggtgtgctagtccatcaaaatccggactgttatcaccaaagacttgcaaaacctcgtctctagcccgagcttgccaatgaggaaacctacttaacatgatcatggtccaattgagtaagacagaggtggtctcttggccagcaaagtaaaacaacttacattcctcaattacatctttaatactcattccaacattcttgttgttcccatgttctttaatttctttgaaattggactccattagtatgcctaacaagtcatcgttgggagcttctccggctttcattgccttctctcttttattgatcaattcctttaaaagagtttgcacttgacagtcaatttgttgcatcctcctgttcaacttagttggcacaaatctgcatatataaaaaagagttcgttgtttgtattttataattaatgataacaatgaaaatatatattgattaatgttgcacc

SEQ ID NO: 16105 - DNA, 2606 bp, Cannabis sativa
  modified_base (2486)..(2490): a, c, t, g, unknown or other
gaacaagtttgctgggtattcgagagacccagctctctcccaagagctacaagctcacttaactaaatcattcacagtaggaatttcctatcaatttagtataacagtagcaattataagaaaataatgagttgtatattgatatagaagaggataacaatgttgctgggtattcgagagacccagctctctcccaagagctaaaagctcatttaactaaaatcattcactttccaaaacccttctattactctcctatttatacaatctcaatactctaattacaattacctaattaccctctttatttattaccctaaggcctaccagattcctatattctaattctttcaaaaactggataggatctaatgtgagtgagtcttcaacttttaaatgagataagttgcttgagctttacctgtaggacttgtttttattctcttaggagactgagcactaggagatgttacccctgaattgtcacaagggtagatatcatccaagatttcaatgctgtcatcatcatcatcaataacttccttctttggaatttggagtttctcatcattgttagacttatcaaaatgagcagggaaagaggaatagtctatctccatagtagttgtatcaaatatggcaacataaagttcagaattcccatcatatctaaaagttagcacataacctctacctatggagtaatgcttcataaattctgagaaacccttttgtaaccaaaacttcccactacaattttctatcttcatttgccattttgaaccacatggaagcttgatataaaccgtttcggttaaagtttctccacatttcttcacaaaataatgaggaatcccctgaaaaaaaaagggcaaaattatttcaaaaatacatctgcactatcatttcactttcttcattctactaaaaccattacaaaaagagtaaaactctcttctacacaaatttacaagtatgatcaaagtggccaatcatttttttgacaaaataaccccttttgtttctacaaaacaaaatttcaactacttgaacaactcccaagtagtactagtgataacattcaatgttcatcaatttattaatgttgagttaaaacttaaaaccacctataatgttgcatgtgaaaaaagcataacaaattaagggttattatcatgtacattattctaagaaattgagggcttacaagtttattctcttcaagagtgtctctcaaaattatcttgtaaaagtgtgaactttttgataaaaatatgggcttttcactctcttccgaagggtcacttggcatttttctttcagagcttcaaaaatcaaaatctttgggttgagaagaaaaaaatccaaaccccagtgctcaaatcagtcgagacagactctcctttcagatgattacaatgaccccatgatcaaagctttagaagaaaaaaaaaacaaaattaaatattaaattagtaaagtttaatggaaaaggaaattactttgagagtaaaataaaatagtgtaattaccaggtatcccatttgcagagatgaagcattacgaggaaaagaacgtcatttgtttacggtaaatgacgaacaggggaagttgtgttggaattttgtcgtttggtaaaagacttgaaagaatagtgaaaagtgggtttggtgtcagacattttaggtttcgatattcactaaaatccattttctttttctttttttcatttttttggggagtgggaaagatgtatgaattaatgtaccaagttattttcggaattgatgtataaaggtgattgggttgtaataaaaaaaaaaagttgttgagaattaagtatataaaaacttacataaatgactaaaaatttaaaaaaaacaaattaaaaaatttattgttttaaatttttatatttacaaaaaatacatttttttttagtatggttactttatcattgcattatagttatgatgatttttttttttgttattttataatttatttattgttaatttatagttgttggaagaatcttatttttttttttactttttaaataaagtatatttttataatttttaaattttacaaatatatttttataaataaaaacttttaagttgcaaacgtgtaaataaaatataaaaaaaatagtattttttaaaattcctcaattatatatttttgttaatggaaaaaaatgtgatttaaggaaattaaaaaattaagagtaatttgcggcaacaccctccaaactatcaatttactagcaaaaaaccatccaacctcatatttttgtgggaaaaccctccaaagtacagtttcgtttacatttttaaggtgtcgtctgtccaacctcgttaagtcttaattttgcccacgtggcaatgacaggtcactaaaaaattatcccacgtggccatattttacaaaatcaaaataaaaaatttagagtaatttgcggcaaaaccccccaactatcnnnnnacttgcaaaaaaccatccaaaatatttattttgattttgtaaaatacggccacgtgggataattttttagtgacctgtcattgccacgtggacaaaattaagacttaacgaggctg

SEQ ID NO: 16106 - DNA, 8525 bp, Cannabis sativa
  modified_base (1385)..(1391): a, c, t, g, unknown or other
  modified_base (8453)..(8465): a, c, t, g, unknown or other
aatcagattagattgaaatgggttttatttagggcataaaatcccaacaatactctagttcctgctcgagtattggtgctatgcattcctatgtgtcaagtagagtgattagaaatttaaataagcctagtgacattttacctaatgcttttggtaccttactggaaactagagaatcggttatctgcagcaggtgggttacgtcccttccaatacacgtggaacgtagagaattgtcagtagatttaattgaattgaatctagaatattttgatgttgcaatgagaatgagctggctagcaaagtataacgcaaccattgattgtaagaggaagatggtaacttttcaatctgagggtgaggacccatttgtgtttgtgggaagggttcaaggatcttaaattgcaatagtctcagcgctcagggtaggagatttgttgtgggatggatgtgtcggctatttagccagtgtagtggatatcacgagagaagtaccaatacgatgtgaatatgttccagtggtacgagggttaccactaaagcgagagattggctttgaaatcgaattaatactaggggaagaacctgtatctaaagcttcgtatcggatggcatctgtagaattaaaagaattgaaggttcagttacatggtatgttggattttcaattcactcgaccgagtacctaaccttcgggtgcacctattttattcacaatgaagaatgacataacattaaggatgtgtattaattactgggagttgagtaagttgacgatgaagaacaagtatcctttgccgatgacagacaatttgtttgatcaactttagggaaatactgtcttctctaagatcaatcttcaatctagttatcacaagttgaggattcgagaggaggatattcccaagacagcttttcatacccagtatgggcactatgaattcctggtgatgtcctttggattaactaatgctccatggacatttatggaccttatgaactgagtattcaataatttttagataatttagcaattgtattcattgatgatattctgatgttctctgactcaaaataggaacatgagaaacatcttcaaatggtgttacaacgtcttggggagcatggactctatgctaagtttaagaaatatgagttctggctgccccaagtaagtttcttatggcatgttgttaacaagaatggcattctagtggacccaacgatgattgaggcagtttgagattgacctcgacccaagtgtaatatcttagaaattaatatagtatttaattgggcatattttattaaatatgtaattattttagtaatgaaataagattatgatcttactagggtaattagtgaggatttattaaatgatnnnnnnnagcgtaatttattaattacgaagattatattgagatatgttggtatcgaggatacaatttttgaaataaaaaaaatattttttgggcccagcgactgtggaaacttgacgatgtggtcagtattatcacgacattaatggatggattattttgaggatattccggactagtttagaatttcagaatgtcgatttgatggattagtaaaattaccctaatgcccctaagttatttttaagtttaatttttgcatgaggggtagattagtctttttttaaataggtattttgacttttaagtcttatgggctgactattaaattaaataaaaaaaagagaaaaaaaagaaacctatatatgagataacttatgaaacaaggaaaccaaaagcttcattctcttcttcccctttgtgcaagccaaaccagccagctttgaggattttcttcagcctttttccttcatttcaaagctgattcgtgccccaagtcaacctagaagagctttgaggtaagctctttacctttttggattgaaaactctaggttttgagttggttttgaggtaagttttgcttttctgtggctgtaagaattaaactaggattggggtatgttgagggtaggtttttgagtatgttggagatggttttaagtggtttctatggctgcttgaatcgagtttggtttgttgaagccaaagttgagttttcttcacttcattgtgtgattttgattaaatgattgaattgttgtgttttgaagcttgggatatgttgtattatagttagtatactattttggaaagtttggttaggtttggaggagatttgggttgaaattataggagagaacccaagaattcttatttgccagaaccggtcgaccagttgccctgcaaggagaattcccaggttttcttcaggtttagtttttggcctcgggagttgtgtagtatctgttttaggttgtttatgggttgtctagcctattttggagttattgagggctaggttcttattcggtttcgaattatggttttattccggaatttcaatttaaggtattcattaagtttttgttgtcgtgacgtaggaccaagatcacctagcttgtttttccaatcaagtcggcccgcacacttgagttctgaaataaggtaagaaaagttgtaagcaccatatgtggctaaatgttagtggttgaatggttatagccttgattattatgatgactctaaataatgttgttgagcctcggtcatgacctagggtttgaaacggttgttaccgttacgagtaattactcctgaaactgcgaataggtttcttacttgtcatttgcttcatcgggcaacgatagtgaaatattcaactcatggttaatgagtggtaaaaggggtactttaaaaagtatcaggattgtgtgtttatgatattatgtaaatgtgtaagcatgttgatatgagattgaattgttgcatattgcggattattgttttattcacttttcttgctgagtctctgtcactcacaggtgctttatggtgcaggtaaaggctaggcaaaggttgagcacccatgagtttgaggtcgtagcagcaatgtacatatcagccgcagtggcacggcccggtgaacaggatgctctattttgaatgtagtttgggaatgcaaagtttatgatgttaaagcactattaaaccagtttgtaaatattttaaaaaataggggaccctgtagttaatattacttatcttttattgtaaagaagttttaaatgtctattttaattattaaaaatttaattacccaaacttttggtataattatattgtatataatatcagaatttaatcaaatcacacacacgtggcgtccctattggacatggccttacaccaagtctgctaccgaagttagaagtttccgaggattagcaagatactacatgggattcatagaagggtttgccaagatttctgcacccttaacaggattaactcgaaagaactgtaaatttgtttggactgacaaatgtgaaagtagcatctaggagttgaagcagagcttaattactgcaccaatactaagcttgccgattagtgatgagaaattcgtgatttactgtgacgcttcaaaacaaaggttaggttgcattttaatgcattccggtaagtttattgcctatgcgtctaggcaactgaaggagtttgaacagcggcatcctacacaagatattgacagcagtggtttttgctttgaacgttcgacgtcattatctatatggcaaaaagtgtgaaatctacatggatcacaaaagtatcaaatactttttcactccaaaaggatttgaatatgagacagcgacggtggttggaattggttaaggactatgattgggtgatcctctaccatcctaggaaagaaaatgtggcaactgatgctctatgtcaaaaaagtctaaaaatatgtttatgaactgaagatgatctcaccagaattggctaaggatattactagagcaagaattgagtttgtgattgggaaattagccaaaattacattacagtctgattttatagagataatcaaggcaacccaacaaagtgatccaaggttacaagagtataaagagaagtttgaggctggattagcaaaagacttctctattatcccaaattttgtccacttgacgtgacatgtccacataagccaaagatagagtacaggtggagtacaaccccaccaatagtagaacacggcctccatgcaagatatagcaaaaccataaagtagcaaccgaatggagtgaagtgagccctcaaggagttgtaccaacatccgttgctgaccaagagaagcctataggccagccagagtgatcctataggctgaccaggatctatgcacaagctggccagccaagaagtgacttctggaacaagggagcttccattcaacaaatggaacctagcctctacaaggaaacggtgtgcaaagctgttttcaacttgcaaaggctagcctcctcttggtaggcctatagtgacctgccaggtcctgcagaccttgacctgccagatcctgtaggccttgggtagcaaggattaacctggcaggacactatgtgtagcccaaaacgtggttagtaagtcgtgggctgggaatggggcccaaaaagccaacgggaatggctgaataatatttagattcaagagcactttaagcttttgtaattatctaacaacctatgcaaatatttgggatttaaattctaatctagggtttaggcctcaaccctagccaagaaacttaagtcacttagcatccaaattgctctaagtatgaaagccttactctctcttctctctctctcttgctcacgcccaatagggctctctctcctctcttcatctctctcacacacctaacttagaacatctcaacacttgagttttgccagtactgattcataccttgtaatcctaatggtgctatagcagatcccacctatagtgatctggatagtgtttccctcaatataattcaactaaaaggagagtaggacattacctgctatcacatggggcctgaacctctataactaatattattgtttattgcttttcattcttatttgtgcaaacacatggcaagcatcagatccatacaaccccactgtcggttgatcactttttgtggtcaacagtttggtgctttcattgagagcatggatatcatatctaatcaaacaccattgtcaacacaagaagaactcctatcgtaccatctgcatctttgggtctccttcaagacccacagattgcagatctagatacttaggttccagtcacaactggaatccccatgaagactggagatgtggtgagttctgtcaccacaacaggcgccacaagtctagcctcctcttagtggacctatagtgacttgccaggtcctacacgcctcggcctgccagatcctgcaggccttgacctgccagatcctgtagaccttgggtggccaaatctcccgtgtaggtttatgggcagccatgattacctggtaggactctatactggctagactgatataggcatcccagtggatccaaatggcagggccctacctccaagggaggaccctccataggcgcctccaactgaagaaagaatccttggggggcaccccctaagaacaacaaccaggttttgcccctgatactatgcaagagagacatgacaaggaattggcgagccccacgtggacttgggagaagatctcgagttagccaaacttagagagactgtctaccaagatagcctaattgaagaaccacgcgttgcaaactgcaatttattcactcagtagagatgcaaattccttgaagaaccatgcgttcctaattacgatgtgctccctcagtagagaagcaaactcttgagatggattgatgagaaagattacaatcatcgatcccacgaaacagagtttagatcgccaccaacaagagagggccaacaatctaataaggcagttcaactagagaaacaatagaagaggccaagatctcatcagagatccacttcaaggaagaattgttgatagatcaaggaggggctcttgacatgttggtcaacccagttcctcgggaactaggatagatgttctcttgcaagaggaaggacatgccttcctcaaaggtgaaatggcaaaaactaccagatctcgacaaccagcagcatgggggccggccagggatctccatggccagccaaactcttccagaagtccacatggctggcaagactcctccaaaagtccttatggccagccaaagaggagcactccctctccaaggggagcgagttacccaaagatcaattttcaactgacaaggaccgagagctggtggaaacacccataacaaaaatttcagaagtgaagttaatcacttcatacagttggatccaccaaactccaacaattggtgtcatctaccctatttcaatgcccaagcttcactagccaggcagagaagtgtgggcagccaggctctgcccagtttagggttaaccgaccatgtacaagcaccagactcagggatggccagccttgagtataccctctccaaaggtatggccagcttggctctagccattctgaggctacaactcaatcaaagagggccaatcaaccaagtccctgaagcaatagatccttttgtgcaagcacggttagataaaatacaagacatgctcaagagactagctagtccaaaaccttcaagctagaaagggcgaggggatcaccattcttggcatacatcaattccttgcccttgcccaaattcaagatgctaacttggaagatgtacacaagaaaagaagatcgtctagtacacctgaagtactttaagatccaaatagatctcctaaagaatctggagatgtgcgaggccaaatctttctagcaactctagctgaaatagcccaataatggtgttttaggctagccctaggaagattgaattcttaggaagagctctcccgagagttctatatttagttctctacttcaagagaaacacctggccaattggaggatcttgtcgaaataaagcgaagacaagatgaacccttgatggacgacattcaatagttcatggctgagaccactatggtcacatgcctgacagaagaaggtcgatatacggccatactcggaggcatcttaccgttgaatgacctctagaaagatatcaggaggatctcaatgaacagcatggaggagttacttgagagagatgatggctacataaagttggaagaagctatttgacaagcccagacaagaggataggataatgctgaacaaatacagggcctcatatcaccccaaacactgtccagcatgccgaccaacacacatgatctctatgaattctaaaataacgagaatggtggaggcaagcacaacaacaatggctctgaccaacataatggaaaagagggaaattcaacgattcctttaatccatgaagtccaagaaagaaggaggagaagtgtgtatgcttcactcttctatcaaaactcccaaagcacatcatgccaagacatacctggagggtgagtcagcaacaggcagtccgaaggttagccttcatctctaaaggctgacctctgccttcgaaggctggcctacaccttcgaaagctggcctccatatttgaacgctgacctttgcctctgaagactagcctccacctctaaaggctggcctacatctctaaaggctgacctctgcctccgaaggctggccaacacctctgaaggctggcctccatctccaagggttggcctccatcttttgccaaatgtaatggcaggtaccaccaactctgcccaaacctcaaatgacaggacacttaagggtcgacattggcgaacaccatattgcaggcgagaccaataaagccagagagttctatgctcatacactccatcacgagcccaaaagtgagtttctggtgggtgaagaataaggctctaagcaaccaaggcttggagagcccatgatctctttcttaaaaaggagatcctgcctaagacagtttcctgcacaatgaccctctggtcgttaccggacaaatcgagaatatgactgcagcaagatatatggtggacaatggagcctctttcaacattcttttcaaaatcaaaacatgaaatgttgaggctcaaactcgctgacttggcaccctgcaatcaagtgatgtatggcctctttgccaaaggcgtcgcaaccatcgggtagatcagattacccctcactgttggagaaaatccaacgaccaaaactctgatgggatagaactctgatggcacaaccctatacaagtagaaggcgtaacatccatctaccacctctgcttgaaattcccaacaaggcatgaggtaagatgtcaagaggagatcagtaatctgcctgtcactgttacaactgggacttgtccaaattaagccaagaaatagaagatgttgttggatatattttaccagnnnnnnnnnnnnntaacaagtatgtttcattaacaacctaatatgaattcgaaaacaatgaaataaacacata

SEQ ID NO: 16107 - DNA, 5280 bp, Cannabis sativa
aaaataaaaaaacccctaaatttaaaatacataaaaattgataaaacaattattaaatttgttcaaatcttataatattggtgtagtctttcgttctattttaaaatagaataatcattttactaaaaaagtagaaagaccattccattgaaatgatagtttaatattttaaaatgcaacttaacaaaatgaatgaaatgaaaattattgaaactcaaaattgcaaatagaaaattaagcaggttaaataattgcatgaacaattggaaagaaaagcgtttataccaacaaataaaaggattgaatataaatagtaattatgctttcaaattctgcaaaacagttcacactattctttcattcccaacatttgttatttgagctaggaacaatttgaaaagaggcagcatctcaattgctatacaagaaaagacaccattattcttttataaagtacaaaaaggaattcaagctttaaagctttccgacgataagagccggcattttataattttatcatagtagtaaactccttaaatctctgggggttcttcaagaaatatgcagcaatggcaattagaataatcaatataatgagccacaagctaaatcctcctgcacctaaaaaaatgaaaaatataacaaagagaatccaactcagctgaatattcgaattctcgaaactgagaaaatggaagaatgagtttactccaagtgtctaatgtctacagacacaaatttaacaatcttttcattttctaaaactagttactattatcaacctattttcatgttccatattcttgtctacaatatttgtaataataaatttgcttaccatctttcttctcctctatcaatgttactcttgcgcttgaatccaaagaggcagatgccaaagctctgtaattatataatacatcacggttcattagatgttagaaggagatgcaaatacagtacaataattactatggcggaaaagaactcagcagcaaccttgaatcatgagagaatctcaatgtggttacaaagccaagatgtgccttcttaatcacttgtcgaatccgcatacttgatgagttcacaacaaaaatatccccttgtgttgttccactggaaaaaaaaaaaagatatcagtaaaagggaataggtatgatgtttccatgaagcttaacaccaggactgcaaattgacatagtttgatcaaatattttattgtaagagaaaataatgtcctagaatcttgacaatgagaatcggtagtaccactattcaagcactacgacttaaaagttgaacatggtaaagatgtcgcagaataagtgatgggccagtttgacaattatgctatttgtaagttatctatgtaactatgttagaaatcctgaggtcttttcaagacaaaaggctcaatcacatcccatattatgccagttcgttgcttttaagaagaccttagatgatagctggagaaaattcatcaacttaatgattttccaaacagtaaacatttaccatgcaaggaacttgccatcagcagagacatcaaaggcagatattgggtcacggacaattgactttgaggcgatcctattccatgtggttgtattccatgtcacaatgcttccacctttacctaaatcatacaaaagtcgtgtgatgtttatcagcatgtgtaatgatgggacaacaaggactgaatctagaaccagaactgggtcattgaagagtacgctcacctgtaactgcagctgtatatagaaccagattcttgtcgttggtttgagaaaatctacacgcacaaaatatttcgtcctgtttatcataagttgtcagtttcaagaccaactaaatcaacaaaacagataatacaattccatgcagacctcttgatggtgcataatcaattgcacatacagtcataattcttgatagggtatggttggtcattggtgttcttatcatagcactaactttgtttatttactcaatttaaccattttcaattttacggtacactctcgttctgttgaagttaatagccattccattgatgttcaaaatgaaagttaagaaaaaagataagctatgaagacaatgatcatgcagataaaaacagataatttttctttttcttcaaatatgaggatctcaagtaataactcacatttcccttagctagagaagctacaggctttgatgaaataacatcccatactctgcagccaacacttcccaaagatgcaagtagtttcccatcagggctgtacaaacacgatttgagaaagcatatcagtataacaacaaaagtagcagcccctaaactgccttccatttttgatgctaatagctaatggcattgcaaacctgaaatgtaagtccttcacactactatgaactttagcttgatcaagaacaatttccatgctaggccatttgaaaacctttaaatttccatcctgtactgcaacaaagtgaagtcattataaaacatgccatgctttttcatgataaaaaacaacatttacccaacagctttgaatgaacttttcaaaatcaaatggatacatgcgaaattggaaaatactagagaaattcataagaagaagtaacataacttcttttagcaatatagaaacggtatcactgtgaaagatatcagaaagagcaatacgaccaagtttctccccttctttgttgactctatttttttctcctcattatataaacaaccaaaaaataaaatgtaaatgctgatatctacctcactaccagatgctagtattgaaccctcattgttaaatgccattgctaactgttgttcaacgtcttccaatgaggtgagcactctatctgattgcttcacaccaagctgatgaccttccatgctattttctccatcccattcaaaccatctgcaaaataatgttttcattattaatacatcattaaagatagctaaacaaaacaaatccaatgaacacaacaaaaaaacacacctagcccaattcctaaccagctgggcatatagaggatacaataaccagtaaccacttaaggtcaagtactactaaataaatactattagggcaatgagcatacgattttaatataaaatggccccaaaaaagaaaagtataattgcactaaataaatatttaaaccttcgaagaatctccttacaaaaaaacaaaaaaaaaaaaaaaaagaaaaacctttgaagaaactacatacctgcagctctggggaaatgaacaaatgaggccctcgccaccaggatgaactgccattctatatggcaaattagagccagttctatgcttagcaacctacataaataacagaacccatctaagaaaactctatagggagcaaaacaatattggggttcggctcaatgcataaggagaaaaaagactgggaatttacaggctgatcagagagagaattggatgtggcatcgaattcagagagaacaaccgcgtttgggatgccactattgccttcgccgccgccgccggccaatacgatgtacttacgatcggcagtgggttcgtcgtcgggtttaggttgatctggttcgtcttcaggtttgggttttgggtcaaatcgaatggagttgtacggaacccaagctacggagtagaaagggacgccgtactttttgaagttctgaggctctgggttgttcgccatcgctgctcagatctatgtgaattgagctctaagaaagaattgcagagtattactaatatgttgatctacatgatacaacattataataattaataaatttacaattttacgggaattaaaaaacaccaacaactagggctgatcatgggttgggttggccgggttgaggatatttttgtgggccaacccaattaagtcggcctataaaaaactaacccattcaaatcacatcatatgtataacccaacccattttttactttatgggttgggttgggttgggtcgggttgggttataacccttatttcataattaaaaaaaattagatctgaatgtcatcaaaatacatacaagaaacaaaaataaaataatcatacataaaaaaaaatcatatgaagttacatcccattattaagtgtaaaactattaaaattttcctcagtgattacgaactgaaataacagtcttcacctccaggaaaatgctgtgtgtttaggatgattccctgcaattctaaaaacaaaattactcaatgtattataaataacaaattacaacaccaaaacagttgcaattgaatcttgtaaaacatttgcattacaatatagaaaactactatcaaagtaaagccatcattaattacaatttgcaaagactaatctatcactgaacagatgagaactagcaccacaaactttgcaaactgcaatgaaatttaagcaacgaaccctatatatagggtataagcaactgagtaatcaaaattaaattaatttaaacttggatttatcacttttgatagagcaccttaacaacctgtcaattcgaaacctataacatatgtcaactccataataatcaaatgtattactaactctaactctataaggaaaacaagctttgctgtaatataatattttgttcagatttttaggacaattacaaaacaagaaaaatcaaatacaaccaaaaaaataaaataataaaagtaaataaaaaaaataactattaaccttttttttttttggaaagctttgttgaagaacgtcaacataggggtccctaccaccagataatctagttcaaaataaaaagtatcatttcacagattcaatgtaaagaatagcattatcacggatttaatactaaaattaacaatatcacagattcaatatcaaaaatattattattacaaaatttaatcattattttcagtacaaaacaaataaggttaagacctgagggtgagaagtaagagtcgacggtaggtagggttgcacctaagattcgacggtaggatgtgccaatgatggtctgagaatcttccagaaaaccaaataagaaaagagacagagagaatgagactgagattagatttagtgttgagaaagaatagcaatagcatttatcaaacaaaaggaaagaaatgagaaaaaaagagcagagcaaaaagattagcatacctctttggtgaatgattttcgtctagagatgaggaatgtcaccggtcagagaagcatggtggcttggtgagacttttgcgtgcgtcgaggagagaagagggagaaatcgcaactgaga

SEQ ID NO: 16108 - DNA, 3131 bp, Cannabis sativa
tattatttataaaattataatataaatttgcaaattatttttaatagagaaaaaaaaatattgtgtaattacgattatagcccaataatatatttttatattgttttcaacattttgcatgtttggtatttttacaaatatgtaggcattttaaaaaattcagctacacaattttaggcccaaatgagttgagagcttaagtgggctggagaaatttcttataggctttttcaaatggataaccataatgacaataaagagaataattatttgagaaacaagccagttttgtaaaatgacaatatattttgatagaacattcacaatcttaaattattagtagtatctttttataaaatgacttaattgtatcttataagttgttaggcagagatttttaacattattgtcatttgtcccatatagtgattattacattacttgacaatgacaaataataacattttgaaataatatttaattcttctactagaatttaaaatataaaatccatggccagtattgaaagtgatcctctactatgcatagaagaattttgtcaaaataaataattaaaataatacacataaaaaaatcataacccaaacatgattttaggagaatctcaacactagatacccaatagaatatatccaagtacataaaacacaatcataaatcccatcccaatattaatctcagtcttttcctgtctaaattgagactataattacactagtgtgtggaatccatgtaaaactcataaaaaaatcaaaagattttgagtgtacacacataaaatatttgtggtatccctcagttgtcatggtgttatatagcttccaaatgtcaacatgaataagatcaaagtaactttaagcaatattggaattaaaaatgaatgtcaactttctttatttggcataatgataaatggaacaatgaaatagagaatctgaattggcatgaaattttaaggctttattcaaaggatgagtctttatacaagaggaatgacttaatctataatgccatacagtgtcatcagtgactttggaattaaaaatggaagaaaaaacagaaacactttacttattactgatctgattacaatgcaagtaatacaagttgccaattttcttacccatcccaatcaccttggtcttcaaagtgtcctggatgacacaattttcatgagaatgagaaagtgcaatcaattgtagctgttagagaattaacatataacaaattgcacttgaaactagacacataaaggacattttcaagaattagattaggtgttaaaataattgttccaaggcaagatattttagtatgcaaagcattaggtaagaggacattttttagattaggatcagtatgagtagttttaaacaaggaaatatcaaggcacacatgatgtgtttagctctcatatctatgatccaactatctttaggaacaaaagaaattttaccaaaaaaattagaaaccgcaggttgttcattagaggtactgggagcactgttgttgcttgtctaactggttttcttagcaagtaatgccataagcttctgacattgcacattggacaggctagaaactaggtctctttccagtggcatttcctctgattttccttcatcagtaccagaggaattcacaccatcagactttcttggaggtcccttggcatcccgattgggaaatcttccatgaagtttgtgaccaggggatatccattgagtttgtaacatctttcaatcaagtgtccattcatgtcacagtgagtacaattgtactttgatcgaaaaggttgaacagctccagcaaagtatccaacattgctcgatgtagatttatctaagtcagatgatttgttaaatctactagttaatcctctttgcctcacttcttgaaccacagcaacataagccttattcacacttggaagaggatcacgcatcaagatttgaaatctaacaaagttgtacgaatcattcaaaccaactaagaattccaacaatcgatcttcttcctgatattattgaataattctaattgcaccacaagtacaaacaggttgtggtctatattctctgatctgatcccacaaagccttcaatcaagtatagtaggtagtaatagagttcgatccttgagtaagactctgcatagtttttttttttagcttcaaagattcgaggaacatttttctcattgaatctctcatgtagctctatccagattttagcagcattgtcaagatacattatgctatttgcgatctcatcagagatagcatgaagtatccagaaaatgacagtgctattgcatctacactagctatcatagtcttcaaaatcctcatcaggctgaggaagcttttcattggcaaaattaatcttgttttgagcaatcattattgctcttctccaagtactgtaattctcaatgcctttgagaatttttggaacaagaacaatacttggattgacaccattggaaagaaagtatggattcgaaagatcattattaacattagtggatcgagaattctctccaagaacagagaacatgtttgagtcattagagttattttcagattcacgattagcaagagtatgaactcctcctcgtgcttgagttcctccacctcgcgccatgattcaccaacaacaaactagaaccagaatcaggaaaaagagctctgataccatattagctcgaatgagcttgaaacagagtaaaaaagaaatagaataagaaaggaagagagaaattaattaacagaattgtattcatcaaaaactaaattgatacaaagtgtttatcatcttatttataccagctgagattacaagagaaacaaacacactaaccaactaactaaccgtgagctaacatcctaactaactttctaactaactaatcaattcactaatcaaatttagtaaaagagtttagatagcaaataattcaaaaataactatgtaattactatagtaattctataattttatacttagactatattttaatatacataatattttagatataagttgacaattagatataaattctcgtaattttatttaataaaatagttagcaattattacataaaat

SEQ ID NO: 16109 - DNA, 7655 bp, Cannabis sativa
atatgaacaaattcaccattagaagtttggaaaacaacaaaaatgtaccaagataaatattttaccatagtattgatgtaattttttttttttttttggattatacttgaattggattggaaactcgagttcaactttttgagatttgcatttcatagatttgaaaattgaagttaggacattaattttatgcgaattaaactggatttctagttgaattttaatttcgtagtaatttttctacactttttttcatgaattcaaaacaactcctgttttgattgattccaatcgccttttcaagtgaagtcgccaaaattaatggtgattctctttctagttgattttcattttggtcgtgttgggttactgagtggttgactaaaggttgcatcatacgaaagtttcattgacgacaacaaccacaagatcacactaatttgaaatggaaaaacaattacaaacccttgcagagcactgtttagactttagaccagccatccagaagctgaatgcaaaaatacattggtaacgctttttatattaagggagaaaaagtttcaaacttgaggtttgtaataagaaatttagaactattagactatgcctataactacatattattaataatattagtaaagttaaatatgagatttcatatattttaataattattataatttaatttaaatattatggcagtattagacaccactaataccactaatgcatttctgtgatgtgaaaacaattgaagacattataatttcaaacttgttacgtttctgctttccttttgggattcaacctgaaaaagcccaagagcaaagactaattttggcttttcagatggttgggatcacatctacatagtttagcttggtctcagctcaatctgtcaagaaaactggcgatgaatgaaatgaaggcaacaacattagacagcactaatgaaacatgtatagaaagcatcatcactatcgtgtgagaagaatatatcataaacattagccccatttgggcaaaaactgactacaactttacactggaaaacatcaaaatagctttcaaggcctttaggaaatcaaaacagaccaaaacctgcagttccagaggtttgatcaaaagccttctcttagaatttgcatgaagttgaaggctcattgtctgtgccgaagtgggcttcaatagaattttagcgatggccatcgcagtcctcaggaaatgaattgacaggtttaggtacctgtgtttcaatccaaacacctagcacatatcacagttgcctaaaatgatagaaaaacaagcacttcttgagctcattgtaactatatatatattcattgtgccttcacaaaggtccggctggacacaccatgcaacaatttcacaaatccgaggaagcttagcttcccatctgtgtgccttatccagtcatggagtactacatgaagtgggattgaaggaccaagaccaagttcctagacaacaaaaaaaaaaggaaaaaagattcataaagtcagttcgacccaccaaattgaacaaagatctaaaatattgtattttcataaccacaagtaaaaagcaaataaatttgtttaataaatagagggatagaaaaattcaagctaattttttcacaggttatgtctacttaattccatggtactccagagtcaattaatatgtatgaatattaataatttccaaaatcatttagtaacggaatgatgaaatgactatcttgcaaataattaaataaataaaaagatcatgactagaaactgttccactatatcaagatattgacttactgaagcaagttcttcaatgattatagccctgttaccatccttctcaaaaagttcatatgcacagcgagcatgttgttcccaacgatctagtgcttctagctgatggacacttaatgcagcagcacaaaactcttcaaaatccattcttcggtattgaagtgcactcaactgtcattgggacaatcaaacagtatgaacatagtaatgaacatcaaaggaatcaaagataagaactttggcaaaagaaattaccgaagcaataagatcagggatgcgggattccttcattgcatctgttgcatttttcatcagggcctgttccaggagaaaaatgagaaagacaaccaaaaacagagagtaatttcaagatcaaagaccaaactgtccaatacaaaccatcctaatgttgtctaaggatatggtgccatttttgtttggctccaagagcgcaaactgctcctttagataaaagagttcatccacagtcagtgtcctggataaggcctgtaagaaatgttgacataataatatagatattaacatatgagaaaatacctttagaatcataactataaatcattttcttggattgagggcattaaagtaaaacctaattctcatataagcctggcaatatcaaacctgtaagaccatcttaaaactgttttcaagtgtttgtttagagtaaaatcaaatgatctcaacagcagaaatatggtgtattaatcaagaaaacaaacagaagtcagaagtacatcagtatttgtcaagaaatacattcctcaatagaaaaaataatatggaatgataaaatgtgatttttttttcttgaaaaaaaaaacccttgttttaaatgcctaaaaaaaggcgcacctttaaagcagcctttcgcaaggatgaagaccgcatataagccttcagaagtctaaaaattaaaatatcaagtggcacgttcacatcattgtagttcctgatccaaggatgacctgataataaaagattatgaccagtaagacatcaatatggcaaactatacattttttcagaaaattttgagaaactcactgagagcctgagcagctgtcattcttttccgtggatccttattcaataggcgcttaacaaagtcccttgcttctatggttaaagaaggccaaggttgttcatcaaaacttggatccgctttcaagactgctcgaaaaataccagattcggtccgggcccaaaaagggcgactaccacataacagaatatatgcaatcacacccacactccacacatctgcctctgtgctataagctctatgcaaaacttcgggggccacatagtatgcacttccaacaatatcatttagcttttcatctgtcaacaattaaaagtgtcacaagttgatccaagacttcatagttgtgacaaagggttggaaacaaacctgatttcacaaaatctgataaaccaaagtcgatggctttcaactcagaattctcatccttagaagtatacagaaaattctgatgtagagagaaaccaaatttagtgtagtgcatcaaaattataaagcatgaaatgaaatatctgatacaccagagtagcacaaataaagcagtaaacaagatgatagagaatcagagtgtgattttattgaaataggaacagaaaagttttggagacccagtttttctccgagagctagtactcgatagggttaggcagggatcctagtttttctagaatgatcagcataaatctaagataattaaaaggccattgtcttgatgtgtattttaggatactggcagttgtgtaatttggatattgacataattgtgggaagataactacagcctgtaaaggttggagaagggtatggttgtatttggttggaagagagagagactaggggccttgaacttgaacaacctagttttaccttgtacacattctggtttcctttgatcaataaaagttcagaccatatactagacatcattacctaatctctattgtatattagagtacattgttcttggatctaacaagcactagggcccttcactcagttaataagtgtcaaggatctttgaagtccatagctctgttcaccgtaccaagtttttaatatttgaacttcatgcaagcaaataacaggctgagtacgaaacactaaaacaggattataaagaaatttcacctctggtttaagatcacgatgcaccactccctgaagatgacaaaatgcaacaacatttagtatttgtaccatgacagccttagcatcgtcttccgtgtacttcccacccctacaatttaaatgaaaatttagttgaatatgtaggtgtgccacagtattgcagttataatagagctaattaccttgaaagtattctatccagaagttcccctccttcacataacctgaaacgtccaataacactttgtcagggatatgcagtgaacaagcagaaaatataatattaaggcaactgccattttcaagcttactccattactacgtagacattatcactgtcttcaaatgcttcgtagaattgtactagattattatgtcctgccaaagcttgcaatatcttaacctcccttctcacatcctcaattgctatggcagtggtcatctgataacaaagtatacaacattaagctaaagtaattcctttttttctttctttttcttattctttttctttctttattcttttttcttctttttttgaaaaaagctaaagtaatcctaataggaagacaaagtgaaagagaaaacatgcttttctgtttctttctctacctcgtttcatataatatattcaatctcagcagctaaacatgcaaattattagcgaacaacagaaattaaaggagaaaaagacaagcataaaaagaaaacagtgcatgaagacaacactagtctgaattagggagacaataaaaaatgtgaaactaatcatttattcatttgcagacttcatgtctaatactgcgaatgcatgtgtgaatagaaaagagaggtttgtgcaacaaagtctacaaaacacatttgcacgcattacacaagcatttcgtgcaataacagtctaatttttaggcatacgcttcccttaaaaagaacaatgcacagatcattttcttgtttgtcaagtcaggttgacttattgataaaataataatatttcagaaatccaacttctggtattacatactattatgttttgcaactgggctcttcatctaatcacacaatacttgaggagcagaaaagtaaaacaaattgctatattagtacataataggtcgtttggtaaaggggttagactaggtgaggatggggtatgtcaaactcaattcatgattgctaaattaacttttaatgaccaacacgtttgtgttttcaagtgtgtcccagttttcatgtttaattaatggtaatattaaccccctccaagacttaaatttcacatttccttaatctaagcaccctttaactctactcccaccaagtccaagtcacataatgaacaccccctaagagagacttgaagtctggaaactcaaatattgcaatgtattccagcctaatttagttgctttctgttactaattttgaaggtcgactttttttttattcctgaatttagtagtagtgatacctctgctctccagcatgaaaaggtaatcacttggtaaagtgggacatatagggtagaggttcaagctagaaaatcattttggaaagggggccatagggaaaagccaagcaagtcgaggaaaagttttacttatcttcttcttcatcttgttttaaatcatgacctgagcatgacataaggtcttaatcctctcacaagactgtgcagtcttggcacgttctacatcacacattctttaattatatgtcaattctagtgtttgggctcaatcattcatgccatataagctcaaaagttgtacaatgtcttgtcttttatgtttacctattatcggacccggtcttcaaccatgcatctgatccaaaaatgacatgcaattgacctgataccttaggcctatatgccatggcagctactgtaggctggtgctactggccattagaagaatggtcattgtgtatgacacagttcaaccctaggccccaatcaagaccaagacccttattttgacatccctctatggttcttttcaatgactagatccactcataaacctatgggctatctaatttcttgatcatttgttggaacaatcacatcttataatcaaacttcataaaactgttttataaaagtcgcataaattttttgaaaactttcattctcattcacaaattgtgttttccaatttataaacatgaattgatttttgccaattgtgtttagttaagcttaaactaagtattaattatcacaaacagttgttctgtgataacttgatagcaagcactaaattattcagatgaggctagaagagaagatcagtatttctactcgttgacctaaaaagcaattatccaacaattatgtcactttatacaccttacactccaaagttgcaagaagtagcactgtctgaaactatccctaatattctttctcattgttaataccccaaaaggaactgtgcctaatattctacatctagaaggacacccaaacaatcaataataacaaaacccagaaatatgtgtaggatcccatcatcctaactcaacttactatttagcccacttaattgaatttacatgaatgaacccacagtgtcaagaaaaattaatagtagtaataatgactaacaaataatagaccagagagtagagacctccatgtacatctccctggtccctacacaaaattagtcataataacaacaagaagaagatggtaacaaagcaacggcaattatcaggaaaagaaacagtaacagcaaatggggtctgaattttatacagcagcaatatataatataaagtaaaataaaagttgaaacctttatccgttcagattaaacaaagatactcagaccaagacaaacccaaatacagattttttttttcttttttcaaattatacttgtaatcatttcaaacgagaaagaaagaaaaagaaaaagaaaataataaagaattaggaacatttcagccaaaaaaaaaaagttaaaagaaagaaagaaaaaggaacagctaaacttccatggttgaagagcaccaaccttggactttgggatgactttgacagcaacgttctggcccttgcgctcacctttcttgaacctagcagaacaagtgtacccaaaatgcccccgacccacttcgtctcctacctccaacctgttcgtgaactccttcgagaacccaaatctcttatccagttcaaccccattttcatcctcgtccccttcctcctcaggaattgccgtggccgacgccttcttcccgtgtctccgagccagaacagcccgtatgtgtttcgccggagacggcggaggaaacggccgccggaagaacctcctgggggtagaactagcgctcttgctcccggcaggcgccggagaagatttcttcaaatagtgggcggggctagggctgtagaagggaaagaacggagacatttttccggcaccggagacgtcatcgtggtcatctctccggttgttgtgtggggttgtgtttgggagagatttaggggtctgggaggggtcgtttgggtctcgggccgaatatgggttgggtttaggtggcttggaggtgcaagttcccatggcatgtggtgaacagaaactgcgatattgtgatttttgggtgcaatgagaattcagttcaagtgttctctccga

SEQ ID NO: 16110 - DNA, 6585 bp, Cannabis sativa
  modified_base (26)..(35): a, c, t, g, unknown or other
ataaaatggattacattgaaatggannnnnnnnnngggcataaaacccaacacactctaacatcacaattcagtttcagccaatcctgggggggagggatgccagacatcctcagagttgatttctttgcttttgagatcacataagaatttaacccagtctcacatctgaatcccattattacaaatagggaaaataccccaaggagaggactgccacaggttaaaagtcacattacaggaaaaaaagggtgttccatagattcaacctcagttccaccgagggggcagctatactccctaattggaaaccttttactaatcaccacacgagcagggagagctttggacaggatacacaaccatagaatcttgagcctgtctgggattttactgttccataacttcctccaattggatggggtgacctcaccatgagtcgctctttctacatcctgggctctataagccgatttgtaagaaaattgatcattgctttccaacgtccaagcctatccatcctttccatggccaatcgggttgccccctttcaaaatggccgacgtagtttcacaatcaaacatactgttaagtttttggatattccattctccattgtctaacagcagttccaccactttactcgaaccataagggaggattctcaaaaagagggaggaaatctttcttatgtgctatccacggatcatcccagatattggtatcctgaccatccgccaccaatttgtaggcgcatttgcgaaggatggctctggttttaaccacattatttcaaaaccacgagttagagtccttagaagtgcatccaagaaaggactttcctttaagatatttagcttcaaggattcaacagcataaagactggttacctgtgaggaggttccaccccatttttccataaaggacttctctataccacatgtcaatttcacgagcctcttatccatttccattccatcattagagcgaaaaattaaaaaaaaacaaaaaaatgaaaaagtaaaacatttattagattttacaattcaaaattaccaaattgattagcaagtttccaagcctttatacctttataggaaggaaggccttaataataggatagacaagttaatttaatattataatgaatctagagggtacacaatcaagagcaagtactggaatgagattagtaagctaggatgtgaccaaccttaggttttaaaggtcattcattttagtggaaaatgctttgggttttaaaccttcctcctaaacgaaggtgttcatttggaaagctagcttatattagttacccacattaaaaacatgtatagactttgggtgcctctagttgcatatgcccactttgtgaggatgatgagggaactacttattatgcaccatgggattgtaagaatctcaaacattttatctctaaagttccaaaagagatttttgttctttccctcttaccacatacttttatgcttttattttaaagtgtgatccaatcttaaagaaggcctatcatgaacaattgatagtaatattgtgggaggtgtggtatcataaaaaacaaattagtatatgaatagatattgattgataatgatggtgtgattgtgtgggctttagatttttccagaggtatcaagaagccaacttgaagagtgacctaacgagtgttgttgttggtattgaagcatctcgcgctacaacttgtcttggaacaaactcatgcgaactttccaaagttggatgttgatgtgggtgcagattttagaattagtgtaggactgatagtccacaatcatgtcaacaaatgcatgatttctacaaagatccattgttagtgaaggttaataagttagttattctgttatttttttagttagtacagctgtgtgattaggcaagagtttgttactcttcccgtctagttttttcttctttttaacagattcagttccactctcttgtattcaatctttagtatttataataaactgatctctagtgaattcacaagctcatttgatcaattcatttttgcaagttggtatcagagctttaggttcatttttttcctttatttgttttttctcttcttgaagctttcatccatcgcatctacttctacctctattcctaggcttgatggctccacttctgctattggcgttctggcatctccagctgccatttaagtcattctaaattttatcatgcctctcaaacttcgtttggattgcagcaactaattacattggaaatctcaagtttattcaatagtttgaggacatcaacttgaaggttttctaactagctttcatgctcaccctccagcaatgatgtcagatccaactaatggctcaagattaattctaaatcttgatttggctaattggctacgcttgaatcagttcctaatgagttggttgtttaactccatctctaaagccatgcttgatcatgttgcttgatgtgcttcttctacagaattatggaacattatgatttagctctactccaatcactatcatgccagagttcttcaacttcgtggaatgccttaatcaacaaagaaagcttccactcatatggatgaatacatcttgtctcatagatgcttcattagcttttggtcacgctatcagtgatgatgagctcttcctctacattcttggaggacttggaagtgaatatgattctgcaataatttttctcaattccaaagaaactatcactctcttggaggttcaattcttgctccaaattcaaaaaatgtgaattgaacaacaaacctttattactgcattggatcttcacaatctaacatctaactatgtctttgcaccaaagaaaggtcaagctccacttgcatcttctgataataattgtcgtactcgaggctggcaaggtagttctcgtggcagagacggtcattttaaccccaataatcttattggcaatcaacctatatgtcaagtatgtggcagagctggtcacattgtctcaaatgttatcatcaatttgatctcagctatcaaggagagggtagctctagtcaaaattaattttttctagatgagtctcaggctcttttaattgttgttggcaacgttgaagatcctcattggtatatggatagtggagaatcacaccatgttgtccctgatggttccaagctaaatgacaagattgactacaaagggaaaagaaaactaacagtatatgtaatggaaaatctctccctattctttctgttggatcatgtattcttgtttcctctcgtaatctattctcgcataaagtcttacatgttcttgacatttataaaaatcttatcagtatatctcaattcactattgataataatgttcattgactttcatgaattttcttatgctatctttgataaggtcacgaggaggatccttctgtaggatactcttagtcaaggactccacaagctctcttagcctttcccagtaataacaattattctcttttttccaagtttgaatatgtcctacataatatttttttttatctaaatgtacttttggtattccgtattttcaataatacttatttagtaccttgtatttttaataatacttatttagtactctatattttaaaattatatatatttggtaccctcactaaaattcgatcaataaaactttatccgtacgaaaactatctttaattatatgagtttataatttaaatgaactattttttttaaacgaaagtcatcattttattaaacgagtaactcagttacaaaactaggtaacaaactaaccggaacagtgtccaagttgaaaaagcaatcaaggtaggatatagaggctctcacaaaggagtgagccactacatttgctgatcgttttacaaaatgaaaagaaacattacgcaaagtacataacaaggtcttacaatcactaataacttttccaaacatagaaagtataactgtattgcttcgaatagcttaccgagaggcagtccgtttccagtgtcacatgaagccacgcatgttctttgatccaacttaatgcctctcgaattccaatagcttcggccacaacaagagaaatcgagccattaaacagtttagtgctgccttccacaaataaatcactagagtctctagccacaaacccaacaccataattagaggtttcgataaacacacctgcatcaacattgaccttaatgctattgacatttagaaatccattgctcagctccatcccctggtatgtatccagtgaatgacaactcattatttgaattttgagcaacacgccattgattaaggtataaattttgagtaacaatctagtcaaactaataaattttattgatcaaagtttgactttagaattaataatatgtataactttaaaatataaataatagtaaatgagtatcttttatactgtaacagagcccacaatacaactactcataacttagccaaattgactttcacaatgaataatacaatagtgtaatggcatgggactaagctataattgacctagtgcaataaatttgtgtatgtcgtgctgacccgatccatacttatttgtgctttttaaagtataggttgtgttgtaccatgccataaataaatatgagacatgtcgtgtcataccaatattttaaagcataggcctgacagagcccgtagacctggtacttcgttgtcattggatttgtgctgcattttacttaggtcggcttatttttcttaattaggctagctcattttcatatccaggctcgaatttgtactgtacttttttataattattgaggtaattacttaactatatgtattttttatagcttcagttatttgcatataattttcaacaatattgtattgacaatcatataagaaaatttttataattattagaatttgagtattcacttataaatacttaaatttttaaatcatactctacaaataaatcaatatatattttacattttctaatagaattataatattcagaattatgttttagttgtatcagccttgtagtgcgcctagccgtttagactagtctattcatgcttatatgttgtactttttgggcatgtcgtatagtgtcatgcttaaacacatatttttcgtgttgtgtcatgccaatgcatagcattgtattatgtcgtgtctaagctcatatttttttcatgcctagtcatactcgtgccacccaagctcgtgctagtttcgtgttgggtcaaaaatctcaatccatatttacaacactaatttgacagacaaaaagagtattatttgattttttttttaaaaaaaaacaaataaataagaagcaattttgcttgttacttgagaattataatatagctataatatgccaagttagtagtataaagctataatttagtgttgcacattctttagctagctacatctttgtctataattatgttgggtcgcctagctattttaagtaagtgtttggttggaggtaataaaatagaatataatgaaaaggaatcaagttttatttcatttctttgtttagttgcattttaaaatattagattgtcatttcattggatttatttttctaccattttagtagagggactattttattttgaaattaaaaggaaaagtaattccaatgcaattatgtgagaaaagatttaataaatttttatcaattttttaatacattttaaattttattctattccatttctatttatattcttatttttactcttatttttatatttttattactcccaactaaatgccacctaagtgtatccatgatgtaattaatattgatacttaatcaatttattttaagtacttttttctctcttgaagtttttcccactggatttatttttgagattttaatgaatccgatttttctaataaataaattaataaaaaaaaaactataattaagcacttttcataaagctttccaatagtgttaaattgtaaaatgttatactaaatatagcacataaatttaacataaaatatagtagctaagtttgacacaaaaataaatgttgtttttttgtttatgtttttgacaataatcattaattataagattaataaatattttatatacaataatgttactaattaatttttgaatatttaatttattaatgaccattaataatattttgtttttatactaatttgaatctcaagacgtgtatttgagcacaattacaaatggtaacctaaataagtaatgttatatatatatatttaatttttaccataaattattatatataatcatattaattttaattgtgttattgagattaattatacgcaattgtattactactaaaaaacgagctttctagttggtccaaacataaccttatttcgagaaccgactataataaaattaagtgatcattcaaaatcaacgataaaaataactattagtgtgaggttataaccaactctaacaaaataatcatatgggccaatctaatttcaccaattataaacctaattataacctctctctctctctctctc

SEQ ID NO: 16111 - DNA, 5452 bp, Cannabis sativa
ggtgtagtatgtaccttggtaaaactttgaaccaacacttattagggctagaaccaataacccatgggtgcatggcccaacaccactcaaccatggagaatacctcactaggcaaagaatggcttagccttactcaaataaggtcgagtttgttactgagcatattatcatgttgtcacgcgaccttgaacgatccttaaagaaatggctcaatactacttgagtatgactgagtacatcattatgatgtggttagaaattccactcagattaggctttatagctcattaagggtggccattttccactttgtttgggtcaaaactaaaaagaccgagtcatattaggtagaaccctaagggttgagtgcagccttgatcattttcagcaagggccaagtagaatggattgtgaggttttgtctttgcttgtattcttctccctttgttggattcttgaggatagacaattagtggtcaacatgatcacatggccatggccacccgtactatgtgactagagccgcatactttgagaggtgagagtaggtgacccgctttacttggttaactagggcacacttaaagatttggcatggaaataaggaaataatcacaagtgtcaagatgaccgtgtagtggcctatatgatcgatatatgcggcctggatgtttttgttcattaggtacacatcaagctaacttagttatcaattctaaaaattctttgctcatgatacttggattacgacccatagcattcagcctaagtaccatgttcatatcaagaatggtgtgtgacgcttttgtggtgaaaatggtctaaaatacacaaagtactcaacctgaactggtccctaggggtacccgatcgactccaaaccctaaggggtactcggcttgggatgcctaaatttgatatattatttaaagatctttccaatgccactagaattacatcaatcagagttgttagtagagatatatgctcaaaacactgaaggttacagtggaaggtactcgacttgagctgacccctagggggtactcgacttgggctgcctagatttcaaagatcattaaaatggatttccaatactaccaaaatcttgtcagtcaaacttgtgactagggatatatgcataaaaaactaaagattgtggggtaagtacttgacatgagctaaattctaggggctactcagcttaggccaacctctaagggtgcttgacataggccacctagattgaatagatcattgaaagatccaacatcaccataatcacatcaatcagggttatgagtagagagatatgctcaaagcactgaatgttgcatggaaaagtactcaacatgagctcaccacaagggggtactcgaccgaggatgacccctagagggtactcaacctaggccacctagattggatatatcattgaaagtgctttccaatgccaccgaaatcacattaatcaaatttgtgagtatagggatattcttaaacattgaaggtttccaggcaaggtactccacatgagtatgcgatcttggtgcatgcaatatggtttgcaatcctagggtattatgcactatgaaggtcctaatttccttaagttatattgcatggatcaccttagggtgcgtggcttaaggccaaggagtatgaaggtcttggcacgtatgcgccatgttctcgagtcatctattaacaatatttaactcccttggtgtttgagacattaacactcgcctcattaacatagtttctttaagacttatgccatatactttgcattgtcttacattcttatgactttccatgtgcttggatcttgagccaagtctttttattgttgtttgcatgttatatgtatatacttgtacccctccttctatagagatggatgcctttcatgtttccaacccatgcaaggagcaaggagggggtaaggcttgatcgttgataactttgtattttttcatctagtgaggatggcatccaagtggatctacttatactttcatcaatcagccttcagatagttttttgttactatactccatacctcagatatgtttcctacaatgtcatagttgacggtgaaaatttgtcaagcaaattatagcatgaaaatcgaaatttagatgtaagatctaggattaagatgaagatcaggaaatatgaaaacttattgaaaagtgcagagtagctatgaagaacgatagaagtgtatatttctctaggtcaagtgttacaataattttacaaccccttatcacatctgaaaaaggggtattgataggctttaatttcctagggcacactaatggtcctaagggacatggtgatatccatggcctgcaagctacaggttgcaggtggtggtcttgcaccttgtacctttttctagtgaccggtggtccctagtggtaggagtagtggctgtaatgcacccttggtcaggttgtcaagctttgcaagtgtggtgcctccactacttgtacctccttgccattagaacttgcacaagaattttttgtacacacctttcatgcaggccttgtccttgtgatcggactcttgttgctttcttcttcaacacgtaggaaaatttaactaagtatagctatgttgctgtgatcgtactcttgttgccttcttcttcactagatcatggctgagtgactttctctaatgcatgatctagtgacattccctaatgcatggctaagtgacatcgtggaaagcatgatagtgaatgacattgtgataagcatggctgagggacattgtgagaagcatggccactcaaatgcatggttgagtgacatatgtgagaagcatgcccgagggacctttgtcttgagatggctgagtaaccttgatgctcacatggccgagtaacttcaagcaatgcttggtcgagcggcctctcgaattgtcatggccaagtgacttcaagccatgcttggccaagtgaccatcaaccctactcagttgaatggctcccaatctatagtttggttgtgtggccctaggatacatgcgtttacctggtaattccttggctgactattaaagtcggtttcttttatttatcgagactaatcattgactaatctcaaaaattgaacttgttaatttttgggattgacactgggccccccaatctacaagaattcatttaaattttcttgtagactaagttcggcaagtgccatccctttcacttggttctgcagtagtctctttaggcgcttgtaccttgagatcttttatttgagggagtctttttccatttgagctttctcaacctcttttctaatgtaaatgtatgatgaagggactatagactctttaagtagccttttaccgcttacttattagatattaagggagttgttagcctcttgggctatgcttagccttttttaacttttttgattctattgagggagttggtagcccttaggtggtgcttgacctcttacattgcatctgtggctcttaaagtgcattttgaaagctacaaaatcagtaatccttttagagaggcttccctctcagagttctatccaattcttcttttcttcttcttttttttttctttttttacacagcttcattcactttgacaatttcgattgacaagtatagtgagcaagccaaacagacctgcggagagtgatgaatgccatatgtaaattaaaaaattaacattttcattgataatacaaatatttaatcacccaaatatatgagctacattcagaggcctatcaaggggccctctttgatttagttcaacgtacaaaaggtaaagtttccattgctaagaacaccttcccatatatttgagcttcacttagaggaaaaacttggatatttaatttttatgggatgtagagcggaggcttttacttgaatgtatcaaattatgagtgctaggagtatcgtctaatacaccctgtagggatatgatgagcttcccgtacactcacttgtatctgtttccaaaactctattaccctccttaatacaaatgtacttctctgctctctcacagaagtcttctataccatcaaattcacttttcagcatattcttccatagtctacttctgacaaacatgagttcatcgtcagatatcctccctacttaggaaactttggagttaaagcgatggatgtatcttcacatgctttcttattcttcttgcttcataatggtcatacttgttataggcataacgtaatcactggctgcctgatgttgttgaaggaattcttccaaaaattgtttccagtatgtgactaatcttggcccaagccttttgaaccacttatatgcagctcctttaagtgcgaccacaaagcattgggaccttacctagcatgacattttttcatcttcattagctcgttaaatgtttgtaaatggtactttggataagttttaccatcatatggtgtcatggaaggctccttgaaattgggtggaagttgttcaatttgaatttcccttgagaaaggggatccttcatcgaacacatcatcctccggatttccctttgatgtggtagccatcttttgatgtagatctcacatctctccttctagctccttcattcttttgttcatcatttcttgatagttggtacgtggaattttagtattccttacagtttgcatgggacctatgagtagtaatcctcttgtcccatcatcatgaaacttcccacgatgattgagggataatgcctttctcttgctttgctcttaaaaggaggtgcaggcacggttccctccatatgatcactggatgtttctatcattacggtcttactatagtgggtagactcacattgccttgaatgacctataaggtccttgtcttgcaatgggccatttttgctctcatcctttagggtactatctataaatgacacggagttccctccaccaacatgtgcagttgggatctcatgttctttctagtggttaatgagcagaaagtataaggcttgggtttttttctttgagtatgccgctcaacaccttttgcatgctagtcactataatttctagcattttgctcttctagtggagatcatttatttcatcttcatagtggtaagtttgagattttgagctcaatgagtacgcttacttttcttttctgggatgatgtcacaaggtatcgggatctctcagtgttattggtggacggcgctttactagaattgttttggccatgacaggctattcacaccaacatgtgtgatggatgtagctactccataatcttgatgccttgaagacggttggagtatcttggagtcttgtagttgtggtaagtaaggaaactacatgacttgagcttgttgctgccacaaatggcgacaaactattgactttgaaaactcatcaaccaaattatagtcgcaaaatca

SEQ ID NO: 16112 - DNA, 6087 bp, Cannabis sativa
aaaatagtatttacccttaattttataaaaatattaatttaaatttaatttattttacacttttaagatcaatataatgacattattgaacactaatcaatatgcgcataattaaatattatttttgatgagtaaaactattatgaatttctcgaaaatttgtactaggtcttaaataactatgatgtacaccgtcatataaaaaggtaaatgacggtacaagtattcaaagtcttaactttgtaagtagcataaacttaatatttatttttagcagtataagtactaaaatgtttataaaactgtaatttttttataatttcgtcagtacaaactctgttttgaatttattaaaacaacatttaaaagtaattgataccacatatttctgtctcgacataataatctagaatctaaatttcatacgtgtcttgtttaagactataacatagtctctattaacgaaatatgtgtagtaataaaaaaatttaaaattcttcagaccttaaaagtttaatcctgtataactataaattaaatatatctaaaaaagaaatctaaaattagaagttgagaattaatcacttaatctctctaattaaaatcataatttcaaccaatacatcaaatattattttgctatacttgtttattatttaatattttatttatatattaataatttttttctttacaattttaaaattccacgtctaactcgtctcatctcaagaccgaccctgtttgctctaaaagaactaagaaggtgttccaaaattcaattatagaattacttctaagaagagtagaagacccttattcttttttctctacaaatttgaccaaaacaaaaccctcctatacgacacacaaacactagtcaacaaaaataaatttaaaaaaaaaataaaaagtgtgccgtcgtaaaaggtaaaacccagggctcagtaatgtaccatggaccccaccacaccagaattttttacccatttttgttttaccaactgtccgaataatacggtaaactctcttaccacaaatggaagagaacacactatcccaccgccctatccccagctggcgcggcgcgtgttattcaattaaccgagtaactcgcggagctctcttattcatccacgtcattttacaatgacgattttaccctcgctctgattagaacaatttaccatattttgacctctgtaataagcctctaaactttgacactcatataattttgtcccataaattataattttttttttgtaaaaaatatctctccaactttgaaaatgattgtcaatttacaactccaattatattttgttcattttttcaaataatttattaatatgatcacaaattatgtatataattacagagtctacttaactaatttaaattacttaatttaagtataataattttgaatatttaaattttaactttaaaattatagatacacactttaaaatactattattagagtattatgtatgaaattatttttttatatgaattctcaaaatacaataaactaagtatagaggaatcttacatcagaaaattatttacaaaaataggcaaaacagccaaaaagacaatattataatcatagggacacaatcatataaatattaaaattttggggcaaaaatttatttaagttagttaaggttaagtataataacataaagcattcaaattttaactctataattgcagatacacaatcttaaatgttatcattagaatattacatatataattattttttttacaaattctcttaatacaataaattagttacgaattagtcttacatcactaaattattagtaaaaattgacaaaatgcatccaaaaggacaatattacaattatttttaaagtttgagaaaaaaaaattcttaaaaaaaatttaagttaatttagatttttacaccttaaactttaacatgtactaaattatacctcttgaatttttcagtcataaaattttttacctaacctattgaaattgttagatttaagtacttttatataattttattaaaaaaaaaaaaattggcgtgatggaaatttaggggacataatttgttacatgttaaagatcatgaggcatgatttagtagatattaaagttcaggggcatgatttagtataaagacaatcgctacattagtaaaattaaataaaattagacaaaaattcttaaatctaataatttcaataattttaaaaaaatttaaaaacattaaaaaacataatttaatatatgttaaagaataaaaattctaattaactaaaaagaataagagataattacacgagggacaattttttattaaaaaattatatttttacgtttacagaattttttttatatttttataattttttataaaaacaactagaaaattatataaaagtaatataaaaataacatttaaataacattaaaacaataataaaaaataataagcaaataataaaaaattaacaataaattaataagagtacaatataaaaaaaactgtattttttataaataaaattaaaaaaattacaaaaatatttaaaattgtttatcaaaataattcaaagagaaaaccatgtaaaaacttcggacaaaatttattgaaaatttatataatgaaagacagtttgtccgcacgcgccttcgtcgctttcaatcgcaggcttttatttctctttctctgtgtcactaccggagagagagtgagatgtctcacccctcactgcctctcttctctctttctctctctctctaacaatttcttcttctctctcttaaacttgtttcagtgctcgaaaccctagacacagagatactgggatagttgtaatcacactcacactcggagacgaggcgagtttcgttttctcttttctctctcgttcgttgccaccactgccattgaatagtttcgtctaaggtatattgattggtctgactttactgtgctgttgtttggtggccaggaaaatcagattctcccattttctctctcgctttctttcttggctacattattatgattatgaattgaataatattattactattactgcattttcattttacttgtctggttgttgaatttgtgtaatggattgtaattttttttttaactgattctgttttttttgagctttattttacttgatgctgccgtactgatgatcagtgtatgtatttttatggaatttgggtttttattttggtttctctttcattgtaaaaggtttctttttttttttttcattgttgttgaatggtatttcactattttgataggaggcattgttttttattttttttagggattgtaatttttggtggcactagcctttaatgaattcctggttgttattgattgagagctgtattgtttttttggtggtggggcatttaagccttaatttatagtccattgtttcaattggtcacagtgtgtagtgtccagctatttggtactctgattataatatgcgttcttgtgtccagtactctgattaatgttaatatcccttgaaatgtttccttaaaaggcttaaatgaagtgaaatgttgtttaaagtattcatctttttctatgttgtatatccagttgtagttatggtattgttatatttgcatttccaggtcaacttctttatttcatggagtgggatttatggaattggtcacatgatcaaggtttctgccacttcttaatttacttccttcattttttttacaattgaagaacatatcattccagacttaattgtgcacttgcttttcagtaacagttgagcacaatgccagcaggcaatctgaatggcagtgtgacttctattttggttatgggactggtatgtttgaaactgtttttctattggttttaattcattttacacgtattgtttgcgtagttcagctgttacacttgggatttgtagatgtaattgaagaacgtgctttggatgagaaatcttgcattcaagtgttacggatactgataagaaaggcagatgctgagcttgatgaacttgagaatgatctggtgtctcttcaaactgaattagcttttgcggaacacgaagaatggcctgaaagatgttgcaatgctttgaacgataagataggttgtcttgatatagcaataaagagtttgaagagcaagtctgagaatgatattgaggttcaattgtcactgcatagagaacctgcagagaagatacaagatcttatgagaaagtacttgccagagaatgataaacaggtttgactcgtaatactttgcaagagaaagatacaccatatgatagcttgtgattcttctgttccactgtttgtgactttgtgttttttttgttcttctgtcatctcttttttatggtcttatgaatcttatgtttatttggttcactttctactatcatttgaatttttcggacttatgaatggaaatggatcatccttggagatattggtgattatttttattaatttggctttatgttacatccatatgtttttgtgggctgttgtttgtttatttttcgcaaagcaaaatacacacatacatttttttgaagacaatatatgcttgttattaccattttattacttttcctatgttttttgtacgttaaaggttttacattcattgtctgttcaaatctcaatgtatatatatatttatatataatattctcaatctttcaatatctgatgtttttccttccataagaagcagcctcagcaagtcattgtctcggacgtaaaaccggatggatcaacatcagatatccttgtaaaggaggaatttggagaagttgctactccagcagaaaaatgcaaagaaacaaatccttctacaaactttcaagagaacaaaacaaattctccaaataaactagaggtatctctttcccatcactcttttaagttatactagtaaatgattatttagaatggggaatgataatcttgctttgaacacctgccttgggtgaaatgactttattcgtatgtcacaactactcatgtattcaggcgtcgcttacattgttataaatttataattttctggtccctaaatggttaggtggggagctttgtttcaaaacaaagatattctaaaggtggagtgaagattagacgcttatgatgtgtgggaattttaattagatggttttacaataattttagattatcactgtattgggtataaatgggatggagatttatatatgtatggatttatggttatcatatgtcaaatatattgcagatggtgttgtgaatgttttaacaggcttaatttagcgtttgcttactcctgtttactaatgaacagcttgcaaatggcgattccacatttcatggcccagagtgtttgagacttgcagctggctcctgtgttgaggaaaaagaattggtcataagtgattcagatggcaccaccaggtgttcgaatgccactgaacaagagcttaactgcgagaataagaatattacactaaagcatgaagagaagacgagctgtaacatagaaatacctaaggtagctactttcctcagaagcattttgattgcatgattattcaaatgacactagaaagcttgaaatgttttccttgtttgaattttgaaccttacttttttgcatgctgtgctgaggacatgaacttgagcttttctaggagatgtttgtagttcattttcatgtaatgcattaatcgtattactattcttgtctacttaccttgtgcgttagtcatacaaatttgtctttttggtaattgtgtttactttcagaatgaaatgtttgggcagacatttctatcgctcaatctttattttagcatgcaatcagatgattcagaaatgattaaaagctgagtacaagaatgtattttaatcataactgaagcctgttagatttggaacaaacctctctactttttgaaaaagagacaggttacattccatgagtgacaggaacaaacctttctaatattaaggtggttcaaccatgcctagttggttccacacctctgctatcatagagga

SEQ ID NO: 16113 - DNA, 3903 bp, Cannabis sativa
aattttattttctaaccttacagcattatcgtgttctttatcataatgccttactgaaaaagttgtaaattgttactttgccatttcagaatgtgaggcctagtgctgaggatcttccagaggaactggccaccattttaacttcatgctggcaggaggacccgaatgctcggccaaatttcagccaaataatacagatgctgcttaattatctttacaccatctccccaccagaacctgcaattccctctaggattttcgcctctgaaaacactgtcttgccgcctgagtctcctggtacaagctcattgatggcagttcgagatgaaataggggagactcctaaagctagtatggaagacaagccaaaagggtttttcttttgctttaaccagtgttactaatccatgaatagttggaagagaggagtatgtagttcccccccttctctggccaataatgcctgaaaggaagattagtaatcataggctatagtcccttcgattacctttttgataacatggtcaatgtttaagttgattacttttccatcaaagttcagctatgagataaaatcactgccctgtatctttcttgctgctagattcagcctgtaggagcttagctctgattaggtaaattattaacttcgagttacttatagtttacagtaaagtttctttgtcatgtttatctgtaaatgtcaaggtggagaaacaggattcctaggcttatagccagccagctggtcattacttcttcatagttccactatgcttaacatttggttatgtcatataatatatataatttatggtaatcacaagcagaattcaaatccaatcagattaggggcttttaccaaaatgtcaacactaggggagaacagaattttgccttggtccacctatgcaccaaggtgttcttcatggattggtggatagtgacaggagatttggcaggactgcaggtgtcagattattgagatataatttgtttccatacaaaccatgtgtgttgaatgggaatcgagagctcctaatcttttgctccttgaaaattgaaaattcttaatatagatacaaaatgtgcaaacatcactggtgagtaccacaagtcttttgtctcaataataattgtagtgtgtgataatgtatggccccttgttgttacatgacaaaatttgattggaataagaaattttccgtactagtgtgggggatgaatagcagtatcatgtactataccgttttgtgcctataatatgaccattaaaatggaatctctaatttgtatgcatgaaaataaaattaattagaaagacaagtaaagcagaagggaatcttgaggaattgaaacagtttcattaatcaaccatgaccttatactgggacttaaacaatgagtgttttctcacaacatgacaaatgaaaataaatgcttgagttttaccaataatcattgcaggaacaggacccttctttgaaatggtggaaacgattgcgatcacgaacaacaatttcccgtttgaataccttcgatataatctttgttgcattgtggcaatcagtgcagactctaagattcttagatattctaattgtagttccgggagctgtttttataaggccataagcgatggcgagtttctcactgtgatgagacactgatgcttccttgtgatagtcttcctctgcatcaagccttgcatctgctgtgtttggcacatagccagctgatttgatctttctcatcatgtcttcagttgcattgtaaatctccattgagttgggatttcctttgtcttcagcgaaaaactcatacatgactccatccaactcaatcaaactacatccaggagcctttcttataccattctctttcatttgatttctcacccttaaagcatcatcatctcttccaattgatgagtaaagttttgatagaagtatgtaatctccgctatgaggctgatctaatttgatgatgttcttcaacgattcttcaccaatttcgacctttttatgaaccctacatgaagccaatagtgtcctccaaacaacagcatttggttggataggcatgttttgtataaactcataggcctcttcaatcaaaccagctcgcccaaagatgtctaccatgcaaccatagtgttcaattctcggttcaatatcataatcattgctcatgctgaggaaatattttcgaccttcatcaaccagaccagcatgactacaagctgaaagaacaccaatgaaagtcacatcatttggaacaacattgttctgctgcattaatttgaagtattccaaagcttttttcccttgcccgttactagcaagaccttgaataagagctgtccaagaaaagacatttctcatagacattttgttgaacacttcaattgaactttctaccaacccacattttgaatagaaatcgatcagtgcagttccaagtgtaacagtgagcttcattttcttcttctttatataaaaatggacccatttaccagtttctaaagctccaaggacagaacaagaataaagcacactgaccatagttacctcatttggttccacattagccttttgcatttccttaaacagaacaagtgcttccctgcatcgattaacttgagcatagccagaaatcatggcactccaagcaacaacatctcttcgatccatctcgtcgaaaactcttctggcagtatcgatctgaccacattttgcatacatgtcaatcaaagaagtgatcaaagcaaggttgcccttcagcctatttgcttctatatactcactaatccactcacctaactccaaatcagccactctcccacacgctggcaaaacactaatcatagtaacctcatcaaactcacaacccaactccagcatcttacgaaagagcttgaccacctcatcccaaagttcgttcttcgcgtacccggctaacattgaattccaactcataacatgcctatgagacattttatcaaacactttccgagccacctccaaatcgccagaactagcatacatatgaatcaaagtgttctcaatatatccatcagaaccaaacccagattttacaatccgggcatgaatctgttctccttcactctgtgccccaagcttagagcaagctttcaagacactagggaaagtaaactcatcaggctgaaccaagctctcacacatctctcggaacaaaaggatggcttcatggttggatttcttgtatatgaagcctctaatcatgacattataagccgccgaatcgggtttgtccaattggcgaaaaatggagagagcatagtccatggcgtccggcaggattatggcggcggactcgagtaggttttcggcgatgagggggctgtggaggaggcgggttttgataaggtgggcgtggacttggttcaaatccttggtagtcttgcatttttggaggattaaggttttgggattctgtgggaactcggaaatggtagttatggccgttggagttttggagggagagaagaaaggatgggttgtcaaagccattttgtctttactttaactcttcttttttaacatttaagtatctctctcatggcgatttttttaaaaaattaatattaaatcatttaaataaataaaaaaaagtgagaccttacctataaatatctctccatctctcttaatttaaattaataaaaattaatattaaatcatttaaataagtatctctccatctttaattctctatgaggtcatctctaatggtaaaacttaaatttgatattaaattaccactaaaaaattactatttcagcattattttttttttcaatttcaatcacaaactaaaaattacaccaaattttatattatttattattctattatttta

SEQ ID NO: 16114 - DNA, 5488 bp, Cannabis sativa
aaaaaaaaaaaaaactctatgatgacaacttttttgttcttccacaatatttgtctgtatataccattatttaccttgaagttttcatttgcattttaattaataaatgagatgaactaaaaataaactaaaagaggaaaaagaatattccaaatagtttatattcatcaaagttattaattaaattatcaaaagtaatgttgtttattcattaatcacagtttattactttggcataataagaaataggctacgaatctttatatatatttgcagacataaaaagtaagaaggttgcgtagtaatgaagtctagtaattagcctacaaaaaatagatataaattattctttagtgcttaattaaaatatcataattaatgtattatatgtataagcatatacatacttttttatctataaatgttaaaagaatagtatctaagatcaaatggacaagaactaggtatagtcaaacacaaataaattaattgattaagtaacatgcatgtataattaatagtacttttttaaaaaaataataaattgattataatggatcaaaaggcaagaaaaattgtacaaataccatgtgtgtgtgagtgtggctaatgaatatcacgtacacgtgtttatgagttatatataatgatattactaatccaatgaaaaagaaaaagaaagacctctcaacagcaaagaatcccctttatttattcaattttttctaccgaaataacccacaaaataggaaaaagaaaacaaaaacgttaacccttttgttaattattattattattattttaatctaagattatacatcaagattgattttcaacatcaaatcactacagtagtatccatttcatgttaggttcctttcaccatgcaattaaagatataagtggccaaacaagagtgtggtccacattgacatatagatacaataatttaatctccactccaacattcatgtttttctcttttgattattgtacaatcatagcttcttaagactattactcaaatatctttgtataacttagttgcatggttgcattgtttagagcaaagtatcataattaaggctcatttggctgtgttgggatagaaaaattaaaaggacagaatgttttaagtatcagattctatatattttaatataataattattattaaaaattattaaacattcgtcagacactaagtgctctcgtattggtatttgacattactggtacttaatatcaatagtcggagttaggatggcgatgcttcatcaaccctctaatcgtgcttttttcttacttcacccttttctgaaatgctttcattttccatccatcttgtcgaattgggcagaataattagtcaaaataggatttttcacatgcatatgagattttctttccattcatttgcaaaattattattccatgtgggggcataacatgactacacttcagcataagaaaaatctttaactttacctcagcctatttttaggagtggtgctcaataataacccatttgtttatgatttgcttaatattacattaattggataactaaaggtattaacctcactaatttattcaaataaaaagggtgaggaattggcatgcatataaagcgaagaataaaaatttggagttaacaaaagtagattgtgattaacacaaatgtaaagattaacacaaaattgactatttgactatgactaacttttttatccccttaaaggacggattaacctaattttatgaggctaataaaaccactaattctggaaataatcataggtttacaaaattaagtgccttaaagttggaaaaataaataaataaaacccttgctttatagaaaggtgtggacacaatgaattgaacctccttgattatttgattagtaaaataataagaagtttcttcaaaaaagagagattaccatgtaaagatggtagggcacaaggattatctcctgaaatgaacttttgcttttgtttgtgatcttttgaaaagtagtatatagattttcattttctatgtatgtgccagtcattttcccaacccccccatataatttcttcccaccaatttctttaccaaaataatgtaacattgttaagataaataaggtgagacagatcaatgtaaagtttcattcatatgatatttgattggaaaatcaaccttatatcattactcttttttgaaaaaactagagtccaacaggattgatatagccaatcaatatacttgtgaaagcaaaactaagtttgcaaaaaagctttattattacagtaataaaactaagatgcttattctctatggcaaaagcttataatgatctttcacaaaagtaagctagtaaagtaaaggatgatgatctttatcccaatttgggaaggaaagaaaaggaaaactagcatatatgcagatatataaatatatacagaacttgggaattgccagtctggaaaaagaatgagaactaattaatttattcttaatatatgccaagtaactttactaatttgaaacaggatcaaatgacagttggtatgatgtctaattcaaattaattctggtgtcagatcagttagacaaggataagacagtctcaagtggctagaacaaaaatggaatttcaatcggataaattgaattgaaacagatttttgtgatgactgcttcctttaagaaaaaattgcaatgaacatagggtggtggtgtacctttcttatttttatatctcacttccatttcagggactgtctgattccggtatagatgagtcccaatgaccgaccaatcaagcaaactaaaaagaatgagatggcgtcggttactttgttgataacagctctaacaaatggcattccaatgtcggacagctcaaggaataggctgaagtaatacctcctgcaacacacagacaaccaataatcctttttggagcttgtttgaaattgctgaaacagatattatcactttaaacaatataaagcaaaaaaggaaaaagggggaaatggtaaaaagagcttaccaccctgccagggccctcaattccttggtccgcttaactgacatggaaaagtggtttagggacacataagataatgatgatgatgcaattttagattttttctgaataagccctttccaccaagaattttctgtaggactattggttggttcctcaactagtcttctttgaagtgtgcataggtcaaagcgatcttcatacattgaaacaactgcttccaaattttgatacagccactggtttaaagctacctaatgatgaggtcatttctttattaaatttagaattcatattagagcaccaaatagagatataccagaacttagtgtacttaagatccacaaataaaagctctccttctagacccataaaccaaatccattccgtctaagtcttcaaagcagtcggtgatagtaattgtgaacattatgattactttttttttccttctttaatatatataagaaatatatgatggctaaaaaactaaaatgatacctgattattcatattaaggaaagaaatagaacgcttatgcaaatagcaaaacaattgcatcatgcaaggaacatgttcaataaacaacaccatgcaaagaagatttttaagctccaatacttcacaagggtgtacctcattgcgtaatctttgaagagctcgtgttgacaaagtacataatgccatgcacaaattattcatttcatttgagacattactatcaacagaaataagctctaaatatatgcttgccatcccatcagctatgtttatcaacaaatcttccaatatggaaattccatttgagaaaaacagactcttgtcataatagcaatcctccctgataaaatagcatatgcaggtaagcacacccttaaaagttaaagacaggttcgatgatgcattgaaaaaaagagtacagcattggtctaaagccaagcgaaaatacctttacaatgagaaaattcttcttaaggaacataatgtgtagagtgcatatgcagcagtaaatgattatggcaatcaacatcaaacagagactactgctcatctgttaacttaagtactttatttgaggttattttttaacaatatttattgtgctgcatgtatccacataacttttaaagtgaagtattctgcaaaatcaatagggacactatagtttatttcgtttggaatttcagacaatggtgtaatttctgatcatatacacaatgacagttacataagtattgtatcatttgtatttataaaatggcagcaacttatcaaaaaatacaaacaaacacaacagattaatgacgatatactaagatcaaatacacaagacacacgtgaatgattacctgatagaaccaaaacaaagaaagcacaataaatctgcataaagatcttccttgcctgaattcttaatgttcagcagtacagtgttgtctccatttaactttgcacccaacaaagaaacaagtgcctaaacacaaggaagatacaatggtaatctaatcagaaaaacaccagctgtggaaatgctaccgaaaggtacatgagattatgaaactaaccttgtcaagattgatgtttgcaagggtgtgctccctttccagccaagtcatgcacaccggttgacaggattttccaatcactctagaaaaaacaaccaacctatcatacaagtcgagagattcggagtttgatatattatgcacctgcatgaccaaaataaaataaaatataagtaaaggaaattagttgaaggaactgaaatacggaacaagtaagattggatctgtcactaaaacagatgacaggaagtattttagtagatagtgagaatcatcaaatttaaattttggggagcaactagttaatctaatataatcagattgttcatcagctacatcattctatgtataaaatgtatatttccaccctggatagaagatttctaaaagcttatttttctaaaagatcatactaataagtcatataatcatcaactagcatcacatttcacaaatagaacagagaattgttgtcaatgccaatggtagttttgaaagttatggtcattaatgaaatgataacagttcaaattagcaggtctactattagaataattcagaccatttaatgaagcggaatgcataaactcgtgcaggtaaaaaaaaagtccaacaaagtaattacagctaaacaagaacacagaactcaccacttcctcaatttgctgaaaagtagcccagagcaatcttaatcttggaccatctgcaagggcactcaaatttaaaggtcgttttggacgtagctcactgtattcaagaatcctacttcccgaaacatctccacgttcaaatgcatccaaagaatccaaaagtttccttttaacgatatctaaaacatactttggattagctaggtcattgtttgttttcgagctgcaat

SEQ ID NO: 16115 - DNA, 7580 bp, Cannabis sativa
  modified_base (4566)..(4574): a, c, t, g, unknown or other
tcatctactttatattattttataacaccatatcatttatattcttatttatataataaagagaagcattaggaaaaaataataaagtaaaacttaatacaatcaatagtatcacaaagaggtgaataatctttgcaatctatattaattctatttgccacactttttgtgtttgtttcaacataagcaattggcaaatgaattgttaggatttataaaatactagagaaatatatatatcacagatctaatcatatttctaaaagtgttttaatatagaaaaccctaaatatatacccgtacaaagcattggtaaaagtaaataacaagctaaaaaaaacacataacagtttgcacaggtaactatcaaaacaagagaagtattcattgaaaaaaataacaaagcacggtaaatccgggattaaaggctgctcgatcagctagttgtctcaatatgaaaaaaatataacccaagtctaaaaaccgcttgatcggtcatttttgtctcgaataaaggcccatgggccgaacaaatatatataaaaaaaagaggaaaaatattttaaacggcaggggtctcaggctccttgtacggattagctagcttggtttgtgggggccagaggccgacgttctgggcaacaggggcttcggtgttctggtcgattagaactgtagaagtggttgcctctgtggatttggctcgagaataagcgtaagccatctttaggttgacctccacggaaaaagttaaaacctaaactggtaaaaaggcataacaaaagtaaagaaggaaacacttacccgagcagcctctttcaggactctgcccatcaccagttctaggaacaactcattgtccgccctggtcagttgatcgctcactttaggaagtggctgatccaggtaatactagagcatatccttgcccttcttggcctccgtgctccgtaccacgacatttgaggaagtctggtgcgctagcatttgcttatttgattcggttccgtctcgagcatctgaatatttttttgtagtaaacaagagatacaacttgtgataagtcaaatacccactttgatatttcaccttttcataaatgtagaatataggcaaattagttgcaaatcgagaagtttcgagtctattcgattttgcaaaaaagtgacatctccacaaactagcgaacaacttcaccagaattaaaaaattgactaagtaatctcaatatatcccttaggcatcaaaaaatacaagtccaacacattttcccactcatacaacatccatgttgacgtcagaatgtcaacttgggcactggatgtcaacctaggcgccagttactgaactgccttcagtaaaacaaccattactcactcaatattgatcctattgatgcgattctaattgtgtttgaaagatcttttcaagcgctttcaagacatgactcaaactcatatcacaattttgaatatttcaaatcaaaattttttccttaagttaagtgcgattttttcgtagattaccccaaaacgatccaacagacactattcgagctctaaaaattgacaattatcatctaaagtcaattttagccattagatcatcgtcaatggtcaataatagcccaaaataattttttcatatttttttttgttattttattattattttaagagtaatttacagcataaatacttaaatttaactctcggttgcaataaatacttaagtttaatttttgacagtaataatacctaagttatatatctagaacttctgcaggtatccggtcgttaaatttcaagtcattattcatgtgtcattttcttattggtatatttaaactaattttttttaaaaaaaaattaatgacctcgaccaatcagggattgctacgtagcaatttacttaacaattaactgtcaggtacttacaaaattttcagaattataacttaggtattattactaccaaaaactaatcttaggtatttatttgcaatcaggagttaaacttagctatttataccacaaattactcttattttaatggacgtccttgcctataaaaggagagctctattagcttcttcttttttttttttaatattcagaaaagttcctacaaggtcagagcatctttctctagttttctctctagaaatctgagctcttgccttagctaattctcttataattcttgtgagaaattaaaactcgaagtagacgtagctccattattgttgaaacacgaagaataaactactacaaatcttgtgtgtctctctcactacttacttaactcatatgtcatctcgccaatctaacgagtgaatattggctaattttcagtatcaacaattagaagaaaaaatatataaaattctaaaagaatccgagaatacaatctaatacatgtaagtagaagttcaatgaagctagtccttttttttattgatgttaaaagtaaaaggtatatgcataagcggtgcacaaggcatgtaaatgtaatagtcaaacccaaaaatgtaaaagggttgggttagtactaaaatacctaacaacaaatcttccttcccaaaaaaataccgaacatatctatctttttcttttttaaaaaaaaataaaaaagataaaataatccttaagcgtacaaaattcaggtcaacgccaaaactctcttttttcctttaaacacaatcaacggctctaattttctgaatctctagacccccaaaaacgctggacggtctccgatgtgggatcagcagtccaatacttgggcctacacaatttaaacctttcatcactaattttgttctaagagttgtttttggttctaatggccatggcatgagagggagaggaagcgttctagagagagagagaaaacgtttttgtaagaatcctgttattacataaccagaggtagatcccacggtagtggcaagctgcctttcttcgttttcactcacagcttcgaaattttgcctttttaggggtctaaggaggttctcgctctgtgttttattctttatcacctttgcctctctctctctctctcaagctcgttttacagtattttccccccttcttttcctttctgggaaaagggtttttgattttttttcccctgaatcggagttgggttagattgaaatttgggggattgggttcttcctattgagtgatctgagtctgagcagaggtggagagaaatggaagagtctcttctgtgccagtggagcgtgattagatctcttttggcaattcttcaatggtggagtttcaatgtcacagtgattgtaatgaacaagtggatcttccaggtcatactctttctccattcctatggacttttgcacaattgatatttttgtttattattcctttcttttataaatggaattattttatctcgatgtgtaatggtttttctgatactctgtactaagtgtggcccctcttcagtaattgttcttaacttttgctcacgattaatgttctcctaaactacgaatttcgatttaattaaagtttactttttttttttctatatcattgatcaaacaaaactgctactttttctctcttaccttcaacagggaatgtattcattacttaattctggtcgatttgaatttgtattgaccatgttaaaattatttgtgtccatctttaactgggtttagctaaaacttgtaaagggaggtacacaaagtctgtaattgattgggtttgtatcctctttgatcaagtttaatctttataaatgggttttaaccttaatagaaattctttttgtcccaaaatttgttttatatgaagggaaactgtaggattattttattgctggattagccaataaagttcctttgcatgggatctaactttaatgtatgagagtcacttatgaattccatggcatttaggggtgaggtcctggtttggctaaagaaagtgatgatgattggtaaacttgatttggctgggacctgggaatggttgattgataagaaaatatttatgatagaaagaaagaaattgttctccaaagatgttaccatggtgctctaaattaaaagagaatcttcctcaaatcgccaattgatttcttccgtcatattcatttgtttatttattttatgtaatcatcacttgttggtgttgagatcacatagaacttggatcactttcatcatattaagttttctattgaacattagctctaattttgtctttttacctttgcagaaacttgattttaagtttcctcttaccgtatcctgtattcatttcatttgctcttcaattggagctttcctggttattaaagtattgaagcttaaaccattgataacggttgagcccgaagatcgctggagaaggatatttccaatgtcatttgtgttctgcattaacatagtgttggggaatgtcagcttacgatacataccagtttcttttatgcaaacaataaagtcatttactcctgcaactacaggtcagcttcaaatgtggatgacaaaaccttatagctatatgctctctctctctctctctnnnnnnnnntctctctctctctctcttgttttcaatgcttttctaatcaagtatttgtatccttttatctaatagctatgaattcaacagttgttttacagtggctggtttggagaaagtactttgattggcgtatttgggcttctttaatacctattgttggagggattcttcttacctctgttacagagcttagttttaatatgtttgggttttgtgccgccttatttggctgtttggctacttccacgaagactatcctggcagaatctcttttacatggttacaagtttgacaggtactttattcttgtttctttagttgggtctggcagattttccaaaatttataaatttaccataaactttaccttggatcttttcattatggtgttaataatgtaaaattgatttttatatattattcagatcatacaatagatgtaatatcttgtgaatgagaggtagatagaaattatcacagccaagatgtgtaaactatacctctgaatgaggagtgatccaagtcaaaaattttataggcttttccataattggctctacgctcaacatcaacaaatgtgtgtatatatatatatatgcataatacataaacatattgcttctccttgactaggtcttcacacgtaagatgtatatcatttttattttatcaaccctccttttcttgttacttgcttagtttgaaattgagtcttcaatttttggagtgatgagtatatgatgcattatttggcaaatattaggcaagttttattatatggtttcatgctaattttgtttttattttcattgatatattttatagcataaatacggtgtactacatggccccttatgcaactatgattttggctgtacctgcaatgctacttgaaggtaatggggttctggaatggcttcacaccacacaggctcttggttcatcacttgttattattttcagctccggggtgttggcattctgtctcaacttctccattttttatgtcattcactccacaactgctgtcacattcaatgttgccgggaaccttaaggtaaaagttttaagccttttttttcttgtcttctctagagtgttgaatcatggattaaaaatgctacgggatcatccttgcatccaagtgctatactgtcaaggatctatacaagtagtgttctgcccactaaatatataatgggaatttgaacgggattgaatgcctgtgatccacaaatttacagataaaccttgcatatcatatcgggctgaactttaatttctactgatacatgaacttcctttcatacttcttaactcttgaacaacaacattgctgcattctcattcaagtacaatgttaaaatcctaatgattttttggtctttctcaggttgcagttgctgtccttgtttcatggatgatattccgtaacccgatctcaggtctgaatgctgttggttgcgcaattacacttgttgggtgcacattctatggctatgtgaggcacatgcttgcccaacagccaccaggaacgccccgaactccccgaacacctcgtactccccgagcccttatggaactgcttccccttgtaaatgataaattagatgataaagtctaatggtttcaagaagtcaagcatgagatgaggctcatcgcagtttgataagggttgataggaagagtacaaaagaaaattaaaatgaaaaaactcacagctctttgttgtgtaaactggcattagactaaactttttttaaatttgttttccctactgggaatattttcaaattcttgttttgtattcatttttttcatgttttattgggtatcttattagtacttttgagtttgagacaatagctaatagttgcaaagttacaatcagaccaaatggatatcttccatctaccaaaagaaaaaaataaaacttaaaacttttatattatacacaaattcaatagaaatatcataacattttaaaacataaccatagcattccaaatggtttcactactccattaattataaaaagatgggtttttttattaatttttttttttatttttttatttttcagcaatgaacttttattgaacttttattgaagataatcagagtttaatatatcataagaaatgacgcaaaatcattcatctaaactatttcgccaaatgacgcaaaatcattcatccaaattatttcattattcaccttgagtgtacacaaactgctaacttatgtatagttttattagccgaatgacgaacataaatcagagatgtcttaagaaaattagacaataaactagcaatatcatcttgtaaagagcctacctcatcataaaaagtagatctcaaaaaggctgaaacaatgtgtttactgagatgttcggaaactaattaaataattgcttaagaaactaataagtaaataagtaatggagatggagatttttacatggttcgggtgttaattaatcctagtctacgagtcagtgtattggccgaatggctttgatgtattacaatggggtcttacaagtttaagaaccttagcttcttgttatagtatttcccctttggcttttcttacttagagaagaagaaagttttgtttaaggaagtgaattattcgtcccccttgcacaaaggtataaagaggtattttataggctaggatccagatctaggtataaagaggtattaaataatttaatatttaaaatatttaaaagtaatcaaatcaaaataatcgatatacacttttgcggattgaatttgagctattatgtgaattagattggatccaaaatttgaaattgacaatttgagctatttatgtcgcgaaaaagtaaaacattaagtattgatttatgtgcacatatatctttgtagtataatatacatatatacactttataacactaaatgtggcaaaattatatatatatatatatcttgggtaatttacagctaaacaaactgaattttaaagtttggcacgatc

SEQ ID NO: 16116 - DNA, 6884 bp, Cannabis sativa
aaaaaatacttatgtttgatttgattaaaagtggactgaattattttgatgggtgtatgctgcaaatgttatatggataactctgctgaagttgtcttattgggatgatttttaaatatattgtactaggctcttgtctgtgtttgtgtgtatattttgctaaacccttcgattccttcctatccaggtgtcagtttgtgaagtaaagggaaagatggatcaccatgaggatgaagggcgtgttggtggtggtgaaaatattggaaagcagaatgaggaggtgtgattggtgttcccaatttagttttccttgtaacagtatctttttaaattttcttggtttacagttaagttgcagattttagtcttttgtcttggaacatttatctagacttagacaattgaatcacaaattaattcggacattggaatagtaaatgtcttctgaaatgtgccatcattttgttctagtcttctagatattaaaactgtttgtttgttgtttctttttgttttgttttttccctcctatttcgctaaactaaattcccaatatttgctgtatttgacgttcagttattggaactcatacaaggggagttggttccattacatgagtatgttataaaaagtgtttttttcctttctactctcttcttgtaggaggctgttgctcgacttgaggagatgaagaaatcaattgaaggaaaaataacacttcggcagagcaatttgaatcctgaaaggcctggttagtaaatacttatgaagtcctgagttctactctcacacatatataggtggttatttattgaataggatgaacatctttgggtggtcagtttcaccatccattacttctttctaagcaccaaaagtagctatcgaaaatccttgatgctgaaacaaaatttttgctggtctttgtttttttagagtgataaggtcgataggctgatcatgtccttttttttttggtgtacaattgtatttatatttgtacgacagtttctttttggggcttaggtttatggaacaatcatgattgaagagataagatggaataagttacaatttgttgggatttaaaacatgaactatttttttatcctttcatactcttggtctcaagtgattatttttttgttgatgtaatataatatttttaatatattatttcaattatcttttaaaatttctgttgccaacgtttggtcaattatcctttcttgattttcatattattgatgacgcttttttttcagatttagttgcagatttcttttagaactgattcttttttctaatgtcttcttgttactatattttttttcattttacatgtttttatgtttatattgctttattatggttggatggtgctcattgtggtaactgattcctattgtggatgcatggtgtatctacactgtggcaactccacgctctctctactcttattttcagactcaggatttcttaggacattggattctagtattaggcgtaacacagcagtcattaaaaaactgaagcagataaatgaagagcagcgtgaagggctgctggatgacttgagaagtgttaatctaagcaaatttgtcagtgaagctgtgacttccatttgtgatgccaaacttagaagttcagatatacaatcagcagttcaggtaacttttgttgtatcaaactgatgatttctttttatagcagcaccattatacagaacaacaaaaaaagatatttgtggtatttattctacatctgacagttctccgtattttaaagatctgctctttgcttcatcaaagatacaaagacttctccccgagccttgttcaagggcttttgaaagtcttctttcctggaaaatcaggggatgactcagatacagataggaatcaaaaggctatgaagaagcgcagtactctgaagctacttttggaactttactttgttggagttatagaagacagtgctatttttgtaagcattatcaaagatcttaccagcattgaacacttaaaggatcgggatactactcagacaaatttatctctccttgctagttttgctcgacagggaagaatatttcttgggcttccactctctgggcaagaggtgtatgaagaggtatattttctatttgatgggatttccttacttcttttgtaagggagctttctatgtttatccatttcttttttgtatgtatcttcttttaaggactccctcttccatgttgtgctccagtctataccattttttttttttttttttttattacagtttcttaaaggtcttaatatcacatcagatcaaaagaaaattttcaggaaggcattacatgcatattatgaagctgcatcagaacttcttcagactgagcatactgtaagattgactatcgggatttttgcttctactcttggtcacttcttttctcctctactgtattttctttatttatttattgcttatgtgacaactcttgtatactttttacatttacctctctccctctctgttgggttctgttctttgccacttgtttctactattactggagtttgtatatttgattttattttcttgtttatgtgccaacatttctatccttagttacaccttgctctctctctgttggattactagacttcgtattttcttaactatatattattgtatcaaattgatattttttttaatatcttgctagtctcttcgtcaattggagcatgaaaatgcaaaaattctcaatgccaagggagagctaagtgatgaaaatgtagcatcatatgaaaaactgagaaaatcttatgaccagttgtaccgcaatatctcatcgtaagtactttattatgttatttttattatatttatatgatgatgactagtttaatggagctaggcagttgaggtttatatggtgtcgctggcatttttgtttagggtgggcatgctagattatttttttcctcaataaaactaacatcgtagagattaaacgaacaaaaaataaacaaggaaatgaagaacacagattttgtatggaaactcttttagagaaaaaatctctggttaagaaaaaatctcaatgccaagggagagctaagtgatgaaaatgtagcttcatatgaaatactgagaaaatcttatgaccagttgtaccacaacatctcatcgtaagtgctttattatgctttttttattatatttatatgatgatgactagtttaatggagctaggcagtcgaggtttatatggcgtagctggcatttttgtttacggtgggcatgctagattatttttttcatcaataaaactatcatcgtagagattaaacgaacaaaaaataaacaaggaaatgaagaacgcagattttgtgtggaaactcttttagagaaaaaatcactggttaggaaaagtaaattcattatttccaaatcaatagtacaaaaattagagtatttgaacatacactgtacatactaaactagattgggcctattaaaaacttagaaatttactgtttctacttttccgcaccactaacataatatatgtgaaaacatgaactataaacacaattgtctaggtgacaataaatacaattgtggacagatatatggaagtacttcttgagaaaaaagaaaaagagaattgcaactccagtaggctgaatagtgttcagacatttgatcatttgatccccactcattcatagaattatatgattgacagcttagcagaggcacttgatatgcagcctccagtaatgccagaggatggtcacacaactagggttacttctggagacgatgcttcctccaattctactgggaaggattcttctgctcttgaagccatatgggatgatgaagatactaggtctttctatgaatgcttgccagatctcaggtttgcttccacactatgaaaagccaataatattgcatgtagttggtagttactcattggataattggactatagtttcaatgtttttctggaaagcgaactttcacttgattgaaatgtcactgatttttttctttaaaaaaacttccagagcatttgttcccgctgtattattgggggaagcagaatccaagatgaatgagcaatctgtgaagacacaagagcaatccactgtaataaattaaatatgtatatataaaaaatttacatggtttgtatattttctggactacattttttgctgtgctgcttgaatctggacatcatcacatcacatgaaaaatctgatagcttggttgcatgacagatactatttctttagcctgctcaagtagtgctaaatttgggtttatattgctcgactgtataaattattttcttgtgagttggatctttgtaaacttattttcaaatgattccttgtgcaccttcgacatattctttggcactcatgtaccacaaggcttaaccagaatgcgttgcactcttttctattaactatttgcaatgttttgctatgtaatgtgttttgtcagtcactctttcatattcatggctgtctcctaaatttacgttaggtgatgaagtatatgttgttggtcacctaatgaacctcccatgtgttttttttttctggctaaatgaactccctttgagagtctccaattttattattgtgatgttacatgctcgtcaaccatttgtactgtatataacataagatatatagtatggactatggagctgtgtttttttttttcttttttgttcaaatatagagttttacttttgtttgcaagcatatgatcctgacttagttataatgtcacaataattacctcttcatatcattttggatcacagctgatgagagcattccttttcttttatttcgtttgaaggaattggcacctgaatcagaccaagttcaacaaactgccccagactctgcagagatttctacagattctggtgcttcacaggagggcagaagcacagaaaaagggaaggaaaaggaagaaaaggagaaggataagagtaaagaccctgaaaaggagaaagggaaagaaaaagatgctgacaagaaaggagacactgaaaaagagaaattaaaaagtattgaagggacaaatctggatgccttattgcagagacttccaggttgtgtgagccgtgatcttatcgatcaattgactgtaagcatactcctggttatgaaattcaactgcaatcatacttctttaatcttcttcgttgttgttttttttttcaatcaacattcatataaatttattttgtttttcttgcttttatatgtgagcttctaccttgaacatgttactgttgttgtaatatatatattcaggtagaattttgctacttgaattcaaaagcaagtcgaaaaaagcttgtgagggcgttgtttaatgttccaaggacttcattggaactgttgccgtactattcacgcatggttgccacattatcaacatgtatgaaagatgtttcttccatgctcctacaaatgttagaagaggagtttaatttcttaattaataaaaaggtttgttttaaatatatttgtatgatactaaaacttgaagtggatagtattctaaaatatttttttgttgctgtcattcttacgggcgaggatttctaattgaattatattttgctgcaggatcaaatgaacattgaaacaaagattagaaacattaggtttatcggggaactatgcaagtttaaaattgcgccagctggccttgtttttagttgtttgaaggtaatgtcctagttgctggtttttttcatttctattagatttttttgtgttcttttctttcccttctcttatagatctgtgctggaattgcaaaaaatatttatctcttttctgtcatttcctcgaatgttttctagctgcaagatagtttacattaactatggatgtaagtttcagtcagctataatcttgtatctatagtagtacttgatgtttgattactggatagatgggctaataaagtggctactgttgttcaccaggcttgtttagatgatttcagtcatcataacattgatgttgcttgcaatcttctggagacctgtggtcgttttttgtatcggtcgcctgaaactactgttcgaatggctaatatgctggagatattgatgcgtctgaaaaatgtcaaaaatttggatcctcggcatagcacccttgtagaaaatgcttactatttgtgcaaaccacccgagcggtctgctcggattgctaaagttcgccctcctctgcatcaggttcaaatctattccaccatttacactattttgtatgcctcacctaaaacccatctctcatctccttttttttttttcattttcttttttgcagtacataagaaaattgctattttcagatcttgacaaatctacaattgagcatgtgctgaggcagcttcgtaaattaccatggagtgaatgtgaaccctatcttttaaaatgcttcatgaaggttcacagggggaaatatggccagattcacttgatagcttctctcactgctggcttaagtcgctatcatgatgaatttgctgtggctgttgttgatgaggtgaagtttcttctagcttcccatactcttttggcattatagtttactggttcttaggacgagtatatctctgtattttttgttgtttcctgataaatcatagtgataggctctagttttcaacaagtagtcttgctgcattccagttctttggcatcatgtcttatgcttatcagtacaaaactctgagaatatttctatcattcttttccatagaccccgaaccttgttttaagttttaaatgcaaagaagagaaaactgtatcaactaattgagtgaatagagaa

SEQ ID NO: 16117 - DNA, 5312 bp, Cannabis sativa
ctaaaattaatagttaaaaaaagttccttatcggtagggaacttttgctaggtcctaccatagtcttgtcctataattatattatcttgctagttactctcctcactataaattaatattgtgttattttacaaatagttagtattattttttaaaaattattattttaaattatataaaatttaatatttaattatacaaataataattagaagattataatcaccaccagcacttttttctttttcttttttttttttataattatatgccttttactttttgtaaaaccaaataataataagttgaaaagaaaaccgtagaccaggagttgaacaaagacttgtaataatttagtgataaaacgaaaaactatcttgataaggtcaagatttcatattcataatatataagagactaaacacgcactacctagtttccttatttccttgcaacttcacccatcatcatcatcatcatcagtccattcatgaataatcatgaccacaatagaaatttaaaagcataagcatgtagtcatgactactttttatttttcttatccatagaaatatctctttctttagtacttaaaaaaatattgggacacaattttatgtactttcacggaatgtattccgtgatacattaaatgggtcttaggatatattatatgatagtttcagagtacgttaccattttttaaccctaattactccgagatgaacccctaccctcaaatcaaataactctctcatctaaaggctgccgtacatcacggtatacattccgtgaaagtacatcaaaagacaaaatcgtgtccttaaatatattatatcttaaattaattttttatatgaacgtgtacgatcgagttcaaaagaaatattcataccttagttgtattttcaaaattttaaagaaatacgtaggagtacgttaaaacagccggaaaaattcaagaaaattgtacttataactcaaatttacactctacactattaatatttctcaattcttaccagagtataaattacatttatactatgtgcattttacttttatattatgtttttataaaagaaaaaatatatttcatattgtccgagtgatatttaccacttctatcacttttttttttcttttcttttcaatctcatcacaggctaacactatttgttcactcatcatttcatttttgttttctgttttttccatctctttcatccttaagctcttatctctttttcattttttttttagttttacttttcttttgtcgtttgaaaatttcagacacgatctaatggaagttaagaccctttgttagttttgaactccatttcaccctgattcaattattttcttttgaaaaattatttccctctttatttgatcaacattcccctataaatacttattcttcccatcaatggttgttactcgttctttctcttctttctccaattgtaaaaaaaccccaaatagctcctaaaaaaactttgaataagtcggccatgggtaagaaaggcattgataagaaaaaaaaatttagagatgatcctcctagcccacatttcctatttcttcaaaaaagaaaattcttaagtgattatgtggaaaagaggaaatataaacgttttaaagcgtttattgaagattcagattctgattttgaagaagaagatgaatatattgagttagagaaagtttcaaaagtatttagctttatatttttcaggattggtgggataatggtgctattttaatcagaattcaattgttttatttgtttagtgtgtgtattttgtgatttttttttttgtatttttgtggaatatgttgttttaatgttattttagggtttttgttcgtattttttccttacggtttttaatttctgattttgttaatcattctctattttttaaaaaaaattattgttttgttgtttagtattttctatttgttgtttagtatgttatattttttatttttcatgctttatacagttgttttgttgttgatttaagttctttttaaaaattatttagtaaggagaaagtttctaagtcaaaggtctctggtgatgatgttggagttcccaatggcaaaagaattattgaggtatagtaattttttcttggattgtgatttttatcgattactttttttttttttttgctgctgtttaataggatttttatggtaattgttgcaggattggagtcctaagtactttcgctctgatcattaccattcgaaagttatttgttctgggtattatagggtcattcggaatattttaaaagttttaactcttcaaattgaaatattttcgaaaactatatttggtcattttcttcatttacttaagcattcagtgcatcttcaactctttcatagtctgatattaagagaggttcaacaacctaatgaaatagagttttgggtgtgtgtgttgctgtgaaatttcttaggttcagtacagaggagtttgctttagttacttagttaaattgtcatgttgagtccaattttttggggttttcgcaggatagaagcattcttgtagaaaagtgtttgaagggtaatgataaaatcaccaaaagttctattcaagttgcattcaatggcaagtactttggtaatgatgatgacattgctgtcaagttagtagtattgtactttgtacattgttatttgttgggtggtcctcctggaaaagttgtgtctattgaggaggttgacataatgagtatggttggggtgaggagtgttatgaaatgacaatcgagttttgaagggtaagatcaaggttgaaataaagaaatgttaggagcaaaataaagatgaagattattataggttgttaggatttccatatgtaatggagatatggtttttcaagtgttgtccatatgtggttgacagacttgctttgcattcaaacattaggattcttaggattctcaattggtctcaaatgccaaagcttaaggttatgcagttgaagttgcataacatgaacaatattatattcaaccgaccattgagtcaagtatatgtatattgttctattattattttatagttgttctactattatttatgttatatattgttgttacgtttgcttttttttttcttttattattgatatgtgttttcattttattttatttttgttgttgtagcttgaactcaataatttttgtccaattacagaggaaaaagacaagttaattttttttattattttctggaggaaacacttgacttgttcaccaaaggggaagagaaaagaaaatttgagaccattctaaatgtttccacaaattgtgatgatgttgactcgtcttcctctaaggcttatgaattcgtatctcatattgaatatgaagatttacaaagagatatttcaatggttcttagccagcagaaagttatcatttttgatgtggctgagttgaaccgaaaaattgatatctttttgaatgtatgtatgtatgttgttttacaattgcttttttatttttatattttcatgtaatttttttatttattaatgacagcgtttgaattctgatcagaattcaaatgatgtgcttcgcacatttgataatgataatcaagacattaatgatgaggaggctgaagatgatggtcatggttatagacatgaggatggtgatgattcaaaacatcatgatggcaaagatggcgatgaggcgaataaggatggtggggacgatgtataagattatgatgatatgaatgaggttggtgataatgtaaaagagggtggtgaggataatgtacctgctgaggacggtcaggatgatggacatgttgagtttgctcatgaagacacagagaaaggtgaggttaatgttggtgttaaggatgacgggaaggattctgagattgtgaaagattcaaatgttgctaccgaaagaatgagaaatgattttacattggttttggatgtaggtattttgcaaaatatgaatgaggttagtgcttattcttattgatcaactttggcatgttgatttttagtattttataagttggttatttttaagttgtttttgtatgtattgaagcatgattttaatttcaaaggatgatgattattttgttgatgttggtgctactatggcttgtggtgtccaagctattgagaagttggcatttatttttaatagttgttttattgttgttttaggtttgttttaagattttattttagttgttttgatattctttatgatcatgaattaagttattttgttctagaaggagtgttctttcattattgttggtgagtctaccatgtcttctggtgttcaaggtgtggaaaagaagatatggtttttaatatagtgtttttttattgttaatttggcattgttttaataatctttcattcgtaattttttttttctttgtacgtgtatcttgacataacttattgtatcataggctcaatcttctggcaaagttgctggtgattcttaccgtgatgatttgggtgcaaatgatgtttgttacattattttcaagggtactctaattttagtttctagaaagagggatagaaagatgagctattttaaagtctacatttatggaactaggatttggtgaggctaatgtagattcaagatctgaatctcctgatggatctgagtacaaaattgtgaaatacgtttcggagttatgtccgttggatgataaaattggtgaacctattgatccatatttggaaactgaattcgatgtatggctagggcagggactaagatccaagaaattaacgtaattgtttattttattgattagtttcttgtcatatttttattatttttagatttattgtatcttaatatatatatatatgtatatatatatttgaggcttttttatttatacttttataattgactttttattcatttataataatataaataacataatctcgaaatagaaacagtataacctcaaaatggaaataacttttataaaaatgaaaaaaaaatctaaaaaagtgaaaaagtgcagtatacatggaaattctcctatttttttttttgaaaatctgagtttttacaaatgtcaataataaatacgaaaatataaaactgtatacgtctgtagaagcagaaagtaattctctcactgcaaaaaccagttttttagcgacaaaataaaacagacaaaatataaaaataattgccaaaaattaaatcacttgacacaagagatttgtacgtggtatgagtgttcttccgaacactcctagt

SEQ ID NO: 16118 - DNA, 8534 bp, Cannabis sativa
  modified_base (3886)..(3888): a, c, t, g, unknown or other
aaaaaaaaaaaaaaacaaaattggactgtggtgacatacactatactacaaaagtaattcatgtatattgcacctagctagctagctagttgagatgtgctatctaaattaaactttagtgttattaatttttttattatatgttacatattttttttttgaaaaaactaagataatgaaaagtataaattaacaaactattttatatacgtactttaacttttctctttttcgttgcttaacgctgacgcttctattgtacaactatatgttaatataaatattaacaattatcttacatataacgtggaaaaagctaggaatactcgtgctcccaaccaggtatatatgtgtactgatcattaattttctcccatcatcttatgtcagtatccatataaatatgtatacatgtatatattggatggtacactagctaggactcaattatgtatatatatataatttatactttttagaattgttatttagtattttaaagtcttaaatattttattaatatagtgttttataattgattagtaatttttaatatatatttatcaaagtaaaatgtgtagagttgaatattgaaatgcaccatgtaatatttcattaagtatttaacacccttaaagtgcccgtaattagtatttttcggaattttggtttatacatatatgctaaaaccaacccgttacacttaccaggaaaattaacgatcagaacttttcctatatcctaggctggcacgctttttgcactatcatataacttacaacaaaattgacgtttacaacttatttatttttggttctagggatatagatgggggagcgtaatcaagtatattaacgaaatgaaatgtccatattacagtaataataataataatcatcatcatcatcatcatcatcatcatctacctaagtatattcttaagaaaattaatggtatttgtacggtctatatttgaaagggtactactgattcgggtaaagcttgtcctatattgatgggaaattaatttgtaaagctaaagaagatgatgaccttgacttccaaaatattgagagcaatgaaatgtgctagctttgagtaaatatgtttgggacattgctaataagaggacaatttgtaggtaaaaggggttcgagcaatatgcatgtggagctatatgaggctccaaatttctccaactagtattggagaaaaatagtaaagataaaaaataccattagaagcaagatagaagaatcagactttgctaacttgaatttcagtataacaagaatctgctttcaaaatgtggctgagagatagaagtgaaaggaaatagttttcctttatttagagtagaccaagttatccaaaacacaaatttattacttgacgtgcttgctggaataaacttcaaatcagagatcatttgcaccgttttggttgcattgatgaggtgaattgtttattctgtgattcgaatttagagactcatcatcatttgttcattaaatgcaattacagtaaacaaattcaggtggaaatcttcaatttaattgggctaaatgttcagtgaaatgagctaatgacttggttgaagtgggtgaaaagatgcaatcagcctaaaaggaaaagaaaaatttatgtagttgtccttaatgctttggtgtataacattgggatgctaaaaataatacattatagaatgcacaaaattatattgtaaattttcttgtaaataaaatcaaaagagaaatttattttaaactttctctttttaaaaaacaaaaaactaatatagaaaatttcatttagttagttagcttgagtatagcttccattgttataccttgtatattgttgtaaaatgttgtttggtggcaataaaatttttgcttacttacaaaaaaaaaaattaataaaaatattataattaatttgtagtgggaataatattgtactaaaggccgtatacatgagctagctatatagaccaatccagcaatatttatacatatataagatgaattatacatattactgttcatgctcatgacttacgtactacacataatcttgatgaagaaattataattaattaactagtgtttggggtaataattaattttccatgtagctaggattaaggagaagaggacgggaaagtgcttttaggtgcagggttttgttttctgggagctgtacaattctgctatggagagtacgaactcttatcaatagtaatacaggccagcaataaagggcaataaaagagagtaatatatatatatatatagtacgtacgtaacaatgacgatacagcatcaattctttgtcagactatccatgtgcaattttatttatatgaagaaaaagctttcttatgacaaattaatgctaagggctagttattattgtaatttaattaatgttagatctcatatttttttttttcatttaataaataatataataattgtatatataatgttgatacgttataagatagatctaataattatattctttatatctattctatattctatataaattgtgtttatgtaaggaaattgttaatttaacaatatttttaaagttttttacattaattttaacagaatatcatattaattaacataatattttttattaattttataatattattatatatatttaaaataaaaattatatataatttatataaagaaattttaattttaatttaaaatatttaaaatatgattgatatttttaattatacttttaaatttataagtttaactttaaattaaaataaaagaaaaaattatgtagatattttatataaagaaatttaaatttaaaatattttaaatatttttgaccatatttttgaccatatttttaactttatttttatttattttatattttaaattattataataaggaattgattgcttactgttttaattagagtaaatagattcacacacctattcttcgtaaagtttggaaataaaaaatatttatattaaatttacgaatccaacatacatatagatacactcaaattttgttatgtgaattttaattaagaatatagtaaattgcaacatatgcattatcacatatattacttaattaagaaaaaattaaaaattttaaaaatacatatatatatatataatgacattcaaatgatatattaatatagcaatagttaaaaaaaattagttgaagatcaaaatctcaaattttatttcaaaaattaaacaaaaaaatacattacctagctaactaaaaaaaaactaattatatcaacctaaaatatttgtatacacatatgttacaattattatcatctcatcataattataatatcttagtgatagtatataaaataataatatggataattatttggaagcagtcacagtgagtgactggcaaatggaaaagttttcagccaatatatatgacagatgagatgtggtaccatctctttattttgctatatggcgccagagcttgttcataacaagaacctttgcttttcttttttgatatcgtgcagttgacccccttacaatagtggctcatttgtgaaagcttgtaacaaaaagtaaactactagggtcctacccccacagttttgcttaaaagaatatatgaattaattacgaacacaataataatagttacatctctttaaactaattatcaatggtatatattatccaaaagttaattaacaagagctagctatattagctatactggcactatgtatttgttttaattattatagatttatgatcatatgttgcaactatatatatacatgtaatattttgtgtgtggtgtgggagagcagtgtgaaaatatatatatatatatnnntatatatatatatatataacagggagcagaagatgacaagagaagttgtctaaggctgcgaaaaattctttttcaatttcaagtaaaatctctctacgggtaggggtagctttttccatgaaaatgagtgaaagcagatattgagtctctgcaaatcgtacagttggggaattagattcctacacccaccttctgatgcccttctcaactatcttctatgtatcttttggtataaaattatttgtgcaataatttgtatatcatatccacgtttaacatgaaaatcctctctttccatgcaaaatattaagtaatcccaaattaaagtcagcaataattttattaacagaaaaaaagattatgtataattattagtgtgttttatatgtacaatcatatgcatgctcatgaaattgtgacattattaacattttaatatcgaatctcttgtttttttttttctaaaaaaaattgtacggtagaaatattacatatatattattaatcatttattatttttgtagtaacaactggtattagctcggtccatattctttttatttttattttttttgaaaaaaaatgtaaaatttattaagaaaaatccgttgttatagaagaactcaaaaattgcagacgagcatctgtccaaacataatctcctaaactaataacagaggttgccagtgtatgagaaaccccattcgctgatcgcggaatgacactgcaagaaccaccaacaacaacaatgtacaggtaatacagaatagatatctaataaaatagactaataactcaaattaatgaaatgcttattaatccagaaaattgtcacagtagaataactattaataatggagatattgaaaccaaattgatgcgaaagagtcaagcccagacgaatgacaagcagctgtgccacattaacagagaaatcacctaacacacgtgatgatcacaccagccaaaccacaccttctgcatccgtattagtcctcccaaacaaacaaagcccctcctccgaatcaccaaagcatccgtcgctagagcaaaggattcaggaggaggttgcatccattgagtagttcggtttacaactgggttcgctaggcccaaatccaaatgaaggcctcgctgctcataccccttaaactctgccagatggaaatgggctaagtctggaagaatatccaatattgactgcttgttaccatataatactgaattcctatcataccacagccaccaaagggttatcatcattaattcaaaagcctcgggatagcctgtcaaatcgtaataggagaatttcttgcattggtccatatgcacgtccaatcgatgccacactggaatcaaatcagaacaaaaaattgagcatgcttcggagtttcagcttcttctccacgcagcaaatatgtacccaaactttccaggcgataagttaagttgctactggtaatgccaaatggaacaatacgccaaaaaaacactttcaccattggtgatagattgagattcatactccattccaccaacgagttaacctggatgaatcttcactccctcctcaacttggagtgaccaggccagcgagtagccactcttcatgacattataataaaccccatttctatcgtagtgcaagcaccagccatcttctgcctcacgccttgctaatggaatagacaaaattacatccacatctatttgcaagaaaatctactgaagcttctccatttcccaagtaccagatggaagaataaactcactcactcgacaatcatcattaattctcctcgtgattggttcttgacagccctaccttgtgttccatctgtaatagatctccgaagactgcacttaagcaactccaatcccagatcaaattcgaccaaagatgagacgaaccgacattttctgtggcctcaagaatagagcaatttggaaaatatttatgtttcaaaatccgagcagacaatgaatctggatatatataaatagcctccatactttcttagccaaaatagcttgattaaaaagttgagaatcccgaaaaccaagcccacccatcgtcttaggctgacatactatttcccattttacccaaggaatcttcctttgatctccaaatgagctccacgaaaattgtcgcacaatagattttaatttttcacaagtttccaccgaaagcttaaagacactcatcatataagttggaataacttgaagaatagatttgataagtacttctctcccaccggctgaaaagaaattccgcttccatctcgcacatgctttctaaccttcacaaaaatataaaaaatatatataatataattaaaagtgttgttcttttattttttaaaatattatactttaaatttaaattcactacatattttttaaatttttattttatattaaatatgactatataaaatttgaatttaaattcattgtagaaaaaaatatttatattatcattttatttacataattcaaaaatatatatatttatattatttttcttggtaatatattttttattattgtttttttaaaacaataaaacagaaagtgtttatatatattatttttaaagaacgactattatgacgtgtacgtgttacatttactaaaaaatatttttgaattgttattactgtttaaaaaaaataaaaaatgtacaaaattttttaaaaaataaaaaaatattaaaattataattaacaacaaattttaaatattattatattctttttaataaacagtacttaattaaaaaaaattaataaaaaattatattatttattgaataacatgaacaaaaaaattaattatacaaataaaacgtatataatcaaaataaaaattaatgatataactaaattcattaataatattaatctaattaaccaagtatataaatatatataaattagttgcaacacattataaagaaaattttctaaaaggtcaccattggcgcaccaataatcaaggggtagggttgtgtagatataaattttaaaagagagatctccttttttattattttgtattcagtagctagtacatgtgttttttaatatttggtcatttcaaagaagaaaaaaaatggaagatgaatatataaaaagctctttatggatgtagatatgtgcatatatatatatatatatatatatatatataaaagcttctcccacaaaatcaatggacacaattaatatacgggttaacgtacttggccaattactatctgtacaagttacttatagagacaacatcattacgaatattcaggtatgaagattaattttagatattctacacaagaaaaagagaattcgtgtagcgtatatatttattgaatgtaattttcttatccttcaggataagaatcatataaaattgattgttcgtagtgtgaatattctacctactatacatattatttcatatacatattcttatgatcttgataagatcatataatattaataacataatcagagcatcatgcaagtctgggatgatacaagacatacacgtagttttgccttattggaaaagaagaaaaagtgtatacatagaaaattaattaattaaaaaagaaaaagtttcgtgaattttccaatcaataagtctacaaaaatgtagtttattataatctcattggttaacgtactaattatacttatacgattacaaggatttagattccacaaatgttatataatatactacacaaataaacaatgtgaatatccaaagcaaacacaatattaatatatatatatatatatatagtcgtatagctagcaatgcttcattttccttttttttttcgatcgtctaaattggtatatattccataggggtttatagctacgagaagtgtgtctgtgtgagattgggtcccacgtggcaggtgacgtggcagaaggaatccccgaccatgagcatctgttgaaaatgattgacattgattttcctttcttatttttctcttcatatctccacatcataaggctatgagtgtgggccgccaaaactatgcttttctttctttttctttttccacccttctcaattccagtttctatatacatatacatattcccctcttttattgaatttatataattatagttaaataaatttggaagactaagacctaggtcgggtggctcctcactcatgcaatgtgattgagttttttattttttttattttttttcctgagagaaaaataaagggttctttgtccaactttaatttgtacattattggctctctatcaagagtcctcaaccacatgatgatcttgttgtgtaaattttcttctatgcattgatgtaacgaaacaaaaataaaaaaggtatgaggaagctagtcatcattttaaatttctctagcttagcgcttattactatcaatgtatcaaagcgttggctattggtaggctgattttagtttatataaatatatatttctattctataaaaaatgtggctagatacagaatttttagtttataagaaattattgcgtaatttttttttaaataaaaaaaataacaaattattacatgttgtcacgtaaaggtcagcatgcatgtagttagttaaacttaaata

SEQ ID NO: 16119 - DNA, 7490 bp, Cannabis sativa
  modified_base (3574)..(3574): a, c, t, g, unknown or other
aattacaattcaaatagaagtttagttggaagaaatatacctgggtgactttttggttcttacaaatagttttgatatgccctcattgtttgcagttggaacactggttggtttgtggcgttttccttaatttagttgcacatgttggaggttcatttacttctctattccttaattttttgggcctcctaggtaatacagtttcaggtggaggaaggattggatttttgtctttgttttcccattcatcaggactaggcattggtgcaataccctttgcataggtagcttcaaaggcttctttcttgtagcaaggatccacaaatttgtaggcatcaagattagacaaccacaaacaagctaaagcatgaccacatggtatacctgttagatcaatgatctacatgtacatgttcttgtctctaaattaacagataatacttgacccattatgtaggtaacttgaaatgatccaccaattaacttagtacaaatgcattgttgtgctacctttttgttcttcttaatgatgtcaaagatcctctttccaactgaataattctatttagagacactttctctttgcttgcacgtcctttccattaaccaaaaatgtattgattctaaaagagtgatgatcattttgtccttgctatccaagattgctgaattgaagctctcacacagattgttaagaagcatatcacactttactgaagtcctaaaatgtgatttcgaccattctgtgggtgcctttttcatcaaccaattatatgctggttcagaaatctcctttaagtcattcatttttctttagaactcttcagaggtagtcgatctagcacatgcccatagcgcttgcttcaacagcaatctaggaaaatccttcttaaagttttcataaagatgtctcacacagaatcttatatcagaatcttcaaaaaatgtcccaaagctatttcaaggcctttctgtctatcaggtatgaaagtgaagcttcttgtgtctaccacatttaagtcctctttaaccagccccaaaaaccaagtccaactgccagtattttctttctcaacaacagcatatgcaagaggaaacatactattatttgcatctattccaatagcagcaagtaacatacctttgcaataacctttcaagaaacatccatctaatcctattatgggtctacaatacttgaaactaactttacatgctgcaagacatatgtacactctttcaaaaactcttttctcactgaccaagttagttttgatcaaagttgtgctacctggattgaggttcaatatttgggtacaatagttgtgaagaattgcatattggtatttgactgagccatcaatgatgtgtctagctttatttttagctcgataaaaagtctaagaggaaactttagagtacttactatcagatgtcatttgtctgtaagactttaagttcatgtttgggttttgtctgaacttctccaaataatgttttgcaatccaatctgcatctactaagctgttcttgaatacaattccacaattatgctcgtctttcattttattgatcctaaatgtggtgccatcatctctcattcttctagcataaggaatccatgtacacccattgcctttgcatttagctcgaattcttaaactatcattggatacatacttgaattctctgtcactggtaacaaaataatccttcaaagcttttcttaaatgctcattagtagggaacaacatgccctctttgaacttgatctcctcaggcttagtccttggatcaaattcattgttagactttttagacagatgcgcatcttcaccatcactaggcaagcttcttaattcatcctcctcttcgtagcccccatcagagtcttcttggttaatttggctgcaaaaatcattaatagaacccccaccatttacttggatctgttatgctctcctcttctaagtcttcagactcaggagcatattcttcttcctcaaaatatacaccatctagttgggcttctgtttggccttggatagcagccccacttgtttgagtttcaacttcaaatgggcctactaaaacaatctcttcttgggcctcacaatctgggaaaaagaaaagatacaaacaaaatttttattgaaaccattaataacatcttaacataaatattatataattagaagtaacaagaatgaacttctgaaaagtagaactgttaacaacaaccatatcttatgttgtatacaaattaatacattatacacttttttgtcttttgaccaaaccaatataagtagctaggatattaaaaagtgagtgaagattggcatgtggatttgaagcctaaaactactataagagcagtaggatatatcagtgatggatgcttgtgacttgaaagattacacttgttcaagtacttaaattacttcaattaatatttcactgattacacttgttcaagtacttaaattatctcaattaatattttactgatactttgtctttgaaaaaaattagtgatgcttacttatctataatgggaccatgatgcatgtttattagttaaagtaatagtaatatgctattacctaagtacatgaggtatatctacaataatatataaacctcaattaaagacatcttcaacggaaagaaagaagaacctttatagatgataatcaactagtcaagtagtctaataaagaccaaccaaataaaactaatgcaaatattctgtctctacgacacaacgatagaaatgacaaacatgaagggtttgaagaagattgaggatggccactaaagaaataaataagatgggcggatacaacaatttggattactggaactattgttgatttttactttgctttttcaatttttttttgaatgaaattgtaatttgcaatataataactttcatgttaattcaagttgctttgtaataacctatttactcatgtagtttgttatttgtctcatattattttggaaaaaggattgatggaatgacaaaaaaaattatttttatttcaaaaaaaaaaagaacaaagtgacaataacagtaaacatgtacatttccaaaacatacccactatcataataaaacaaaataaaggtctcctaccataccagaaagtaattatacaagcaaataaaattaatatttaacacagattttgagaagaaaagaaagttatactattgcacacaatagaaaaccccaatcatactccaactcatgtgttttgagataacccatacaaaaatcactatcatactctttatctttaacaagaaagggaaaaacataaaaagtcatatgttaagagaaaagtaaaatcacataccgtgataatcgttttcgttcattgatgttctctcaaaatctgagtattgcaattaataatggagattgctaaaaaaaattggtcggaatctggtttaagaagcgagaaggtgcgaaatggagattcggtttctcatcatggtggtgtgaagtgagactcttggtcgctcgtctggtgcgattgaaattcttttttttttttttttnattttatgtattaaaggattattaatttttttttgtttttattttatgttttaaatttattaattagttttatgtaatgtttaataaattaggtgaaaaaaaaaaagaatcaaactaacttctgttagtgggtaccaacgacttagtgtaaaaaatgttttgagtattaatgccgcaatttttaaaaattgagtatttattagcaacaaaatgaataaaatgggaaaattcccaatttaaaatgattttatttttaattttttaacaataagcaacaagaaaagggatgaggataggaaaaaaaagtacaagccaataaaaacatcataaaaataaaagttataaagacattgacaaaaataccatatttttgtataaattcaatctcattactaaaggtttatagaaaattaaaatatggtacttaaaactaggcattgtaaaaataaagcaacttccaccttatcatcaccttatatcatcttgtcaattctagtttcacatctcccaaataaatcaaatagttttcatttttttcaaaaacagacttttatcaaataacaaatagagaaaaacaaaatttattgacatgataaattaattacacatcataattgcctaaaatacaattattgtttctcttaatcaacccatcctctaatcttcccccatctttagggatgagtgtcatcttcaaactttcatttctcctactagttgataacaaaatgttcaaaaattttattttctcaaaaaaagaggaagctaatgagttcgacattatatcttctgattgtatattttccattcgactactttctacattattcaaaccaaccaacttcctatccaaaaatgataaatgtctttttatttcttccatagtaatgcctacatcaaaaaaggataaattattgcattaaagtagttccctttaataataaatattgtatatgttaaaaaaacactaatagatattctaattactttgtaatttgggctaattcgaaaggataataaaaaaaacaatttaatttttttttaaaaaaatggtaatgttaatggtgggagttgagttacaaggtttatgtgcatttaataagaataatgtgtattaatataaaaactattaaataagaaataatattaaatatgtaaattatgcataaagaatgttagtcaaacatttttaacacgtattaattaataatcgggtatactttgagaaaaataaatattaacccgaacatataatattctaccataaaagttaaaaggaaacaattatcatacttaacatactacttgttcttgtaaatataaagtaagacatcatgataattgattttattgtctacatcgaaaagtagtttcctccaccgaaagtcttcctcttccgaagcgtcgagaaaagctgtagataaatcttgttgaacttgtatcatgaaatcaacatagttggatattcccttgtacgaccgagttgtatggtctacgaagctcattcttaaagtcgttctttcatgttcagtttgcatgagtcgacccttgatatcttcacgcaaagcatgtaattctccagtcaggaattgtgttttattttttgaaatagaaaactgattaacaattctaaccatggctttgtcatgcatgatattatgcttcatttgcaactctaattttctatttttgatcatcatttttttttctttaagaaaacgttataatggtttagattaggcatgtgtattttgaaatgattacattgagtaaaacgagataaccattagaaaccaacatagaaaatttcgagttaccattccaagaaaatacaattaactattttatactcattccaacatggtatacataatataattaatgctacttttcttacccactctatgtaaattttttgagccttctataagtctttaatgataacaataacgcgtgtaattaaattattatttttagtgtcatttgtagattattttattgtatttataaatgaagctagtagttccccataaaatatcagtgcccaataccctacaaaatataagtttctttatttgcaagtcacttcaaccaaactcttgactttaggtaacatttattcttttaaatattttatttaataattttgagtctaagtatgttactttatagtatttctacacatattatactgaaataaaaataatttaattaaacagtatactattaaaataataaaaatattataaaattaatctaaaaattataaatattagatctccatattcttttagatattctatagtaaaaaaaaggacatcaatggagttgaaaatatagatttacttaaatataagagctaaggaacacactccctagtaaacgtttgagttgctaacaaaaaacataatttttttttggaaatcgtatataaatatagaataataatatgttaagatcaagttattttatctataaaaaaaattaaatatagaatggttagaacaataataaaaatgatgtggttcataaaaaaaataaaatgatcgtatatgaaattcatttattatatttcaagttttcgttcctatttttctaaccaatgttaaagtaatgaagataaattatcattataattcaatatattagtcaaataaattatagattgaaggatattagaaaaataaaaaaagagttcaaaacattgacactttattttatactagtttgaaatacaaaatggaaataaaaaacaatagttataaacgagctcaaatgatattttttttcttaatgcttgtaggacatatttattatagcaaaatagtatccttcaatgattgtttttgcgaagattctctttctgttttttctcctcgtcaacaagcttaataagtgttacaatccagtagtgctcctccttctcgattgcatagagaagcttttgaatggtgacatgttgttgcttttgaatgtcgattgcttctttcatatttagctttgggatgcatcgcgattcaaaaagttggttaagcttatgccttctaattcgtatgtcacttatgcgttgattaatttcttgcctctttttggagaacttttctgttatagatatttcttaattgatatgagatgtgccgtcccgtactaaatcaattaccttattcaagaaggtatggccattaccatcagccgtaactattttttttttggccatttgcgttttcctcttgtgagttgtcttccaattttctcttaccttttcggtcctgtttgattggattcccttggttgatttccgcttttattgatttgatgttgttcaccacttcattctgccgattttgagtcatttttttttgcttgattggtttgtaagatgagtgtgacaatatagaataaaccttgcatatatagatgacaagcaaccttgattcctgtattctttaaatactcagcttatgaaaaaaaaaaaaaatagacacggttatatatatgagataaataattattttcatttaaaaaattacgttaaaaaagtgaaaatttattgttaataatagatttacctttctaatacagatttgtgtaaattccaataaatttcttatttagagtctcaaaatatatttaacaataattgttaattatactcactacacattaattttaaataaaaattcttaataatatgaagacatcatttaattaccaatactaatatttaattacagtgcacacgttactgatttttgaaaaattaaaacaataatttatttcataaaataacaattttaaaggaagcctaataaaattaaaaaaagggaaattatagtaaatggccccaaatcataggagtatgttagtttatgtcatcttttcaaaaaaatatagcaaatgaccctaaatcataaga

SEQ ID NO: 16120 - DNA, 9760 bp, Cannabis sativa
acgccaatgataagtagttgccatagaaataaacagtcgaacagatgtgactttagcaacaggagaaaaagtatcacaatagtctattccataagtttaagtataattcttggcagcaagatgacctttaagtgagcaattgtgctatctggattgactttaaccgtaaacacccatttgcaccttatgacccgttttctaaagtactatttgcaactaaaacattcatctcttttatcattgcagcaagccaaccaggatgagacattgcttcacgaacaattttaaaaatagtgataaaatcaagagaagcaattaaaatgcatattctcgaaagccactaattttattcaccattagaaacaaccactaattttgaatctgattttgtctctgccatattctcgaaagccgaaaagaattgaaagagaaaaaaaagaaagtgaacaccaaagattgaacacccaaacacgaagaagacaaaagtatcaaaccacaaaatgagaagaaccgttagagaccgatgtaaggaggacagggaagggctgggagcgtgacggacgttgaccgtcaccagaaaagaggtcgggtgtgcccgcacgcgctgatcgggagttggggcatggtggcgcatggggtccatgtgcggtgaatctgattgctggacttcgaggttttgcaggttgtcggctgggcaatctgtctatttgggcagtgagaataaactcacacttcaattagggtttctgaaaaaggaacccttaactcaaactcttaattttttttttaatgaactttaatttcgaatttcgaattacaattttaagtattgatcttatattatgtagagaatgatgaattgaattgtgtatcttattcatgtatatgttatatatttatacaacttaggagaaactaaaataggaaagtatgagagataataagaaatgataaaattacagttgaccctattttctagctaaccaaacatagtttggtctgttcttgtaatgtgttatcagattccattaacacaacaacacattgactttgctaaactttgactaaggttgagcacctatgagaaagaaatatcaattttcagaaaatttagtttatttaacaagtgtatccgtaaatcaaataggaactgtgaatgttattgtgaatgttgaagtctttaggggttactctttgtttgactttgaattgtgtacaatgactgcttaaataattgccttgggtctctatcacttcatagctttttttctttcatttggacacggaagttgaagtggggattaatattttagaaaaagaaacaacaataataataacaataatcataataataataattaactcttgtattatcatgacaggtgcatgaaaaggaatttctgctcaaggatttaactgttgaaggattaattggtgatgacagaagattaggtgaggtctgttcaaagagagtgtatagaattcttatggcacaaagtggatctatcaaaactgatgatgtagagaatggtgctgctttttttgcacatcaatcatcctaaaatgttcattcttcgttgtaagtaatccatgtcttgtttttgttatccatgtctttatatttaattgcaagagaagtgctaatgtctttttcttttatccgtgtctttctatttaagttgttcatatttctctaaattattattactacaagtaaaactattataggtagattttaaataaaaaatcccaacattaagggcatgtttactaattcgcaaggaagaatttttggaaagggaacgtgttcaaagaggattaggggaaggagttaaaaaatagtcatccttcatttaattaattaagcaagtgatttgtttgaattcgtgtttcaaatgatgttcttcactgcataaacattagtatgatttaggtaaggtgaactcagaatcctcactgacctgctattaagtggttaaaactttgttagggttatagcttttgtcctttataatttttttgcaatttaaagttctacaactgttttaattatagtgtttgcttctaattttcgtcggactaattattattattataacaaactagtggaagttttatctatttactttctatttattgggtgagttttgtcaactaacagttaagtttgcacacccagtttatgtttgacatcacagagataaattttgcatgaatatactccacttctaaattgctgacattatcacagctgtaaattaaaaattattagataaagagttcaatttgaaatgcattaaacttatcaatagcttataaaaaccgtattaagtgaaaatggtgataggctgtggtatggtttggtcaacttgtgtgatgtgtcatattatgtgccttatcactttgagggtcactcacccacaacaatattttggccccaccattctttggaatctttgtagctcatttatactgatttagtggaggaatatattatttattattattattaaggggaggaatatattattcagatgctattgccaacaggattcctcgttatgagccaggccttattctaattgcagctatgatgtcctcaccaaactccccactaaggaataagttagaaaagaaacgcattacgtatatataagtgtatttatattatttagttccctccaattttttttattttatttttgaaaggaagttccctcgaatttaatagaagttcaatcttaggaattgattttcagaatgtcctaaattttgatactcgaatatgtttttcttctagtattttgtctgtgaactttcaatttcaaatgtcaaattcactgaaggggacggtaattatattcttgtatcaattcaattccccaattataatagtattcaaattaaaagcaaaacgtgcgaagttcaaaatacattaatgtcgctcttttccctaaaaaataaaataaaattagattaatgtttgtatgaatactatcgagggtatcacaactaatggtaaaacggatgaaagtatgagttatggaaaagtgaagggaatgatagatttgagatttctttagagttgtttttgtttggtataatagcaaggaaataaaataatcttttatatatgtatgtatgtacatatttattagaaaattgtgcatcatttttgccccaactggacatttcctattttaggtgagaattgtaagttaattttctttatatgatgtacatcatggttatagtaggtaatttttttctttttttggaataacttatggtgccaaaagcagattcacatagtaagtagcagtagcactagcactcgtgtaatgactatttggaattttgtttttgacattgtatattttctagaatttcccaaaaactagcaggatatatattatcattaaaaaaatagaatacaatttctaagtactagaaataaaaaatatcctataccagttataccctacttaaaaaggttaattataattgaaaataaataacatttaaatttattctttttaagtatttaaaacagtactctatttttttttttgctataaatttgcccagaatgattattttttgtgggcctaagaaattagcaatctataatcatttcctttgcctcttttcctcctaactaaacaaaaattgcttcattacactccttaattcatttctccatcaatgcctcctgtgttatttagttgagcgagttattcaaaaactaaattttctgtgacaaaattaatgaaaaaactgaattgttactgttattaaatcaaagatttgatcgccaattttttttttatctcagaattgctaaacagtcatttattccattgctatgaactcttaattaaaatcgccctgctgcccctacagctaaataaatttgagaacatttgttgtttttattcatttatttatattattttagaagatttgaagattaaacaaaaacttattattagggcataaaaatgctatttagcaagtagcaacatcacatgtcaacataaccaagtttttgttttcttgagagaaatcaacataaaccaagtttaatcttattaccgtaccactgtatggcaataacaaaaattttcattttgtcacataattatactttcttattttcaaacaatgatatactaaacttaacaatttacacgactgatgttaccttttccataccaagttaataactttgccatacatgacatcaatcgatcaccatttacagtgctatagtaaagtgggaaaaagatttatataaacatatcaatgtcaactacatttatgatttatccctatctgatgcgccatatatatatttatatatatgctttgacatgacctaaaactactcaaaacaattgtgacctaagccgaaatcatgtctgccacataaaaaaatatataaaaaaaaaatttgctatccaaattcagtcaccgagcacaaaatcatgataattcaattctttactcatcaataccaaacgccagtggcccatgcaaactccactaacattaacatatacatatctctgcaaatgttttttgcatgcttttccatacacaagtgccgctttagctagctataacattaatgcatgtttcttagttcttctcacaacttaaaaacgccttcaacttgtttttgggccttagaagtataaaccatggacagaagcaaatcattgccaagccactactccaatcttcatggagatgcccggttcgatttcgaggaacggtccaagtcttacagctttaatggtgacgatgacttggctacttcctctagtaatcctgagatgaagaggaggaagagggttgcagcttataacatgtatgcaacagaaggtaagctcaagtcctctttgcgcaatagcttcaaatggatcaagagcaagtttgtcggcacttactatgatgagtaagaactcatcaaaaagctattgttgtcattgagagaagcaaactaacttctctctttctctcttgatcttgagattgggaaccagattatcagaaaaagttaatttcattgttttctgtacagtttacagtgtccaaacatgttccaaaacaaggttcctgaattaagactccttatgcctatgattttcttgtattaatgttcaaattcaatccaacattgaaatggtttgaattaacttactgatatgacttataatattggtgcttggttttctgggcataaaagttcgaaaaggtggatttgcaatatttataatccttgacctgtattatcagattagattgtgatgtgtaatttgtttctagtgtacaagggctgtcgccatgcgtcataactacaatgttatccacatccttctaactaatatgataataaataattatggtttatgagtttgggatattaatcttttgtgttaattttgtttggtagtagataatatggagaactgaagttagtgttaaggagtagtgaaatagtgggctaatgtataattgtacatggtagtggtatagtaattgatattgttaattagaaaatgagttattttgtttttttttttttgtttgtgtagagaaatgagaaccccttgtggaggttgtctatggggaactcaacggttctcactgttctctaggatcttttttgggtctatatgtagttgcactcggaggttggttatcatgaggtgggagcatcggcggagggttggcttgtaggtctatctcaagtccttgggtggtgaaggcaacatgtatagctcgaactacttcttgtaatcttgaaggtgtccttttgagtggctaactccgtctatcgagtagccacttgaaggcagttagactgtgtttttacttttcattttccagaattgtgtttttaaaagtgaggatagaaaaaaaaaaattgtcatttgaaaaatttaatagtgtttggtacaagttttttaaaattattttaaatttttttcttactaaaataaaattcaatattctacaccataccatgacatgaacccatcctaccccgatctcgacccgaacttagaccctagcctgaactcgaacccaaacaccatactctgggccctggactcgaacctcggacccagaccccaactacggacctcagacctagacttggaccccagactcggacctcgaccccggaccctaaacccgaacccgaatttggatcaaaaaccggggctaggttcgaggtccttggtcaggtctgggttcggggttcgaggtttggggtccgggtcgaggttcggcatctgggtcgggatcggggtctggcattcgggtccggggtctgacgtctaggtttgggtccaggatctgggtttgggattcgggtttgggcctaagtcggggtctgtgtctggagtttgggtttgagtcttggtctgggctttgggtccaggtcggggttcaagaccgggtctaagtcggggttcgggttcaggttggagtccgtgtccgagttcgggtcagggtgagggtcggggtccgggttcgggttggggtctgcgtttgagttcgggttggggttggggtcagggtttgtggtctatagtctgggtctgcatctgggtttgaggtccagggtcggggtcgggggtccgggtctgaggtctaggttcggctctgggtccgttgtctagggtccacggtctgggctggggttcggggtcaggatttggatctaagtcgggtccaagtttgggttcgggtccaggtttgggtccaggtttgttttggggtcggggttcgagtccggggtctagcgttcagggttcaaggtttgggtctgcgtccagggttggggtttggggtcggggtccgggtccgggtcgagtctggggttttaaatttggggtccggagtccagttatgagttcggggtctgggttcgggtccgagttcggatctggttccgggcctagcgtccgagaatgttagcaaaaatgtaaaatataatattttagacaaaaaaattgtttttggaaattgaaaacaatattttcaggttttctagttttttaaaactcagttttttaaaagattggttcctattagtctttaaaaactgttttttattttttaaaacaaaaaaatagtttttaagttatgaagccaaacaaccccttaatttctcaagttgatgacttgcggcgtgggagtgaaggactcttcgttctcttgttcttcataacattccccctagtcatagttatatcctccatatttgttacctttatagatgtattcatcattgatctcatcttctccagttgttggcggtggtacatcagtgcctctcgcgggtacgtggatattatctgttagatggagtgatctatttttagggccaaagggtgagacactattagatgtggcttgtaaatgaaaaattttctcttcaaactctcaatgaaaatactaaaatattgattggggtttctacaaaattaaaaattagaaatcagagaagagagaatgaatatgaaaatggacaacacatactaattttacatggtgaaaatttttaataaaatcttagttcacaaatttattgtattagaatttaaacttttacaacgataaagttatagagtgattttggcagtatttatgtttttgaaatctgggatatatttacaagttataattgatcatatttatagacaacgatatatgggctagattaactaggccgagtaaggagttaatcctcattaatctcactaatacagggaatatattgctaacaccatttattttcctaagggcctaatggtttggcttagagaaagggtgtaacctgtttctaactggtcttgtctagttgtgatgtgataggcactggttacgtttttatatacaagaatttagaaaatgtgtgtgcatcttttgttagagtaatgtgtatccaaatttctatgtttaacttgctttataagaaatctattttaccaagtttatagaggggaggggatagcatacagtatgtgccctttatatcaggagccacatgtggcctatgcagatatgaccagagacttttggaagcataacactctaaaagtggatttatggatcccctcactcgaggaacggagtggatttatggatcccctcacactgttagctcaagcatcactttcttttaaattttggaataaagcatatagggctatagtttttctaagtaatagaacgcctaacccacatctcaaatatctatttcctcttgaagtgttgctctgctcaccacaagattactctgttcttaaagtgcttggttgtctatgctatccaaatgtcagaccttacaattgatcaagctgtagtttaggtctcaaccatgcccttttatagggtacaacttagcacataaaggctacaaatgcttggctaaggatggaaggatttacatttctagggatattttgtttgatgaaactaatttccttattgctttaccacttctcacgtcccttcccctcctatgtagtccactatcttctctaaagcttctccataagttgtccttcagcatatttctcaaacctgagttataaaccccttgtaaattttcctgattatatcccaactaatgaggtcactccaagcagttcatctcaatctgacactggaccaatctcttctgatattgctcatgtctctactacttttaatgcacatgttattactaacaacaatcatgcatgtccttccttagtttgtccacaagaacctcctcatgttgagccatgaccagcaccaatttctaaaaatgcagtgtctttaggtgtctttccaaatgctattccaacttctacttctacacagactgttgcaccaccatctgagccttgtgttaacaatcatcaaatgcagactagagctaagctcttacctctgcctctaataagtccgcactcaaggatccataatggtcacttggaatggatactgaaattcaagccttgaaaagaaataagacttgaattttggtgtatctacctgacaatagatttccaatagggtgaaaataggtctataggattaaagagaatccaaatgggtccattagtcaatataaggccagattagttgctaattaaaggatttcaccaacaagctggttttaattttagtgaaacttccagtctagttgtaaagcctattaccatcagaattatgctcactttagcagtaacaaaagggtggatagtgaggcaattagatgttagcaatgcctttttgaatggggatcttcaaagagaaatttacatgacacaacctactagttttgttgatcatcaacatcccactaatcatatttctgcaatgatccatcaaatagatgaagaactcgacaatgaaataaattggtcatcttcttttgaccaagaagagacttttgaaacttggtctcaagattcaaatactagtgaagatgacataccgccttattttatggcccaatttgcaaaagaatcatattcccaaaccgagcctattgtcaaaagtgaagacaaaagtgaagaagaacaagcagctacaataaaaccagaatccaatcatcatcaaaagagaatattccaaatttcaaacttttactgttgatgacattctcccatctaagtggcgagaaagattccaagaattccaagcttggcttagcctggggacacaaaaaccacaggcacagacggggacg

SEQ ID NO: 16121 - DNA, 6124 bp, Cannabis sativa
  modified_base (5958)..(5966): a, c, t, g, unknown or other
cgtaactttcttctagtatacataaatgtatataagttttttaatggagcttaaatttattaattttctctacaattttagctttactaatagcaaaacaagtcacagtgggtcgacacgaacacgacacgattttttatgagtcgggttagggttgagataattagacacgagtcaaaaaaatggtcgacacgcttgacacgaaatataaagcgggtcacataaaatatgatacgaatacgacacgatgacacattttgccacccctactcttgttactcccttgcttctaatttccataaccattgcatttgaggacattagtttagaacaaccttccccatcaaatcttatacaaatatatcatgtaatatgaacaggtaagccagaattgtcatttaccgtaatataataattagtgttaagaaaacaaagccagtcagccaagtcagtcaaagtaaccatttttcatcaggttcgttgatttttcttaatctcctcttattctgagcaaaacccaaaaaagcaacaaatcttacctaatcaaatttagtattttgtattcggtgaaattattattattattttcttaagatgtcatcatcatcagtcagagtatccacaaatcacaaaccaataatgtttagtctaacttatatggtgtcatgaatttcccagcaatctccacttaaaatcaatttctcaaatcaaatgattatattacattgcacgtgttaatattattcaatgaaacattttcttattagctacgttttattttcatattagaactgagagaatgatcagttgataacacaacagatatgaacagccccagttgaacttttttgttttgtgcatatatggcagaagccatctgccgcagattgtaactaaaaacttttttaaagtgtcattttctttaagactaaaatcaacctctcactatcaattcaacttttgctggcgtggcattttgattttgctccatttgttctcttctcttaataagcttttcttgcctttgtttatttccttagacaaatcaatatgctgattgtgtgtgtatttataatcatatttgtcattccaatattcataatttacaacccttttttcctctcatagtttatgatcaactttaatctgtttttataaccaagatactttctactccaatatcatcaacatgagaaacgatgatatcccatgttgtgaactggatttttggttgtttctagccataagttttgtccttgtgttattttcaggcattacttcaggccttgctctaggactcttgtccttcacccaagttgatcttgaggtccttattaagtctggtcagtttcatgaccaaaaaaatgcaggttaaacatcactgtatttcagccataattgactcagtttcttcttcttctctctttttttgttcattttcttaggtttctttctcttaatgcagcaaagattctacctcttataaaaaatgaacacctacttctatgtactcttctaataagcaaatcactggcaatggaggtaggaaagccactcagtttttcaaatactacaagtcaagtaaatttattattctaactacttttcttcttattcaaggcacttcccactttcctggactcaatccttccatcttgggctgctattattatgtcagtcaccctcgttgttgcgttcgcagaggttagtgttaagaacagcttaatattcttctgttagactcaagattgaattattctcattaagagctcttttgtttcttgttaatcaatttttcatttgtaggtaattcctcaagctgtgtgctctcgttatggactttgtattggtgcaaagatgtctagctttgttcggttgcttctctttatcttctttcctatatcaaaaccaatcagcaaggtgagtgatctaatgtttcaattgtttgataatgtgctgctctcctattaaagtgttcttagtgttggggtatcaatccaagtctcacgttagaagaatatacaagagttgtcttagatataagcgttccaccttctttattagtatgagactttttgggaaggtgcccaaaaataaaaccgtgagggcttaggccaaagcgaacaatatcatactaatgtagaagtcaaggtgaggtagcgacccgataaggtagaaaaacagggcccaacaaatagtatcagagccaaagctgaaggagttgtcttggatataagtgttccaccttctccaaagcgaataatatcatactaatgtgggagtcaagatgaggtagcggcccgacaagatagaagaagggggccaacacttagtttataccatcaattgaagaatagtacttttctttatgctccttttttttctttcatatatttgaaacttctccttttgcagttgcttgattggctcctaggggaaggacattctgtactactgagacgggccgagctaaagacattggtagatttgcatgcaaatgaggttggtatcttttacattttatagagacatatagtttaatataattaagttaaatgcatacttaattttcattttcattttcatttttaggcagggaaaggtggagaattgtcacatcatgaaaccatgattataaatggagctcttgatttaacacagaagattgctaaagatgcaatgacacccatatctgaaactttttctcttgaaataaactccaaacttgacatgtatgtttctctcactccacaactagttttacttatttttcactttttgttacaatcatagtactcttcttaccactaggcaaactatgggtttaatagcaagcaaaggccacagccgcatacctgtctactccggaagcaagacaaatataattggcctcattttggtaagaaactcatgctttcacacacatgacttagttgaattaaaagttagtagctttcatctatactatagctagttagaatttttgccttctgtactttaacatgtatcaaatcatgcccttaaatttttaaagccgttaaaatttcctcctaaactattaagattgttagatttaaggactttttttcaattttagtaaggaaagtctaatatagataaaaattcagggagcttgatttggtacatgtcaaagttcgaggggtataatttggtaaatagcaaagcctaaggagcatgatttagtacatggacaatcacagaattagtaaaattgaatgaaattgaaaaaataccttaaatccagcaatttcaatagttcaggaggaactttaacggctaaaaaaatttagggcataatttgatacatgtcaaagttcagggacaaaaatcctaattagcctactataatatatattatctcttaaataggttaagaatttattcttctgcaaccctgaaaatgaaactccaatcaagcatatgactctcagaagaattcccaggtaactattaattgcttgctcttaactttttattttattttagaatacattaatgtattgaaattgttcataactgtctctatcacagggtttatgacaattggcctctttataatatattgaaccaattccagaagggtcatagtcacatggctgcagttgtgaggagtaaggatattaaacatgatcataaagatagtaatgttgacaagcatagtttgatgaatctaaatttaactccaggagaaacacaaggtaacactactacaaaacttagctgaaatgatacttaagcttggtgtagtcaaatttgttttttaacagtttagctatcacatggcttttgcagctcacagttgtatattttatcaaaaggaacatttgactatctctaatgagacatcaccttcttactcatttgaagatggagatgtatgttgtggaactcgacaatctcttcaaatcgactcgagtgaagaggttattgggatcataacaatggaagatgtcatggaggaactgttgcaggttgtgtagacttcacattcattttttttctttccccttttttaatttgtatggtaattggtaaagtccataattgagtgacccttctatgttttgtgtttctgcttttttcaggaagacatattggatgaaactgaccattatgttgatgtgcacaacaagtgagtgaccattattttttcttttctttttagacatatttgacattatgtgtttgtgttattacagaatcaaaatcaacctgaggcctttaagaagatcatcatcaagatctccaaaaagatgtatttctcaccttcattggaggactccagatcagtctccactctcgtcagacactcctgtttctattgaatcatatagtaaaccacctctaataagatcatctcgtttatatgagtcttctcctggaaagtccgcaccgaattctccagttcaatctgagggtggttctctttgttatagctcaccatcctcatatagagtatgtcaaaactccaagcttggctactcacccagttattgaattttattcctttctcattacagaaattttggcttgaaatgacagggttcatcatataaataataaatctcctattgtacctttcatttatactaaattatatagttgaatcaattttgttatgtttgtatgaatgtgtcttcttaatttataattagagtaaagaacaaaaatgcacaatcttttatgcatatgtcaattatttgaagtaatcgtaatcataatggaatcaacattgcaattcttttgtttaatttgattttaaaaacagtgtaatgtattcttcataatgtaatcaccattacattatatttatctttaaatccaacctacccaagcttgagaacactctcattaactttttattttatctataaaataaatcaactaaattaaaagattaagatttcttgtttctaaatttatagctactggaagttatcttttttctttggtcaagcttgtcggccttccctagacataggtgtaggttagtcagggctgtgctttgctattgctattcgatttttgccactacgattagttttgtctctgtgacagaattttgagtgttttagttttgtctgtgtgacatggttttgttttgtttggtttcgttgttggttcttatttgttcttcgatggtttctatcaaattgttgttagtggttggggataacaagttctctacagttaaaagggttgttagtagtgcagttacataccttgcacaatagttaagtgctcaagctacgatgttgaatgaacttgctgtaacagtttctactgttgtgtcttctaagtggtacatgaaactgaatataagtgttcttaaggttaactgtgatgttgtaatcttatttttattattattttttttttactaaagaggagaaattcattaatcaaaactgaaccatatacaaaccacatccacaaccagccgactcctcaaaacaaccagcaaaatctactctattagccgcatatacaaagccttttcagcttgaattacctcctattctttaagctatacaacctatatttgactatttccttaatgttatttacaattttcaagctggtataacaacaattattatgcatacaagaattcctatttttccacaacatgtacacagtggcagcagccaaggagatcctcacacctgctttcgagttagccaaccagctcttccatttggtgtaatctttttcatctggttttatttttagtttttttttttttgtcaaacgatctgagaatcagacggctgattatttgactcgttttctaattctaaattgggcgtgtctctaacaggagagatgtctcaattggattgtattgggaatcatgggattcaatctcaaaactaattggcaatgagtggagtagcccatgttcttatatgtggctcaattctctaccatttattnnnnnnnnnacaatgtccacaatattccccctcaagatgatggctattttttgccgatcaatcttgaaccattatctgtataggtgcagatggtgttgggttttatgccctaaataatttttttttttcaatgtaatctctattctattaaatatcaataaagaaac

SEQ ID NO: 16122 - DNA, 7161 bp, Cannabis sativa
aaataaggacagagtgttggaaccataaggttccttagcatttatgtggagatgtgaattggattaaataataataaagaataatattaatggttatgtatattttgtagtgtatgaatgagtagtgggggaatgtttgtgggagattgggagccacaaaacatgaaatgagatatgtccaataacagtagtaataaatagtaaagtatagtactaattaattaggtactacaaatacagctaaagtgcatgcctgcagcctcaactaaaacagaatatatagattagagaccactttttcttgttttaatttctttctttctttcttttgtaaaagcaaaacaaacaaacctcaatcaaatattatatcacacagcacctgatgcccacatttttattatgtttacttttaaagtttgtagtagtagtagtactagtagtaccaaaaaaaaaagggtgatattatgtgtgtgtatatataatatatatattatatagtagtgtgtctatgatcttagtgatctgatgtggttccaatattatataaaggagagaaagagatgatggtgtggtagcagagtggtacggtactggtaggactcagagacatctatatcactaaaatccaatatcacatcatatatatcatcaattcatcatcatcatcattataattgtatatattctgaatttattgcattatttcctactcaatcaattatatgcaacttaagaagttcacacaagcatatcaaaagactgaactaaactaaaaccaacaagttataatatgttgtgattatattatcactcgaatcgaaccagataaaatcagaacattcaagatccaacataaaagaataattaaagaactgatatgaaagtaaaaaataaatgtaacagaattgaataattaaagcacaaaccagatgaagaagaataattataatgctgaagctaagagatttcaagtacaaattccttacatatactctgtacaaccctccttatctctcaatttttattacttagattctcactcgacttagactaggagctgaatatattactgattattgtctaaggggttctcagtcaacaggacagtacttggggctgagttacacaacataatattatactttacattattagcttagaaaacaatcaacaaaactatataccatttccatttgttagagtaagtaacagttagttagagatattttagagtcatatcttgtattcatttcacaagtttaaactctgaaattcggacttcttacaccattgtaatcaagattgagctatgaacaaggctcttcaatgtagtagcaatttttggtgatacaattgagtaaaagtatcaaataatagtttttattatcaaagaagtgaagtgatgattcccatatacgttgttagttcaagttatgaaatagttgcaagttttaccttttgtctttgtaaatgtagcagttaattctcttgttaaatttgttttaataactgttgctagtacatcaacaacattattatcgtaactaatgttaattattaatgatatcttctacctctcaatctctctgacttctctttaatggagtccctgagattattttcttaaaaaaaagtaaatttaagttttattgttttaatttatatataattaataaatatttatcattattattaaactttcatattgtgtcctatccaaatactataaactaactaatatgaatagagtggaaattcccatatatcttactctttctttttcgttgtcaaaaacataaattaaaaattaaaaatagctagttgaaatatatttagtttgggctagggatgaggcccattagttttaagcccaaaaacccgacccgcgaaaaatgggacagagcgggagggagtgagagagagggagataggcttttggcgtatgggattgagaaagccaaggaacgataacgacgacgacgacgatggcggtgttggacgaggatgaagagaatttggcctacttcctcgaatcggaggtcctctcacaggtttccgatcaggtataattactttattatatacatatcgatccaaattgtttttgtttttagttttgattgtgattagggttggggttttcttgcaggaagatgagcccagccccaagagaaggcgtgaggaatctccgcctcctcagcctcagcctcggcctcggcctagggctcatcctgcggctcggattgaatctggaattttgagtaaaatccctccggaacttttccctcacatcctcaaattcctttcttctgaggatctttttgcctgcgcacttgtctgtagatttcttactattgcagcttccgatgagtacttatggcgtcgcttgtcagtttcttcttccgatgatttcttctctatttcatttcattatttgtgtatttgattttgtttcctctgtaggtattcattgcgctggggtcttatggccccttccaagaaactgcgcgaatgtccttggaaaaagctttatattcaggtacttttgtttgtaatcaatatatgtaatttcaatgagatcatgttattattattaatcactaaaacaagtgagtaaataattctttaaattagaacactctcttactcataatcactagcataggtatagtttagttttagtacaattctcagccaagttcaaatactaagagtttgtctaataattctcttcatttgcagcgagatgaagaagacatgacggaactagttaggaattgcccggttgaatttaaagagtattacattcaaatgcaagcagccaagagaagccaagcacctctgctttcacaggttgcttcactttgccttgtgcttctatattattcaattagaactccacagcctaaccttgtctattttatgcctgtgtaggtgatcgatgaccgcctaatccttgacaggacagtagctgatcaagtttctatatggaaaaacagtaaaggtttgactgatgctgtgaccgcggaccatgcttgttctggtgaaacttgttctttccatcaaattggagatgtctttctttgcgagaagactggacatattcatggtagagcggcattataaagttgtgtacatgtttttgtgttatctctggtgttggtttttcctattgtttataattgtactgcatttcctttccagtatgcgatgatacgtgtagagaagctgttatggatcctagcaatgagctatgggtttgtactatatccgggcactgttttgataggttattgtcaccagctgagatggaaccagacattgtgagtgaatctctcttgcttacagttgtttaaatttgataccccattcattatactgtcctccccttgaaaaactagtaatgagaatgtaatatcaaaatttaaaattgagctactttgtgcattcgattgattactttgtcatataattagctagctgctagggtcgttgtgtttgttttggttattaatggttgcttatgcctctctgcttactctttcatcaacaaacctacaggaacagcaacaaggcggtgtcaatgatgaggcagaaccttttatggggtccggccgatttggtaataatctctttaaaatccaacaagttactatgctttattctattacttcttcgtcttataaagaccgtgtttattgaaattgcagcgcgggcttactcgctgggatatcactgtgcagatgagaaagaactagaagctgcactgaggttttgctaagtggtttagaagaaaaaagagtgatgttatggtatggtatgttaaaacaatgcagatagagagaactaagaaagaagcattgcattttggtgtatctaagtgaatgtataaagaggtctattagtatgtactactaccggtgtgctgatgcctttatttgtattatgtaggataatgtattatttatttttcttgttagtccttttataattataactattaataataataataataatgaaggctggtagagttttcttcttttcccttcatcttggtaataagaaaatgaaagccatcgtcaagtttggaggtctaataataagtagtaattaattagaagattcttaaggttgctgccggacaaagtggagaatcacatgttataaaatgataattcatattaggaaatagtctcatatttatggttataacttatatataggaaatgacttactagaagaaacaaaaaggattatatagtaattgtgccaataaaaacaaatgatattatataaattaatgagaaagtagatatttcttttttgatataaagtgggaatagatatttatatatattagattagattagattagatgatgatgcgtttatataacgcgtcgtttacgcgttatgagtaacgcgtctaaggaatatgaatatctctctttgtcttttctgtatataaatacttctctctctctttctaatattcattagatattatctggttcgactctcaaagactttttccatatccaattacatcgtcctctaaaggtaaaatctttgccccctttttcttttgttttattatttttctgaattttgcttaggttgatgatcatcttctgattttgtttattttacaacggtacctgatcgatctgttgcctttgccttttccttttcctatgtataatctcttctaataatattgaatttgtttatattaagttttcattcaacaagatctagtttttcgtttatattctttggatctagtttaggggtttggaattgagaatcaattgcatcaactaatgtatgaacattgatctgcatttacagtattagttttagtttgttaagaaagaaagaaagaaaaaaaatgggtggtggtaaagataaacatgaggagcatgacaaagggctccttggtcaacttggacacatggtgggacagcaagtagcaggtggacaccatggccatggaggacatggatatcctccccagggttatcctccagcccctggtgcataccctcctcagcatggttaccctccccagggttaccctccagcaggctaccctcccgccggctacccacccgcccccggtggttacccacctgctgcttatccaggctcatctggtggtcaccattctggaggttaggccatgtaccaattcaccctcactatttaatgtgcaacatcatattattacatgttggtctaattacattttgtgttcagggcatggaggcatggggtccatgttagctggtggtgcggccgcagcagcagccgcttatggtgctcaccatcttactcacggctcccacggttcacacggcggccacttcccacaaccatatgggggtgctcatatgatgcatggtggtcatcatggtggcaagtttaagcaccatggtggaaagttcaagcacggtaaacatggcaaattcgggaagcatggcaagcacggcggcatgttcggtggtggaaagttcaagaagtggaagtaaaccattctgatctgcctgaggcctaggcctgaaaatatgataatatatagtgaatattttgatgttttgattctgatttccctgaaataatctaatacataacattcacattggcagtgcttgatatgtatttagtcttcttctatctgtgctgtttatttcaagtttggttggttgttgagagacagtttgcatattacaacacaacaccatactattttacttgctgacttgttaattttaggatcacaacttcttgttttgtttcaatttttttatttatgaatgaacactacttgaaattgttccaaaatcatgtgattctacttgactcgtgctatatttttcttaaagttgagtcaagccaatatttattgagagaagatgttgagaaagtattaatgaataatatatatatatactaaatcttctctcatctttatttataattaaattataactcaagctgagctatcaaatttatatattgaagataaatttgattttagaaaatgataattgaggatatgaaaaaattctcgtagaaagaaaccccccatgttcaaatttgttcgaaagaaataaaaaagtgcttcatctaagagttattaccaagtactcctagagattacttggaattatgagtcattgtgtgaagtttgtttattactattcaaaggacttaaagtcaaatgccaattgcaatatcaagcttgagaaagttagaacacaaacttatgcatatccaaagaagcactaagaagtgatttcatcgtaaaaatgactgtaaattacattgtttaaccataaatttatgttgagattgcgtatcgagattgcactattaatccccaaagaagcactaagaagtgatttcatcgcaaaaacgatagtaaattacactgtccaaccatagatttatattgtgcataaagtaaattaaataagactattttgtaaattttaatatttcacattgttagtttgacaaattttacagctaaaattaaaactataaaaagtatgaaaactaaacagataataacattaaataacataaaagtaatatcaatcaatttaggttaataatgaagatgttattttgttcagtacaaaaactacaaatcttaattttcaatccataacataaacatgttaaaataattcatcaatatatttcatcatccattagattaaaattctaattttttttactctcatcccgattatcattggaagagtttagataacatcaaaatatacgagtactctcttaaaatagcgagtactcaaataatataatataaaatatatatgcaagtatgaaaataatataaaaaggacaaaaaatataatggtttagtaggactcgcattggctagtctattgttaaaagagatctcttactttgtattttattacccaaatcagctcagccctccttgaatgaatggtgctggagcacctacttataagtagtaggcgaatgttacaaaactatgatcataatgagacagttacaaataataataataaacatactaatttaaactaattacaaagatcatactacatgtaaagtttgctttaataacacttgaatactttgactgttacttctgttgatt

SEQ ID NO: 16123 - DNA, 7730 bp, Cannabis sativa
acagtatttttgaaaacttttccgtgtgacaatatttttgtaaaagttaactcaaattacagtatttttgtaaatttcccaaaaaattgtctatcgagcccttcaattgatggatcatccacttgggcccggatttgtgagaaaccatgaaagaagagcccatctgaacaaagcaggaagggaaagccaggggttaaggcccgactactagggacagttgagaaccggagggaatcatcgtggcggcttggccgacctcacactacattcttcacttcttcttaactcctctctattactttaatggtgtatggtgctcttgctcaatgtcaccctctatagcttagcagttagcaccatggcaatgggagtcccaagcctgaaaaatgagttcagatacttgtcaaggtctcgtcttctcttttctctcatttttcatattccacacccactcccacaccccgcctcacctctgccctttccagctagcttcttcgcttcagatcagtttggatcaaattctttgtgtaatctgccaaattcattgatttcttcatctgggtccttctcagtttctgctcccaaattcgcagtatttggtcatggaatggacttggcgactcctcgccactgtaagggtttcaggccattctcagcttcgtctagcaaagagctccccaattctggtacgctgaaaatgtcgaattcttctgagaatgcgcgcgttaggaatcccggtcctgaaagaacgggatcgaaagcattttggaagaaagcttgggaagttgttggttggattaaaaggggtgagaatgatttggagttcaaattgaatgggttcagtgtaagtctatcaaatgctttaatcactctgattttgcagttattgaattcagagaaaatttctgctttgcgtttttataaatggattaaagattcaagacctggtcttggtcgtaactatgatatttgcagtttgatagttgataattgtggaagattaaaagattacgagacaatgacttgtactttgaatgagtttagtaaaaaaggaatttgcttgactcaaaattcatttttgttcataccggagttggccacagatgaggattctcttaagaattacgttagtgatgttgtaatgatattgaatggagttggtggaacatgtcgatcttctggagttggctctttgattcagatgtttagcagcttaggctcatttaaaatggccaagtttgtaatggagataacagagatgaacacgacttattacaatatcatgattaaagaaacatgtcgcagatgtgatattgaaggttcaagagctctagttcatgaaatgaggcaactgggttgtaaaccaaatgtcacaacttacaatcttttttttagtaacttgtgtaagagcggtgaacgtgctgaagaattactcaaggaaattaaaggaatggattgttctcccaatgaattaacctttgagattattatttctcacttatgtaaagttggcaagttcgattttgccatagagcttttggataacatgatgttgtggggactcaaacctcggcttacaacacatgctgtctttgtcaagggtttctttaaggtgcgtagatatgaggaggcgcataagtatgtggttgatgcaagttttaagcatagttactcgagcaacgcagtttacagcttgttcgcagatctttatctgaaggaaaaagatttggtcagcgcccaagccattatctccgagatgattgaaaagggtcttaggccaagcattcgagtgtgcatgactctgttgaaaggtctccagagtataggcagacatgaagaagctagagatttggagaagagattctctagtcttgattttgaggacagaataacagaaatgggataattctatgttcgcggagtgatttatacagacacagacagacttgtaacctttacatcttcagagtatttatatgggcgggaactaatcatttatgggattaacttatcaaatttactatcttggaacttcctatggctgaaacaacaatgtcgaaagctttttggtacaagttgtacagattagtttccaattctatatcctaaagcaaacaattccttgtgttccaggtaagttagagaaggattagctttttctattgcttcttttggctgcattttttttgctttctgttttgtaaagagcaatccttatgtatctttcagggatgcgtttttggcagtcctacgcgagtcacctataagtataacaagataaatactcaacaaagtaggaaaagacaggagaagccctttttctgtactgatctacacttgatatcacaattctttagcgtaaatagatcttcatgttttttatcactaagaagaattaatatccttagatttgtaattttgacgtgcttgtatttttctgggatcacttttgagatactgtgatcttcctggcaatgaatgcatggaaatttgaccaatttccttttaaattcagaagatttatgagtcaaacagctgcatataaaactgtacaacaatcacacgcatcaattagatctcatattgatttatcaagttttctgtattttacaatgtgcacctcgtagtggctatagatgctatagatgctggatgtttttaacaaagttattcctacttgcttctaattcatctcctcgtagccaatatcagtttaccctattgaatttcatcgtattattggttttatgttcattgcacgcatttgcatctcaaattcttgaaaagctttccattcatgacagacgtttgtggtctttcttggtctcgtccggatgagcttgcgttgcatacattttagaaacaactgcagtttgtcaccgccagcacggcagcatcttgcatctgcatggtaacatggcgctatgcgctatgatcagtatataaatccaaatacacgttgaagtcctggttcatataaaattcatattaggaatagaggacatttcatacctttccttttgagcatgtgtcagacttgtgggctgtgttacattctggcaagtgatgataacatattgttttagtagtttatgcacaataataacaataacagtaacaataataataataataataataataataatgtagttagaggaattgaacacttgtggatatagcttagattcgatatgatgttttatttttcccattgaatatatgataaaaaaagaaatggaaggagaaagaaaataataaaaagaaaaaaccgacgctgaatcttgtaaatgaagtggaaaaatattgtcttcaagtttttggccctcttagaatatttaagcagactaatgaaaaattaattaaagacacaccttctgaactgatgttaaagtgttgcgactgcttgatggcatggttggggcaaacttggaacttctttcagttgtgctcttacttttgtcctctccctgtcgattacatcaaatattactaataagatgacccattaatgaaaaccaaagcttgtattcatgtctacaattaaaaataagagcgaaactacagcttggataatgtttcctggtgtggacatactaggctacagctggcatttaagtactgctttctctctttgtcgtaactcctctgtgaagattcaactctgctactttgctgtgatttattcatgttatgaaggtttctaggcctgcatttccccaaacttgaacaattagattcatttgcacaaatcttacagcatgaaaaaaatctgtttgtaaacgcagaaatatggctgccaataaaaattatgttattgttatgaaatgataatacctgttgtcagagcccctatgtttcaaatcaccagaaactgtaacagtatccagattgcactgcataaaaaagttaagatctatatggtcacttgagaagcattagcaacacagcttattaaaaccaactatgaatttaccagtagattgtctacctgggaagattgtctatgagctggtagacttctccgaactgtgtctgccaaagttgagtttgcttttgttttactagttttaccaccagtagaaaaagatgactccaacctgttcctcaccaaagaagcacgcagactggtagtagaacgggaggacactagaatatgtttacgagatgaaacaaggatattattccccattgcagcttttgaaatgctgcattttcctacgacattcctgctctctgcatttgcaatgaatttgtcacgtggagataggattttcttctcagttaactttgtatttctgcttcccaaatttatcatgtcagagcccttatgttccaaatcaccagaaacagtatccagagtatccagagagcactgcataaacaagataagatctatatggtcactggagaagcactagcaaaacagctaattaaaactgaatttgaatcttaaaagtagattgtctacctgagcagattgtctatggcctggtagacttctcagaagtttgtctgccaaaggtgagtttgcttttattttaccagttttaccaccagtagaagaagatgactccaatctgttgctcaccaaagaagcatgcagacttgtagaacgggaggatacttgagtaagttgtttacgagatgaaacaaggatagaattattcctaaatgccgcttttgaagtgctgcactttcctatgagtttatcatgtggaggtgtttttttcttctcagttaacttgatttccttatttgtatttatgcttcccaaatttgctctattttgtgaacaagctacatttgcctggaagaaaaaggaggataaaaatgggaaaaattacagaagcaacttcaaagtaatttcttcatcaaaaacttcaaacttgaagattttttcatgttcaaggcacattgtaaaagcaacacccaccaatctactattaatattatcccataaaagagttatcattccattttactcaagcacagaatgttgcataaaagacaaaccttaattgaaattatacacaaggaaatacatgcagatttgtgtttgtttggtgaaatgatgcggaatttcctattatggacctcaactttaggacaattttaactatctagtaaatggattatatgtgggcaggattgtagcaatcaagagtttaagcttagtcatatgtcttatttttaagttagtgaaagaactggtaacatttagaacaaagaaccaagttacctgagtttttggtttatttgctttaaccttgactgagttggcaacaaggctttcaagctggacgatttctgagttcttggtggtgggagcatgtaaattggtagtatgtttaattggttgctctgctccagaagcacataaagattcattagtctcatctgggatgctatcattttctttattcttactcaatagctctctggtggctgctgtttgtttcagcacaatgctctccattgacgaatcagagttggcacctacatcatcgtctagaatctgaacttgtctagcatagctatattttctatcctcatttgactgactatcgttagtactagtttctaatagtgtaacaagcccagtggtgttttcctcctgcaattgtgatgccttcattgctctaattcttttatagtattcttcaaaataggccttcttttgagcaacaaatccaagaaccttaaacttttcaagctcctctttgcatctgtcgtgagaaaaagctgaccatttctcccatgctagtgaatcagcagtaaatcttccaaatgatatggaaccactatctcgtagtagtatttcggagacagatactacagcctgcttacaaacaagaaaaacaccaaatagtgatcacaaaagcaaaaaaccaactacaaacttggccattattttacggctatgttgaagtaacttctcattcttcaatgattaataacggtgaaaactatgaattcaatatatattattaaaaactgggacatgtatagtttcaacgactgcttagacattagataaaatctattcccttccttcattgccaagaaaaaaaaaacgtaaaaaaataaaaataaaatgaaaaaggccgtgccatggccttagttactattacagaaaaggaaaagattgatttaccaagtaataaaaagttaaaaactatacaatgtgtgatatataaatatctacacacatatcatcagtaccttatataatcctatttttataataccctttctacatgatcacacaggaacccatataaatttgttagttctgttaactattcgtggaaacccaacttttgatctacgatctagttggccttgtgcaataattcaacttcgtaatcacaatttttttcctcaagatattttcaacaccgcaataggcctaattataagctagaatagccccatatcatgattcgcactcaagcattaaatcaagcaacacaaactaattttcatcatggaaaacttcgaaagcgccaattctcaaaattgatcgtaaggaataataacatgagcaagaaaataatagttaatgtagtggtgtacctgtggattctggctctgtgatgagggtagtgacaagctatggcagtgggagttatgatgaaaatcagtatcggtagccatttccagtaattgactcaaaattcgtctaacccttttgtacatgcattctcattgtttggataggtttctcttgacatccaatcacaatttttaccagcaatgatactaatggaaggtagtcaagaaaagagggaaaatagtgagtaacttgcaaaagttggaagcaaagaagaatcgagagagagagagagagatagagagagagagagagagagtagtgaaaatcaagaagcatcaaagaagtagccagacagttttaagttagttccttgcttgaacaggagagcaactctccggcgctcttctatattttctttctttctttttttttttttttttgttttcttcggacgtcggtgtgggtgagggtgtggtactgatgtgtcttaaaaactttccatgcatctaggtcctacaacagccacgtcacccaacttctttgcacaaaatccactcattgaaatactaaaccgagattgggtcataactatatatttctactctaaagactcattgggtacgttttataactctatgtctcgatagactttgttgtttgttaattattacaactataagttttaattaaatatgaagtgattgtattatttaatatataataaatgatttttattaaaatagttaaaatctaaagttcagggtgaggacttgtggtttgaggtcgggggcaagattgagatcagggtccgagtttaggtcgagagtgtgtttgagttcgaggtctaggttcgagtctaaggttcggagtgttgggattttatgtcttaaataaaacccattttaatataatattgtttgctatcaatagaagattagaagttatttcagtttatatattattttcatgattatggtttaatatacaatttttgataaatttagaacatatagttattcacaattacagtaatgtcatcacagtaaaaagtaattgtaattaaatgcttcaaagtataagtcccatgatttatcaatgcattagatttacactgacgtgataatcaacgataaagtttacttatacttggataagtagtatgtcctttcca

SEQ ID NO: 16124 - DNA, 6849 bp, Cannabis sativa
gatctagaaaatagtttatcgaaatttttttagcctctaccaaaaagacttttaaagacttcttatataactttttaatgttagaataatttaaaaagagcttaaaaaaatgtcacttgtcaaaaaaaaaaaaaaaccagatacaatgtgaacccagaaatttgttctctttctaaaaagccattctttcttctgtttattctttactgtgtagtcatccatcctcttactttcaaattattttatttcatttagttttttatgcaaacttatgtttcacttaaaactgtcaacatggaatgtttttatctgtcattggtgttcattcaatcagtttattgtgtaggaagcgtatcataaagatgctagaccttgtgatgggtgtggactaagtctaatctgcaaagcaatgaagaacaagaagggtgctagttggaaaacccaattcttgtgtaaacattgtgctaaggtctaaccacttttcagttttgtttgtttgattgttattttagtcaacaatagcactagactcagcatctcatatctgtatatttatagttaaagaagtcaaagcaatactgtggcatatgcaagaaaatatggcaccattcagatggagggaactgggtgagtcaacattataatctgatttttccttcatctggatattcattgttaactatttgaaaatgcttttgggtgattggttgtcctttctttatgtattaggtatgctgtgatgggtgtaacgtttgggtgcatgctgagtgcgacaagatttctggcaaacttcttaaggtatgctgactattatagcaagtgtgtttttctcatagatcaatttttatttaagtttgcgatatttggagcatcactttgtctttcctgcttcaggacctggagcatagtgattattattgccctgaatgcaaaggaagatccaattgtgaattaacagatgtagaaagatgtcagccccaagtgaagtatgttaaattatcggtggtgtttatcaatttgatttggagaaaattgccgtttttctttttgcgtactgtcacttttgatgtcttcaggaagtttaaaacataatgacgtggtaactttcttttactcttcttaaaacagttctgtgaaagacaacaaacagacagtgacacctgagaagatacttgtggtgtgtaatggaatggaaggaatgtacattccagaatttcatttgtaagtttggacttgtgttaagataattttagcggtcatgcatttgtttaactctttccacgcccttccctgttacttttcaaaaaaataaaataaattgtgctactttgaatggggaatgtgagctctgatgtttattttgggttctagggtaatgtgcaagtgtggttcatgtgggtcgaagaagcagactctaagtgaatgggaaaaacatacaggatgtagagctaaaaagtggaagtatagcgtgaaagtgaagagcacaatgctgccactggaaaaatgggtgtgtacctgccttgatatttgtttcttgtattctgatattgcataattcagcacttattaatattggggcttcgtgtttcagataacagagtacagtacacacggtgttgatccccttaaattagacaagcatcaattactcacttttctgcaaggtaattataattatgtcatatttacttcgtgtcaaggggcctttctgtctttctttttatttatttatttatatagtatttttttgtacgtgaattcttttcaccgaggtcttttaaggagcctgatattgtttgcatcttcattgcaatagaaacatatgagccagttattgcaaaatggacaacggaaagatgtgctatctgtagatgggttgaagactgggactacaataaaatcattatctgtaacaggtgcttcttttattaactgatttggatgccaaattttttcagattttaggtcgtcaatctattatctttctcaggacacattggattgatctcatttctgatgtgctctatgcaggtgtcaaatggctgtccaccaagaatgctatggtgcaaaacatgtccaggactttacttcatgggtttgtagagcatgtgaaacacctgatgtcaaaagagaatgttgcctttgtcctgtcaaaggtatataacctgacttcttagatgatcgttagctgctccgtgctgaagttctacccttgcactatgttgctgctaactattagtttgtgaagttgatactgtttgctatgtttaataattcatgcttcatgtccttttattctcttggacattgctcatttcatgttcacttctgagatctgaatgtgcatgtattttaaagctgtaatgcaatgggagatttaatgatattataaatttttctttagggggtgctttgaagcctactgatgttgaggcactgtggacccatgttacatgtgcttggtttcggcctgaagttgctttcttgaaccatgagaagatggaacctgctattggtatccttagaattccagctacttcatttttgaaggtacagctatgttgccatcttttggtactttacttcagctgctatgagagtgccagtctttagtatagtctgtagtttgcttactttacattccaactgtcaagaaaattctattgtgtaatagtaattttcctgtttcctaatattttttctttgagttgcaagctaacttgtttgtaattgtgttttcctcttatcttgtttttgggtggaatccagacatgtgtaatttgtaagcaaagtcacggttcctgtacgcagtgttgcaaatgttctacacatttccacgctatgtgtgcatcaagagcaggctacagcatggaagtaagtttagcctggttgctttacttgtgaatgaatcttagtttgaacctttgtttcacatttccatattttgagtgaagaaatagactcctacaaccatgttttaaatatgtagattcatctgtgcatatttttagtcatgtttgcaagcttaagtgatagagacataaagtaacattctatattgaactttcagttggattgctttgagaggaatggggagcaaattacgagaaagtcaatatactgtgcagagcacaggttagaactcttccctcatcaactgcttggtgcttttggtcctacctagcagaggaacaagatctcattactatatttcatggtacatcttggttgattcaaggtttttggttttggtgcagaaccccaaatccaaatgctgttgtagttattcgtagtcctgcaggaacttttgctgcgagaagcttccttgagaaccagaaggggtgcttcaggggttcaaggctggtgtcagcaacgagaatagagcttcaagaatcaccaaatttagagacaaatgaggttgaaccagactctgctgctagatgccgtatttatataagaaaaagccataaggtaactataaatgagcctttttgagtaagaaaaagctcaacatgtgtaaatattgacttgtactcttttccactccctttttgtttgctccaaagtttttattgttttttttaaaaagtaatttttatgattctttgccagacttttcaacagcagccaatattccaccggccaatggggccaacacatcattctatagaagctgtaaatagcatgaacataaacagagtaatattcttattcttattaaatatcaattgagtttattgtcttgaatgagtacttgaaatttttgctacagtgaggtgaagccttatgcttttttgtgtttcttaaagaggtagcttattggtatgttgataatttgctatgcataactgtttcccttccatcaggaattagaggatcctatattcacttctttcaaggatcgccttcaccatttacaggcaagcttcactgtgcttcactgctggttaacattttcttcccctttgattttgttaacttttatatcttgtgcattcagagaactgagaaccatcgaatttgctttggcaaatctcatatacatggatggggcctatttgctcgtcggaatattcaagaaggagaaatggtatactttactatagctaatcattgtgtagtttttgtatatttgaagttgattctcatctttttatctaatagatgatgtgttatactatttactatggttgatttgcacaggcttaccttgacttatgtaaagtaattccttgtgatttctttttcttgctctaggtggttgaatatcgtggagagcaggtgaggtcttgtgttgctgatctaagagaagcacagtaccgggcacaaggcaaagactgctatgtgagtcaaatatgtatcttggtgtttcgtttccacatactttgtgctattttatctttaccagctgatcagagtttctaatcttttcattatacccaaatttcaaccttagttcatattatatatatttccttcctctgcagctcttcaagatcagtgaagaagtagtaattgatgctacagagaaagggaacatagcacgattaataaaccattccgtaagtttttattctatgcaccaaaagattattctcgttttcttgatcttttttaagccagaatagctcattttgttgtaacgggttttcatatcttgttcattttcttctttaatccattaaaatttgaatggcacctattactgcagtgcatgcccaactgctatgcgaggatcatgagtgtaggtaatggggagagcaggattgtgctcattgccaagaataatgtttcagctggcaaagaattaacgtactcattctatttttctctctggtttactcgtattatttcgttgtttatgttaatttcatgtgggattattggagaaattgacttatttactaattttcatgaacaggtatgattacttgtttgatccagatgagcacgatgagctcaaagtcccctgtttatgtaaagctgagaactgtagaaagtacatgaattagttccactctaataccacatcacatactctcatttttgtccatacgcacaaagctctgacccatatctaattaggaggcaggaatttaccttcttctagcctttttttttttttttgttttttgttttgtttaacgagtcaacttgtaattttttttattcatatttaatttcttatcagccccattcaattgtaacaactccaaataaaattaatgtaaattcacgagctgtttggctgttccgttagttattataattcctcgttgttattttatgttttactttatttataacaagaagttgtaaacacatattggattatattaaggaaactgagaataaaaaagaatgtgaaagtaaggtgaagataggattttaagagagactaaaaactggtcatatactcaattctcaagtatatcttcactcataagtgaaggtgaattattgccttaacagtagatattttacttaacatgggatggaaatgtctaggtataattatttcctatataggaatatagttttaagaaatcccttaaaaatatatttaaatctttaaatctaaaaataaaatagatcattttcaatagtttctctattaaaatataccatcagtttttatattccattatcattttttttcttattcatttgaaatatgaatgaatccaaaaaattgagaacaatgaagaaagaaactaaaataatttttctacaacaatgaagaaagttgatagcatatatcctatatttaattgaatcacctaatgttttatttattttcattttttactgtaagtgtttgatgtattttaaagaaaaatcaatgaaattaattttcttttttataaaaactgtgttgaaatattgaacttagtcagttagtcattttactactgatccattttttaagacataataacttttcgttttcaaaatgagtttatctagctaaaagaaatattttatatataatatgtgataaattcaataaatatatacttttttattttataacataattggtgtacatgtttaacgtgttgtaatttcagtaattatcaatttgatctaagtgctaattaatccttcgactattattattttaatatttttaaaattttgtagtttttcaaaaggaaagagttggcgcgcattatatataagtagctagagtcttgagagctttgagaacacgcagaagcaaccaccatgggaaggcgttcgagaagcgaaactaaagctacagagcaagaagacaacttcgctcggagaaagagaagtctcaatactgagcctccgaaaatgcgtagaccaatgcgaagagccaagaccatctgttcctgtagctctccttcctcctctactttcctcaacgcacattccaacttctcctggttgttttcttattccttctctctgtttctttgaatttgagtttgattcaatttctccgttaattacatccgaaactcatattcaggcgttctgttctgtggccgatattaaatgaaacttaaatcgtttgtgcgtctgtgtgttttgctacatgacgaaagaagttctccgtttaaattctgtagatctattacgattacatttgcggattagagctagataggatgttgcgtgaaaattcgaattgctttgagtgagaattcgtgactaatttagtaacaacctaaagaaattatacataacgtatggatctaaattatacaatctctttgtttagaaactgttcgtgcaaacgagtttgacgattcggttatagctgtatcatcagacatcgatcaaaatctgtgagcatagatcgtcttgaacttcttatcc

SEQ ID NO: 16125 - DNA, 4630 bp, Cannabis sativa
  modified_base (1030)..(1030): a, c, t, g, unknown or other
aattctaacatagatgaaagttcaaggggcatgatttagtacatatcaaagtttgaaggcatgatttgatagatatcaaagtttaaggaacatggtttagatatcaaattaaactaattaatattttcttttagtttgaatgattaattaaattttatgttattataagtaaaaaaaatatgtatatataaaaattagaaaaacacaaaagtgtcaccaaaccaaatgttatttattattattacttttttgaattgtataaatcaaatcgaatcccttaaatactagatgtaaaatattggatggatacaagtttaaattattgaagaaatttgaattaaaccaatagatatacatgaaatatatataatagatataatttattcaatttaacatccaatggatataagatagatttgatgactgaaattagttgaatcaaatcggatagtaaattttatcatccaatatataattagatcgaatctaactatagggaaattttattataatgcaccccttaaaagggatacaccgatacatttctatctattttagtatccgaaataattttttaatcaaattttttctcatggtcatgtaaattatacttatttaagacattctacaaaattttaaaaaaatcggaaaatttttacacgccgaaaattgcattcaagtattgtgttgcaagcgtgattattttattttatacgcgtgtaaaatagagtgtttgaacattattttacatattgtaaattatttcgaatttcttaaaattttgtaggatattttaaatagctataacgtatatgaatataaaaaaaaattagactaacaattttcttttgaatgccgaaacaagtagaggatgtatcaatacatccattttaaggggtgcattgtagaatcaccttatcttatatataaataaaaaagacaacatttacgattaacgacaatagtttataagaaacaacgacagttgggatttactttattattataatttttttattttttattattnttatttttttttttttgataaagacgacagttgggcatttcagcaacccaaaaaaacgacagttgagaaacgacaagtttaactgaaaacgacatcatttaacaaaaacgacaccatttaatgaaaacgacattatttgtgttcattgatttcattccacttcactcttctttcccaaaacctcgagtattctcttccttcaaaacacctttagccttttggcattgagcttcgttttctcagccatggctaccaacttcctatctcgctcccttcccagaaccttaaccatagcctccttcatttctcgccccttctccacctcctcagcttccatttccacacttcaatctcgctcctcaatttctttcctccaccgtctccgccctctagttggagccatcactattcgcagaagcaattctccgtctacagtgctccggtccttttcaaccaacgtgacttcgtcctctctcaacgatcccaaccctaactggtccaatcgccccccaaaggagacaatcttgctcgatggctgtgattttgagcactggcttgtcgtcatggaaccgcctgaaggtgaacttactagggatgagatcattgatagctacattaaaaccctagccatggttgttggaaggtgatgtttctatcaattcgtgtatgcgtgtttgagcttctgtgatttagtttagcttgttctcaattaagctatgaattatttcatgatttacttaattttctctatgcatctcatttacagtgagcaagaagcaagaatgaagatttactcggtatcaactaggtgctatttcgcatttggggctcttgtatctgaagaactttcatataaaattaagggtttgtgattttttttttgttactatgaattttgaattgtgattttttttttatctggtttgtatttcttacaaattttatgatcgaattctttcagaattgcctaaagtgagatgggttcttcctgattcatacttggatgtaaagaacaaagattatggaggtaatattatattgagctcgtgtggtatgtcttttgtgtgttctggttttaagaatggccatttcttagctcgtaagccgtgtactataacttttatttctgaccttttctttgtgaagttgtgatatgattagagtgtaaaaaaaaaaccttgatttgtagaaatcgtttactattcttatccaatcttattattttttatttattttttttttgcatcacttgacttttgagtttttcttctttaccaagtaaggttgcatttggttggaaagaatgaaaacacaataatagattttagaatggaataaaatttaaaatgcataaaagtaaataataatttttaccttgcattgaaatttcaatgatctttacttctatttcaaaatagaatagccattttaccgaaatagtgtaaaagtcataccgttggaacgacattcctaagtgtgtaaatttttaggattaggtgaattggtaagtcttgcttgaagtcatccaggaaccactatgcccactcatgcggcatgccatgaagaaagggcagtggtcattgataacttattgcataaaaatggctttttggaaaatcggaatctatgaataatccttgacattttaatcatttttaccgtgtgcaatgtgtgctgctgcaatgatcttatataagattgctattattatgttaaccaaggtgtttatgtgatcattagaattgtgttgagcatgatctgtgactctttttcgttgataccgtttatacaccttttggcaggggaaccttttattaatggtgaagcagttccatacgatcccaaataccacgaggaatggataaggaacaatgctagagccaatgagagaaataggcgtaatgacagacctcgtaattttgatagatctaggaactttgagaggaggagagaaaatacacagaaccgggattttcaaaggggtgcacctactatgccaaaccagacgatgcagaatgctggaccgaactcccacagaatgccccctaacagcaacatgggtccaccgcctcccaacatgggtggaataccccagaacaatatggctggagctcctcgcaacaacatgaacccacctaataattacggtggcatgccaccaagcaacaactggagtggaccgccccaaaacaactatggaggaggaccgcccagccataacatgggagatccccataacagttacacacccggcagggacgctggaaatgtgtctggaaggaactattcatcataggaaaacccatcaagaatttttttgctgtaaataagcaaacatagctattcatcttggatttttaggctttctgtaactactactaggttgagatactgtttgtgatgtgtagctcaagtgattgagaatcatattctaataccttccctctgctttattcactcctaaaggtaacaaacttttaagtcataaaggtatattctcataattcaaaatgacacgttcatgtttcatttcaatttgatatggaagtcaattttggtgtaagggtattccattcaagctaaagaattcttacatacattaaatagagtaataaaaaaaagaaaatgtaataattaggagtggtttacaactagattcttcaataggtattatactattttagtctcatgcattaagtaatgagtagtgatataaaatattctttagcttgacgaggatgagattccatctcaagtggtactttttttgccactaatcttttatttgtgattccatctcatgtgttgttgaatttctttcaatatcgaatttgggaaaacatatctgatttgtgctgtggagatttgaaaaataatactcccaacttaaagttgtagtgtgctcaacttatcttcacttgattccatcaataatgccatgttgttttgatcaaatatcttcccaccgacttggtataagctgtgtctttattttatttacttatttatttgttttacttttgctgaatatagaagttgttgtggctagttttcacttttcagtgtattatgttcaagggctcggatttcacaatatgaatctcttttggtccaacacttaaattaccaaaagttaaaaagtacataataataaagtaaaactaaggtaggttcattaactatgtcactcattataaggaatatactaacttgtttttgagttgggttgtattttgtgtaagacttgtcatcgttttaattttgttgctcacaatattttcattgggtgttgtcaaaaaatattatttgatccgttgaagtttccttaatccggataatattatttttaactatcctatggtataacttttaagtcttatttacatatgtatattagacttttgtttttttgtaaaaaaaataggttcattaaatttagagcactcttaataataagttaaaataatttaatctttaaattatagagaaaaaaattacaaaagtgagtttctatcaaataaactaaactttagttattttacataatattttaacttaataaatattgtttaatttaatatagagagataattactaatt

SEQ ID NO: 16126 - DNA, 6645 bp, Cannabis sativa
tgagccaaatagttacaagttctaaacataataaatggtaataatttctttttgaataaaaaagggtaataatttctaaacataataaaagaaagaaaacatttgataacgatgatatgattggtcagctcacattttgtctgccaaaaataaaaaagctgaggtggaacaataatctaattagatttttcatttttggaccatctttttttcttttttatcgtttatatatattttttaatattttaaaaataaaatattaggcccaagttgacccagttgagatataatttagattttgtacgtgcaaacgcctaaactagaatttcattgtcaccctcttcaaaaacagggtgtcacaactcacaaccacaccaccaccaccaccacattgccctatctatcaatcaatcattcatgctcatggagtttatctttcctacttttttaccaaacaaaatctaatttttctttgttataaatatttttaatttatgattgtattagtctcagctatataagatagagaaagtagtatactaatttgttacgttgttattgttgtttctttcactgttcttctttcgtcgttttctatattgtattatattatatatataaactttaaactataaagcatcaagcttttgctcgcatgtggctaaactcgatctgggaaagtggcaaaagccgtaaatttaaccattggcagttgctttctttgtaaactgtttttgttttttaatctgatatatattattgttatttatatattgccaaattaaaaaccggccacagctccatgatcggtgaccagaggcagaacatatttcattagcgtcaccatcatcaagttcgctccttttattacctcatatactctctcttcttcataaaaaagataaaaagaagaagaagaagaacccttttaaggatatagtatactaccacgagaaagaagacaacaaaatattcccagaagccaaacagaggaattggagagaaagttttgattttgtttgatgggtcatttacaggagaagctgagagggtttacaaacaacagatggctcgtttttgtggctgcaatgtggttacaatcggcggctgggattggatatttgtttgggagcatatctccggtcataaagagctctttgaattataatcaaagacagctagccaggcttggtgtggctaaggatcttggagattctgttgggttttttgctggaagcttgagtgagatgttgcccatgtgggctgctcttcttgttggggctttaaagaatttttttgggtatggttgggtttggctaattgttactggaagagctcctgttttgcctttgtgggctgtaagtatctatatgtatctctatcaacttttcaatctatctcttttggatttcttttcatatttggtttcctgttacaactgggatctagttattttttccatgtttttccttctgggcatctctctttctcactcaggattttatttgggtagattaagaatacttccctttcatccattttctgaaagttcccatctttaaatgctcttgagttttttttatccttctaaggtgaccaccattagatttccacgtgtaattagtatccactactagtgtttgatacgaggacttttgtaaaaccaggtggttttgctccttccttttatatgctactatagttttagttgaaagaattgtgtctaggatccaaagacagtctaaaggtgtttggaagtgaaatatgggaattgggttttgttgtttatacatgtttgagaaagtttgttcctttgtagcttctaggaaaagtataaacagtttttgtagttgtcttaaaattctaattagtaccaaagagatttttttttttttttttttgcttggttagctatcaatgtagttttaatcacttgtcttattaggtagaagaaaacattaataaccaatcttattgggctcttgtctttgtctaagaatttgacacaaacatcaatatgttatgcagatctgtgttcttatatttattgggacaaatggtgagacatacttcaatacagcctctctggtttcctgtgttcaaaacttcccgaaaagtaggggtcctgtggtgggtattttgaagggatttgcaggcttaagtggtgcaattttgactcaaatatacactatgatccactcaccagacaaagcttctattgttttcatggttgcagttggtccaaccttggttggtattgctttaatgtttattgttagacctgttggaggtcataaacaggttcgagcatcggatggcaccagctttacaataatctacagtgtgtgcatactagtggctgcttatttgttgggggtcatgctagttcaagatctagttgatgtgagccataaagtgatcattatatttacagtgatcttgttcattattctcctagctcctattgtcattcctgtgtggttgagtttctctccagactcaagagtaccggaagaagaggcactcctagctcggcctaaaaaagagggaactgattcaggtgctactagtgatagtgaggcgatattgagtgagcttgaagatgagaagcctaaggaagtggacttgcttccaagatcagaaagacaaaagagaatagctcaattgcaaacaaaattactacaagcagctgctgaaggagctgtgagaatcaagaggaggagaggtccacaccgaggggaaaacttcaccttgacgcaagctattattaaagctgacttttggcttatttttgtgtcacttatgttaggttctggaactggcttgacagtaattgacaacttgggtcagttgagccagtctctcaattatgacaacacacatatttttgtttccatgatcagtatttggaacttcttaggccgagttgcaggtggttacttctctgaaattgtagtcaggtacaaactgattttcattgaatattacatatccatattgactttgagttacaattagtcactgtgatctcattttcacagggattatgcttatccaagaccagtagtaatggcaatggctcaatttgctatggcatttggccatctctatgttgcttttgcattgcctggagcactatatgttggaaccatagttattggtgctggttatggttttcactgggcaattgtaccagctacagcctcagaattgtttggcttgaaaagtttcggtgctttgtacaattttctcacaatggcaaaccctgctggatgtctaatcttctctagcctcattgctggccctctatatgaccgcgaagcagagaagcaagctcatgggcgaaacctccagcaacagtttataggatcaatcttctcaggcgtgcttggaccgaacgatccaccagcatgtgaaggttcagtatgtttcttcacaactttggtaatactatctggcttctgtattcttggagttgccttaagcatgattcttgtgtatagaactaaggcagtatacacacacctctatgggaactcccgttcagcgccagtttcataatcggttggtttatcatttgtctgtataatttgtctagagtatgtttccatgtgtttgttaagactatatcagaagaaagaatgatgtttttgggaagatatagtcttaaaaaagttttcctctagaagtgggagccataaaccaatacagttttttcccttttgtctattttgttcagtgattaaacaactcattattgagtctttttcaatttttttggtattctttccatttcaattttgtgctctcttgagctcatatgatagctgtatccattatatatttaatgagtaagtaaaaagattgatattttcttcatatttttagttctcacagtgaaatagtgctcatatctttttacccttatgttggtgaaatggtacacttgacttgaaccaccaaaaaacaatgcgctttcttcatattattctaaacaaaacattcagtaagatcatcaattttactctttaaagctttgaactttatgataaaacatcatacaagtttgcactttatgtttaaagcaaaagcaatcaatgttgaacaaacaccatcaaagctttcacttttctctgtttttaggatgaatgacagataatgtgcattaaaagaattattagagaattaatggtatgattgttatttctttaatgggtagagggaaaggttgcttttttatcatcaagctttcattgcagtgaggaatcttctaaaatcactaggtgacaaagatgaacatgagttgggtgaagttaaagttgaagactttggaaggtaattttaagttaaaagtcttccttatacatatatacacaacatgtgaaaatcaaacaattaaatcaacatcaacccacttgaaagagtgactcttcttcttttatgtgttggctgaatactaatactaatactaattaattaattaaggaccaagtgtttttgcctttttcagaccttttcttctattgttatagttaggtgcagtgtcattatcttgtcaaattcaaagctgtcatcccaaattttgtaacatccctttgttttttgttgtgtgaataacttcaaaacaaaattgtgcttatctcttctttttttttttttgttaataattttataattatttcagctaaattccacacctttattatttcagcccactgattaattaaatacagtcatttataatttaacacattgaaaactacaaaagaagcaaaagacaaccaaaaacagtgtttgctattattcatagtttaaggtaaatagaatcttacacctgtattttgtaaattattctcacatgttatgtatacatttacattaaattaggcaaaggaaaaaacaatcatatttgcaggtgttcttattttttattttcttttttaaaaatgatttgttaaaaatgacttaatatttatgaattgaaggcagtacagtctcttctgatctcaccaacaccaccagtcttgacaccaactcgaccgagttttctcatggccgagccaaaggcggcgttaaacacaccagcattgttggcaaaatcaagaactgtttgttttgattgagcatcagtgaaaagaacctgatcagaagtaaaaagtcccttgttggcaaccaagttctggtagtacacattatcgaaagctcggggagttgtagggtccatgtcaatggctatagttgggtcaacatctctaggacaagaagccattaactgctgagcatatgcagagtccaaagaagggtcaattgggttagaaggtgtgaatgagtagatgcgattggccacacggttgcagtgtgagaacccaacagtgtgagcaccagagagtgctatcatgtcaagttggctaaggttgtttttgctaaacatggcattgagttcatctaaatgagctgttggttctggcaagtttcctttaactcgcgacgcttttgatattagtccatcacggcgtcccatctccacattgaatgttgagcctcctgcctacaaaaaatacctcaaattaacacaatccagagtctgacataacataacaatatggtatcagagtcgagttaaattttagttaccaaaacaacgacgtctctagctgcaagagctaaaatatcagcacaggagacaatgccggggcattgagcttcaacggcttgtttggctttgatgactgtgtcaaaaccgtctcctgctaaggagatgttgtcgtctgagtctttctctgcatcgccatttggcgatgcaatcattactgatgcatcacaaccctgccacacaacatcaacatagatgttaggattaggctactacaaaaagtttgaaaataaaacaaacaaaaaatgttgttgaccaacgtaatttgaccaggttcatgttctgatttatgttgttatgtattgcctagtcaataataattggtttgaactattcctaggttggctgctgattaaatttccaaatagaatagcctccattagtgactctgtctactttttaacataaaaaagagaaaagaaaaacacaataaataatttgtaatataacttaatgaaatctttcactctacattcaaagttcaaaaccaatgatcatgataatcagaactagttaacaaattaattaagacactcattactagtaattattacaattaattgaatcaaaacttgagaaacatgtgtatgtatatatatgttatgttaattacctcaacgaaacaatcatggaaaaacaaacgaagagtagccggaacagtgacaaaagtctgagcaaacttagtagacacaacctgtcgaactatgaattcaacattaggacatgtcccactatagaagttttcaaccaactgagcttctcctcttcccatgttcataccaatcaaaaccattaatatcaacaatcctctcatatttctcatctccattttcttctctatgagaaaattccagtagagaataataatatatggaataagagaatggtgatgagaacccttttatacaaataaataaataaacttggtctaagagcgtttgttctagtaacatatatgtgtcattttcgtggaaactcaattactataaata

SEQ ID NO: 16127 - DNA, 3969 bp, Cannabis sativa
tctcttcacttttcaccaccaccaccaccaccaccaccatcatcatcatctttcgccaaattccaattttgtctttcccttcatataatttgtttatttcttccttcttgttattgagatagtatttaatatatatatttataaatttcgacattaaattattttcttttataaccttatcataataatttctgggtatttgggaacttgttatgggctaatttaatatttttttcctctcgatctccatattgaatttgtaataggttctaggattacaaaaaaagaattactcagtattttgtttggctagttttattgtataattttaatgcgccactagccctcttggaattgaaaatttagcttgtgggtgtgttttgataatttttatttagtttaggtgttggaaattttcaaagtatttgtcttaactttcccgttattgtacaattttcaataatttcattctttttgctcgaagctatcatttccattcataattgcgctatttgtttactactcattctgctgctctttctgtcctttttcctcttctcttgtgacgttgtaaataatgtttatttcattaattcattgacctgtatattcaccctttgtactgaagccaagggtccctattttattatatattttgtcatgaagaaaggaaggagaagaataccaatatatgacttctggataattcttttgaatgcatacaaaattttctatttcttgtatacggttgaaccctgctctttggatttggattctttcccattaatagtagatctctttattttatccatttccactgtaaaggttactcacctgttgctttcaaagaaagcgaaagtttgactcgtatatttcaaaatccaaaattatatttccttaaattatttacttatttattaattttctgaaacaaaattcgacaatttttataacttatacaggtttagttaatatatgtttgttccgtgactcaggttatttttgtcttaataaacagctcacgataattaaatttccaagatgggtagcctggaagagttaaattttgcacagtaaaaactttcatagaaaagtcatgcccaagaaacgtagggtgatgatgatgatgaaagctgcttaatgatgactatttatggcatattaaatacccagaaattgtaaaagaaatattaattatattatatatacgtatgtatttatttctgtatgtatgtattgaagccataaatactaaaacaatgcagccaattgagtttttgatcgcatgtgtgacaggtcaggcgttatgtttaccacgacgttgttcgattgggggatcttgaaaagctcattgactgtgctttcatccaggtactttcagttttcatctttgacttccaatacaccaaaaatgagaaatagaaaagaaaaagaaaaaaaaaaacttattacattcacacataatttataccaaaatatttacacaccttgtgacaaattagatagtttgtataacattttcgtataaaaattataaattcttttttctatttttttttttatatggatataaaaattagaagttgtgtacaaatgttctgatatatatgtacaatcataatttgaaggaatctcatttattattggaaaaagaaaaactgaatataatttcaatttgactaacaatgacatggtagaattggactatgtatttgtcatgtgtattaattgaagtgggcctactatttctataaatatataaatatttatatatgtatgtgagagttaattactattcattcttggacgaactcaataatggtttcagcccaattgcatagtgttaataattttacttgacaagtaataataatttttgaattatttggttttggcagccttatacaattaacggtgccaaagtcatttttttgaatcaaaggccacagtctaggagttgcaaaggaactgccaacatttgcttcacttgtgatcgaattctccaagagccatttcacttctgctctctctcatgcaaggtcgaccacttacttaattaattattacttcatttaattaatattttctaaattcccaatgtcaaattcatatttatattaattttatgctcttggtcattagggtttaatttatccacaaataatattccttgaattgagcaatattcttgccacgtggatatgtttttatgctttttccgtctgcaaattatgcagataccatacttggggtttgtgcttgctcaatctattgtctggtcatgttttaattacccttttaccattcaaaacactacatcttggtaaactatacgtattgggcctctctctttgttgtaaagatacagacgttaaaattcaaaaattatcaaagtcaatattatatagttatcaattattcaaataaatatttttgggaatcctagtcaagtgttgtcataaatcaaaaataaaaaaatggcaaattatgtatcaatgcaggttgattttatggtgaaccaaggggacgatttgacaacaattctctaccgtttcgatgagtccgatttcacaatttctcagttcgagggattgaggatggatggctctgaggtcactgacgatgaaaatggtccaaatttggatgatcataaccctatgcactacggacattcttccggctcccgtgatgcttctagcaactccgctatttcacgggaaccggttgccatggccgcctcaacggccaccaattcggtcaagaagaagaagaaaggcagtggctttcttcctggaattgttctttcccttagcagcaggagaaagggtgctcctcatagggctccactttcctagactactactcatccaatctctgctagtagtaataattaataattaaattcatagggacttggaaataaaaaagaaaatatagctcctccttgcatttgcatttacgtaccttcttataaatatatgtaatgtccctattttaggtatcatatataatttaagtctctcttcatatcttcaaaagaaaaagaaaaaaaaaattattagagccggtgatcattattgccaatctagataagtcttattaccaaatttgtaatgttatggcatggtttggagtctgtattaagcatcaattctttttcatttttgtttttataatgtttatgtgtgtggagtattaccattactgacttcaggtgggtgtggagggactgaatggaagttggctctcagctccaccaattttgtatttgatgtaatggaacttgcggtatatatatattatatttatataatttcctataatttaatattatatatatatatatataagttttaagattaaattgggaccagtgaattgtattattcatttggatcagacattgaattctatttcccatgtgattcttgtacagcaaaacctcacattactggcattttgtttctttaattttatctgtatttctttttgcttactcgtacatgtttaatttatatgcatatattattgaatgttgttttctttgaattattaacttttttattttttactacggtatgcatagtgcttaaacttacatcgaaattgaggtttgcgtccatatatacatatataatttataatatatatatatatatgtgtgtgtgtgtttatggagatatggggaagattcttttcaattgtacaatcaaccaaattatatagacagtaacaaaagaaagagagaaattcgatatatatatatttatatagaaaatagcatgccaaattgttttggtacaatgaaataatttttttgatggctgaattggagtacttgggggccagtctagtatgcgtttggtttcagtacaccatcaataatgcaaaaattcacgtcaatctatggagacttgaaagaggagagagaagagcaaacagttcctcattaggattaaagattttaca

SEQ ID NO: 16128 - DNA, 3478 bp, Cannabis sativa
tgatgatttcaaaaaaaaaattgtaatagttcaaaccgcataaactgcagaaaccgcatcattttttgtggtgcggtttttgcgattttttaatatcacggtgcgggtacggtttggaaaattaaaaaaattgcatgtgcgaatcggtttgaaaaaatagttaaaaaccgcactacccgcaccgcgaacactcttaaattcttcacataagataaacattttattacattgtctaaaaaaacaaagaaattgtactagttagtctcactcccaaataaacaatgcacagtttgttcgactatgtaacaatgtgataataaattaataataagtgagaaggcttatttcttttctgggcttcaaaattatggattcagaagtacataggaccaacaaattgctgccgataaatagccccagagaaaaaagtacgacgtcacatacaaaaacagttgacacttgaaaaaataaatagaaaagatataagggtaaagtttaattgacttatttttcatgaacaagggggttgtaaacagggaaccacatattacgtgtcacatattctactgtctcctcctgcaaccaaaaaacacagataagaacagagaatatgaccgaaatgattcaagaaacaagaattttatctagattcccaatgtggttagtgcagattgtttttcaaattattcaactataaacagtgttaattttatgttaaaaactaataaaagctttatataaaatcttacttttgacatgtgtttgagctctctgtaccccacatcaccgtgtccttcagccaatccttctgcaacagctgctcgcacaacagcagctccaacctctgtcgtgatatgccggatactgcaccatggcacacatacgtacgtatataaggttatctcgcaacataggttaatctaaacttaataaatataaacacaattcctctctcattctgtgaaagagaagtaccacgaagtgagaaagtgaaacaaaaatgagaaaatacaaacacacccaggatgcctcagaccccatcattacctgttaatagatggataaagtatgcccttttggatatcttcatctgtcatataagaggcaaggctgcacagagaagagaataccgtctcagcaatttcatggggaaataaaactttaattcacatgtatgtactgatactgaacagaataatgaaatctggattttaagagttaacataaaataataggtaaagattaactatattttgtaaacctgcctagtaaaacgtattttaattttttaacataaaaattagccatatcccaattcccaaaccagtatagagatacctaccaaaccagtatagagatacctaccaaagataaagagcttattaaaaactgtaaggcatatatgtgtgtatcagttctatcagagctgtagtacaatagacattgtttgaaaaaaagataaagaaaatatatatgaatcttcttgacgactgttttttgtacacttagactcagggcattacaagggtgttattttattttacttttttcttgaaaaaacacaccaagttctataagacagtctcataaaagaaaaattcatgggatagtattactaagatccaaataaggtccagaggattaattgcaaactaacaatggcgcaaaaaatttattcccattgactattttagaataatagttataatgatcatagcaaattaaaggaaacaaacacgtccttagcgtaacttctgctttttttttccctattatcattctaaataaagcaagcaagaagtcttaatataccattcagcagctgcctgtaacatgccatctgagataaaatgagcgccagagagaagtgttcccaaaccaattctgaacaaaaggccaccgaaaaatgagtttacaaccatcaagatataagcatagttggcttaaaatgatgaaattgaaggaaaactaacccagggaacaggtacatgttattcgcttgatttacatatcctatctttccgttgcctgcaaatcaatatgcaagtttttggaatatattatacgagacaagagaacgagaagaggagcttgataataaaactgaaatcgatgcttctaggaaagaaaattaccaagatcaacattttcgaaaggactgccacttgcaaaaactatattatcaccagcatgcttgaaagcatcagcagcagtacactcagctgatttgtaacacatgcatcagaaaaaatataaaaggtcaacaacaccaaacttaagtttccgtgaagaaattctgaacacgataggatcccagaagcaaaccattcattgtggggtttgacatagcaaaaatggcaggtttacttgaatctgaatctcgcatagccttaagcacctgataaaagctcaaaccattatgaaaatacatgcaattgtcaaagaggagactgataccgagcataattttcctttgacaacaaattttaggcgcaatagcctcgaataaaattaatttccagagatcaaatctaattatacaacagcttcatagtgaggaaaacaaaaagagactgatttatagtcataaaatttaagacgcatcagacatcaaacgttagcaaaaagtaaagaaggctgcaaaattagagtagactgaacgcagatgaaaaagaacgcacctcctcattgaaaataccaccttttccagacaaaccaagaagcacatggggccggatttttttaacctgaaatgcattaagatcgtagttattttaatattcattattaaaaatgttgtctcggagtaccgatattcatgttccagaagcaacaataaaaaaagccaaaaaataacactgaatctcatcagagaaaacctcaagcagttctgcaagacttaccacttcaacaagactagctccctccctaagcccatcaatctctgaagggtctttagcaaatggtgcagctgcaggatcaagattattcctctgtttagttacaagaccctgcatgaaataataatgagatgtactatcatattagtagctaagaaaatcttcgagaaattctgtgacagacgtccagacaataataattcacaaaattaagctatattacatcgttattggaattatcaatccgttaactacccagcacaaatatgcaagttcgttataattttagacatgtgcatgtagttaggagaaaactacaaatttatttctacaaaaatgactacttaagcaggcagaaatagtaaaatcttacatctttgtcgagcaaaaagaatagtttgttagcagttgtttcatcgttccctgtcattcttgctgcagcctgtatggccgtgttaagaacaccaagccctgcactgatagacaaaataaacaagaggtgagacaaaattgagaaatggacgcacatacaatagaccaaaacataacactacattaagttgctaagtttgaatacc

SEQ ID NO: 16129 - DNA, 14489 bp, Cannabis sativa
  modified_base (40)..(70): a, c, t, g, unknown or other
  modified_base (3394)..(3404): a, c, t, g, unknown or other
  modified_base (11546)..(11551): a, c, t, g, unknown or other
  modified_base (11829)..(11848): a, c, t, g, unknown or other
tttatttacattgttttagatattcatatttaggatgttnnnnnnnnnnnnnnnnnnnnnnnnnnnnnnntggtaaaacatattccaacagaacccccaagtgattgagggggaaagatccctccttcatacataacagccccaatatgcgatctttacaagcgctgtccacaccaccaaagttgagtcacttaaaactttaaaatcttcatacacatgttcccctaacctttcattacctttgcaaaagataattaggtcatttgcaaagcaaaggttaacgagtttgagagacttacaaagagggtgaaacccgaagactttcaaattggatctctgaatcaagagtgtagtcaagtactccatggtaaggacaaataagagatgggacattggatccccttacgcatgcctttttcacctttgaaggagtcgtggcatctcccattcatcagaagggtgtaagaagctccatgaagatagcttaaaatccaagagatgaacttaggaggaaaacgcaaacccttcaaaagatcataaatgaagcaccaatccacagtgtcataagctttactaatatcgatcttgaagaaacatttggctgaaatgttctttctcgtgtaacctttgaggatgtcttgaaaaatcaaaatattatgagccagaagtctattctggacaaaggcgcctaggttatgatgaaaccaacttgggagaacttccaacactctagtacagatcaccttcgagatgcatttatataaaatgttgcagcaggctattggtctgtacttgaattcctggggctatcctttttgggaataagagaaatggttgtctcatttatttccttatgcagggaaccattttggaaaaaacccaacaccgcactagtgttatcctctccaatatcatcccactgggttttaaagaaacctaagcaaaatccatcaggacgcgggcttttagtggactgaatattgaaaagaatagccttgacatcaaatttgttaaaaggacgaataatctgaacttgctgttccaagctaagcttatgtccattctccaaactgagcagatctatccttctagtggttgaacttttcttccccataaagttatgtaagtgttgaagaaaatggttaaccactaaaggataatcctccacaatggtatcatcattccaataggaaacaattttgttatcagcttttgttttttttcatgacagcatgaaaatagcttgtattctcatctccaaattttagccaagtaacttttgactgttgttggaggtaacttttgtactgttttcgggcaagcacgaatttcttctgcatatctttgtcaacctgtgtatgaacattacatgaatggttagtagcacgcatcttttgcgcattgttataaacctcttagcttctttctacaacacatgggggcttgtgtcttctttgcgccatcttttcaaagcatgtttaacactgaggagtttctgattaaggctcttgagggtaaccggccttgtgtcactccatgcatcaaggatagttgctttaaaatcacccttgaaagcctagtagttacaaaaactaaagggcctagtaccatagttattggcttcaagaaacttgatgaggcagtaacaatggtctgaaatagtctcccacttgaaagttgcagcagtgttcagataatagtctagccaagtttcattagtgaaaaccctttcaagcttggagaaaattctcactcccatttcatgtttattagaccaggtaaagtaggttccacaacaattcagttgatccacatcacatgaacttaaccggtcttgagcatcttgaatctccatagccttaaccagacgaccccctattctatctttgtagtaaaacatcgcattttatttcccgaggataatctaagggtcatttacgttccccaaactatccaacttagcccaaagatcctttctctcaactattgagttgctcccatagaccgcagttaaaaagaactcagccttagttccaataattttcagtttgtagtgaacaaactgcttgtcatccataataatctccaccttaaccaacatgtctaaccaaacaagaagaattcgataggataaatttttgctagagtaacagctccaacgaagaaagttattcatcactttttggactttctcatgggtgattttggtctcaaagagagcaccaaaacccacattattcactttacaaaattcaaacacctcacactgtttttctatattatttagacctttaacattccatcccaaaatgttgcttctattcattatcaaggccatggtttttgtctcccatatcatctctcaaaacatcataaccattttaacaagagttgtagttttggttgataccgattatgtccctcaccttcttggtgtgatccattgctcttcatctaagccatttgtctagttatcttttgaatttataggcagacatcagctcctgcacaattcttctctgcatgaatatcagttctactgtcatctcgagcaaccttcttctgagttagatcattacatgccccagttgtaagactcttttcctcatctttcatttctttgtgtccatgttgttttttttttcaaacaacacgattctccttattacagtttgctgctgtgtggcccagtaaagcacacgcagaacatttcaatggcagccactcgtatttcgcttgctgctccataagttgcttcctttcattctcaagcgaaatcgatttaggagggttattcgagatttcaacatctaccaaatccctagcaaacttaatcattgatcgctcaagagtcaccttatccaccattattggcttgcttattatactaaccaatacactcagatttttcttccccagtattggagacccagtacattcaatctcacccaaacagggacacctaattcacatcataacgatgatcaatagtaaatcgtgagtaatcatgagctcatgttcatgttattagtttctttgattcactcgtttaagtttctcaagggatatgattcttacaatatttgttttgggaatctaataatgtggatgttcgggacatgatctacgattatagaatcctgaatttcctaacggatcaaatgttggttccctttaagtattaattgtggaactagaaagttctgcacaaatttagatgggatctaaattaaacttcaatagtaattaatagtactaaaatataaagaagtaattagaacggtaaaacggtagtttgaccaaaactaattatgaaccaacacatggagggctaatcactgaaattgattatatcaatggacactgcactaaaactcaataaatataattctannnnnnnnnnnagttcaattctatatttatagtggagtaatcatagaattaataaatagtatttgcttaatgagactcaataaataatctagtttattggaccttagaattatagatccatggtccctaaatcgccaccatgaaatactatcaagggaatggataaagagtagtacaatatttttcggaaaaatctatttttgaaaaaatagtaattatttatttttgtaatcaataaataattttttcaaattaagtaaataggaaaaaaggaaaaatttgtcaaaacaatatttattgagacaaaagttaccaaactcaaagacatcattcttatcttaattcagacatggtaggcgcttaccctattgtagggtgtccatattggattaattaattcaaaaagataaatatttgaatataaaaaatggttaatatatttcaaagtagttgagatattctctcataatatcagtagccgaattcggttatagatattttatttaaataattaaatatgatttaattaataagaatttaactactataaatagaagcctaatttaagaaattaaaagaatcttttcacaacatgatttttgaaattaataggagcttttcaactgctttgtttttttgaaatacctagaggagaaaagaaaaatttattctctctcaaattgttcttgctcatatgttgagaattaaacaagaagacattatacattttatcctaatagcttttactattccttgtgtgtggtggatcaattttgaagactatggtgtaagtttccaatcatccaaaaggatacaagatacgagaagttttgaggttaccctgatattcatcaaaataatatattcttatcttgtattttatgttttgatttaatgtatacacatctagagatctattgggctatggtacaatgataatcagataacacgaattcttctactgcgtacctgatttagtaccataaaatcttacatttggtatcaagagcagttccatgaatgtatatacattaaattctttatgggttttatgcatttacatatatatatatatatgtgtgtgatttgtatgtgaatggatggttatattattatgaatatatgagaggtgatgaattgttaattatatggtataattgtgtaggtttcgttattttttttcttagaaaataatgtaagctattaaggggcataagaatttttataaaattatttttacgtaaaatttttacaatgtaatgtacattgcatgtgagcatggtttctaaacttgtaacccggccatgcacatcgaaaacaacacatccatgtgagctcaggttcatggaggaaccccgaccatgctcgacctcccgtaccatgcgcataaactgaagcttgccaatgcatgcacatgcatgaaacgcacgacgaggttagaatgaagggacttcggtcccggtccttctcaatgggaagagccacagcctaccatagtggtaggtggttcacttggtggacctcaactcccttctctctcatggcatacacagtggtttgaccaccatcaattgttgtgaggacttgttcggggagaagacctaatcaggtttaataggtcatgcgtgactcgctcctcctcatgtagttatgtgtgtgacataatcctatggtggcctgccatggccactatagctgtggtggctccccagagctgcggccacaatgtggccatggtggtcgatcctattcctactcaaacccaaccctatatatgtaaattcagttatatatatagtatatatgttgtataatatacaccataaattatcatttatttatttattgtaaataattaataattattttagatatttatttggttttgaattcaaaataacattaaggttattaatttgaaaatcaaattcaaattgataactatcttaattatttaatattaaataataaaattattttattatttttgaacaattaagacaaaataatatagttttttgggatatttatttttgaattaaataaatataattgatattaagtttgaaatttcaattcaagtctataacaatattaagacaaaaattgtcttaacctaaattaaaataataaatgttgttattttaagacaataaaaataaataaagttgtcctaaataaagaatttatttaagaataaattaattaaaattgttttaattaattaaaaggatttaaaaaaatatcttaaataaaaagtttatttaaaaataattaatgaaaattattttaattaatttgaggcttacaacgatcctaaaaaatcataaaaatgccctagcatggatggaaattagttttgtaatttatttttgaatttttacaaaagttgtaaaattagaattacacaattatttcccagttcatcatcattctttatttattatttttttaaataaatgttcagtaatagttgattaataacatgctcatgcattagtgaataaaatgtcatagataaatatttcacacagttatattatcatgcatctcatagtagaaacatgatatattaagattgtcctatagtttatgtgtttaccatttttaaaaccgaaaacatgtaaattggctaagattaattcagaattaacttggtaatttttaattaaccttttaatttaaaatagttttaaattataaattaaagagctaatttaaatttaataattatggcgaaaaattatatataatttgaatcttttattattaattaattaatcataattattaaagtggttaataaacacattgacctaacatagttagtgagagaaggagtacatgtcaacgtaacttacgacctccattattggtcaacaccgaaggagtatagactggcctcgagatgacttttttttcttcccctaaagaaggtatgtgtctatattgttgttcaagattgatctcttgactaaggtaagagggagtaatgtattttagtaaaatacggacccttaaagcgacattactaagttaattcataagatctgaaataatgggttacactcacaaagtacaactaagcttcatagtggttagttgttaacttggtcaaacataagtactttatatttttaaaaaggaaatacgagatatttaggtttcaaaataataaagatgagaattgtctcgtaagctcaatgaaattgacttgataccgaccctaaggcggcgatcaattgtcagagttttattgtggaataatttaaataagcttttatgtgttttacttgtatgcgctcatgcatcacatttacaataattccaaaataatatttattattcaagtgtaatcattatgtgactttatttatttcagtcatgtctaccatgctaaatccccttactactttactagcacttgaaaaactaaatggtgatcatttttataaatggaaattaaatcttaatttaatgatagttttatgagaatcagaaatttatcctaacataggagtaacctgagcagcctactaccaatgccttgcaaaatgtttgagataaatatgatgcttagatccaatccaacaacaaggccaaatatttcatgcttgtaagcatggacgatattttgcgtaagacacatgaagatatggagaatgcatcttaaattatgaattctctacaggtaatgttttggtagaaatctaatcaaataagatatgatgctactcatagctacaagaattataagatgaagaatggtatcattattttaactcatatattgcacatgattgagctaatgcataaggcagagacacatggcgctatcatttatgaaaggactcaagtaagtatgatccttgagtcgctatctccttgctttaaagctttcaccacaaactatgtgatgaacaatctagggttcaacatgactcagttgttgaacgagttgaccgtgtttgaaaaccttaataaggataagtccaaggaaagtgaatgaaacattgttgaagcaaaatctaactctccgtcttcttcttacaagaaaaggaagtggaacagtaaggacaatagcagtggcaagcccaaaggcaagaatttacccaatgccaagaagaacaaagccagtcccaagtcaaatgacaaaaaggcaagaggcaagtgtttctattgtggcgtaatgggatacttgaagagaaactgtaacaagtatcttattttcgagcttaataaaggtaaatgcaatttattttttcttgaagctaacttagtggaggatgataattccttatggattgttgattctggagctactaatcatattttttcttctatgtagatacttgaatcgtcaagggagctggccaatggggaggtgactatgtgcttggggaatggagcacaagtgtctaccaagagtgttggcaaagtgaattgaaaatttaaaaataattttttgttattgaacaatgtttattttattcctaaatgtacccggaacattatttctttatctctttcgcctgaacaatttttcaatattggttttattaataatgaaattattttctccaagaatagtacacctatttattctgcaaaacagagtaacagacgttgtggattcaaactaagtgagcaattaattttaaataataaattatttagaatagcattgcctcaacataataagaggcaaaagatttatgatgatgataaaacgtatctatgatatctatgtttaggctatatttgtctagatagaataaactagttaataaaggatggtcctttgagagaactataagttggaagtatgtgaatcttgtctagaatggaagattgctaagagacctttttctacaaaaggcaatggagccaaaaaaaaaaacaacttgagctagaatacctcaataaaacagtgttacaaagagaagaagtcggaccttgttagacatggtcagatcgatgatgtgctgctcatcactgccactaaacttctaggcatacacacttctagcatcaacttacattctgaatgtagtaccctcaaagagcataagaaatacttcaatggaattatggaatgggaaaaaacccaatttgaaatatttccatatttggatttgtcctactcatgttcttaaacccaagactggaaaacttgctcctagaactgaagtgtgtatgtttgtaggatattgagatgaaactcgaggtgcatatttctatagtcatcaagacaacaaagtatttgtatctataaatactacttttcttgaacatgactgcatgaaaagtcacaagccacatagtcaagtgcttatcgatgaaatcaaaaatgagaagatttatgaaccaaagattttaacaccattagtggaatgaccaatagcagttaccacgattcctaaaaagaaaacctcagtacatcatcgcagtgggaggattgtgagataacatgtccactatgaacatgaagcacatgctcttatctctgacacagacaaggataatccattgacttacaaagaagcaatggaagaccataactgagacaagtggaacaatgacatggattaagaaattgattccatgtccaccaacaaagtctgggaatatgaaactccacctaaagatattacgcccatagggtgtaagtatatttttaagaaaaagagaaatgctgaagggaaggtagagacctttaaagctaggcttttagccaaaggcaacacacatcgagaaagcttcgattatgatgaaaccttctctcctgttgcaatgcttacatctattcacattcttttttctatagctgccacttatgattatgagatatggcaaatggacatcaagaatgcttttctaaatggaaatcttgatgaagtcatttatatggaacaactagaagggtatgtgttacaaggagaagatcaaaaggtgtgcaagttacttaaatccatttatgaattgaagcaagcctctagatcatagaatatgacctttaataaaactattaaagagtgtggcttcgaacaaaacaaagatgaagcttgtgtatagaaatacattaaaggtaatatagtggtattcctagttctttatgttgatgatattctacttattggaaacaatgtacaaaggttgtcagatgtaaagaagtggttagttgataaattccaaatgaaagatttgggagaagcatgctatgttcttgggatcaaaatctgtagagatagcaagcgaagaacattagcactttctcaagcaacttatattgataagattcttgaaagattctcaatggagaattccaagaatagaaaattaccgtctagatatgaaattactctatgtaaggatcaatgtccaaagacttctcaaaaggaagaggacatgagaaagtactcttatgcattagcagttgaaagcttgttgtatgtaatgttgtgtacaaggtttgacatatgctacattgtatggattgttagtcgttacaaatttaattcaggtttggaagactggatagctataaagcacatactcaagtatcttccgagaatgatagatctcatgcttgtatattttggtggagactttaattctattggatatactgattttgattttcagttggacaaaaatagtcaaaagtcaacatctgggttagtatttactctcagtgaaggagttgtagtctggagaagcattaagcaaaccagtattgcagattcaaccgtggaagttgaatatatagtagcttcaaagtagctaaggaagcaatttggttgaaggaattttacactgttctagaagtagttctagaagtagagaaaccactagtactctactatgacaacagtggagtggtggccaactccaaggaacctaagagccataagagagggaagcacattaagaggaagtgcatttactaagggatacattagagataggtgatttgacggtcttgaagatcacgtcgaaacataacctggtagatccattcacaaagatgctacgagcaaaatcttttatggattatataactaatatgggactaatagagatgcccagtttactttttggaaaagtgggaatttgttggggtttattccctaaaaattctataaagacatttctaattattaataaagagtttaacatattgatatgaatcggtgtaatttatatctccaaatatcatttttacatcctaatagcatcttcaatttgaagacctatattttctccacctatacaatgtttttacaattactctgtataactctctattacatttaatgctcttctataactttacaatatttgagaaccattctgtatcgactgtagtgatattttaaggccaaacatgtatgattcttctcttaacttgttctttagttaaacatatcacttgtgcctccttttgttccacagaattccaaagcaggtcatcccaagatcaccatacccgatacacaagtgcagcattacagcatacaataccgctttcttaaatcaactaagttttgcacgctctatccacatcagtatcgagtttaaatcattcgactccattttctagtccagccactctttaatctgcagtaaacattacagagaaaaggaacaagagaaaaacaagtgagtcgttgtctctagttgctgcctgcaaaacaagcattgatctttagtaatgatgctgaaatgtttcagttgttcccttattctgagtttgtcttggattgcagtccacaaaacaaagctatgtcgtgggatgttgagtttactccataatccatgactccaattcactttcctttgaggaggacaaataattttgtagccattggagatcttgtactctgtgcttatgaatgttaaactattaatatttattattgtataatttatatatataaatatcaaaaaatttcttatcatatgtggggttgtgacttgtactaatacagagaactaagataacttagctatgaatgaaacagttagcaacatattaaagttatggaatctttaatcaatggttgctagtacgtttcactgatgtccgttcttcagtgaaggtaatctcagttcgatttactgatgcagtatgacatcaaagtgaaggtgtnnnnnntaatagagattatatatgataaggacagatatgaatgaagttatctttatctaacaagttgtttactagaaagacctaattcatatcataacgatgatcaatagtagatcaacataaattctaagtaatcatgaactcgtgttcatgttattagtttcgttgattcactcattaaagtttctcagaaaagatgattcttacaacttctgttttgggaatctaataatatggatgactaggaacatgatctacgattatggaatcctgactttcctaannnnnnnnnnnnnnnnnnnntttaagtgttaattctggaactggagagttgtgcacaaattaagctgggatctaaattatacttccactagtgaattaatgataataaaggataaagaagtaattagaagagtaaaatggaaatttgaccaaaactaaatacgaaccaacacatggagggctaatcactggaatttattatatcaacagacactgtagtaaaatttaataaatataatactataattactaagattttaattccatatttatactagagcaatcatggaattaataaacaagattatttggttgatgagactcaataaataatctagtttattggagcttataattataggtccatggtccaaaatcaccatgatgtgtgtcgtatgtcgtatcaaatttactattattttgattttattaatacttccaattattttagtataaatataagtaagggttgatcccacaaggactatgtttattcaattattcaaaaattagtgacaagaattagaaaaatggggttttaaagattagaataaaataacataaataaaaataaaaaaacgaattaaaagttatactacgataagagataaatagttaaaggttattctccaccttcaacaatcattcttaaatcatattaataaaagaaattttagttgaagtagtcaaattatctcaatctccctattaaatgtaatcaagacgaagcgttcaataattgactcttttacataagtagtaaatccacgaagtatgcaatttatttaactttgataaagctttaagatttatggagatagactaatctaggcaaaaaattaataaaacatataattcatttgacctaggttctattcttcatcacgattaaaatacatttgacaatattagaaattgtaatttatcatagatacttagaatcttagactattaggtgaatagtaatcctaaaataacggtagattaaattaaaacttaatttagtcatcctctaaataagattaaaacaataatcataaaattaaacatagaagaatagaagcaatttgatgtaatagaaactagaaattaacattcatcaataaaattaaaaatttatgtctcgagttttgaaataacctttaactaaaagaaaactcctcgaaactagacattataatcaaagttataataaatagtaagagtttcaggagaaaaaatgaattatgataaagaacacttgaagttgtaatctccgtccttttttttgctttctctatgagtttctctctcaattttgtagcttaaaagttctaaaattcgtagcctaaaaggtcctattatagtgcttgaaaatatctcactaaaaaaagatatctccctttaaaaaaataaaaatttcgaaatttcccgaaaatcacctcctcgtcccggccatgacttcctgccaaaaaatttctatcacgtgatttgtattttggccatagcatcttcaatacaactcagaatcggaagatttaagatgtttcaaaaagataagaatgagatctacaacttttatgttgagctccaagtctagttctgcttctagggttacaaaaactctcatttacattcaattttgttaaatcgagatcgccggcttccactattttccatcaaaatatactaaaatctctccaaaaaactctaaatgcatgattagtctttaaaatatccaaaacaattaaaatcacactaatcaataatttaaagaataaatttaagaatattaatacatagattgatcatatttataagacaaatattgactcatcaaattctctcacttgactcttgctcgtccttgagtaagttaatgagaaaatgaataatgcttaaacaaattagtctttatgaaaaataattttagtttcaaaaattctacgtccacttataatttcaagaaaatccaaactcttcaatcattagaatttcaattcaagataattacttttcaaactcaatttttgtgtgtgtattcaatcaactgataatattactaacattcaaattagtttatgcatgccaacaattaatgtttatctcaaaaaaaaatgtgtatttcaacgaaaatccactccataagcttaattatcgaaccattctctaatgtaattacacacaatctaaagatcaatagaactttatagccttataatgtaaggctagggtgaaagtttgataaaaaaaaaaggtaaatttaggcttaaatcactccataacatacatatatgacattctctcaaataattcacatttgtattctccaatcactctcctcaataattcaatcttgtatcttttcttttttttcgactaatacttattattcccccacacgtaatttgttgcaagtattcatttattttttattgatatttttatgaaatacttacaacttacaaaaatttattttaagaaaataataatttttttctcaacttatatatagccatcaatattttctcccaacaaaagtctcacacttttacaaatacataagacatcaatatgctatgatgtgaaaaaggatgaacaagagattttttttaggctcaaaaggttattgctattggaattattttaccaggatcttagatttactaacaaatatgttatt

SEQ ID NO: 16130 - DNA, 12825 bp, Cannabis sativa
gtgaaactaatcttttgttggatttataagtacgtacgtagtatatttgagttttacttttttgttttacttattgccaaactaatttaggatacgtttataaagtcacaatgtaattgaatttgtgtgtaatttgagataattatacaatttggcatgtttgtctgacgatgtaattacactgtaattgtgtaattaaaagtaattaaataattctaattacacttttcaattctcattgccttccatgaaaattaaatataattgcactgtgtagaaattatccgtacgtcaaatgttaccaaaatgtatgtaaaaattgaaagcagggttttacacattattgctgccttactaataaacaactaatatataatatttaaattcattacacaaatattcaatatcgatttaaagaatataagttattaattatatatatagccttcatactataataattacataaatgggtgtatccatatataataaatcaatatttatataatataataattggcaattcattacaaaaattaattagcttacctaaagataaaaaataataataaaaataaattataaatcatattaataatccgtttattacaagattcttccacaaacatgaaacaactcatgcctactaatattctgagcttgtgtatcgtagggccaattaatgtcgattattatgcataaagtttccaattaatataatacgaataattaatcataattattattatttttaattaaaaaagaaaaaccgaataggacaaaggagatattacaagaaggtgggtagatactcatacccgagaagatggagttggtatctcgggtcatcaacttaatgggccccacccgattagggtccaatgttagtaaactaagtaggtttgacctgctatcgtttgtacgcgtggcagtgggtcccacatgttttcctatgacgtgttcggtttgactgaggaggagaggttcatgcaggtcatgcccatatatcacacgttgtttcaacctttcacccaatccaacccaacccaacccaacccaacccaacccaacccaactatccaaatctcatcaattcttcatatttgtaaatgatcaaaacgactcgttttgtacggacaaagttccaagtctgaactagaccatcttccacatatagtttttcgactttttctacgtagccaaaaagtacgtcgagcttgacgcattttcatattctgatttttctttttctttaattatttttaaattgttttttttttttttgctgaattttcttttaataaaattaaatttaatagcaacaaccaatctcaattcacgaatggctgccgcctacagcctgcaatatgggaacgcttctttgaccgacttggtattttgactttatcatgtttttgtctttttcttaattttttttctacccttttctctttttttattttaccttctttcttttctttctttttttcgaaagacagtaattttttcatagaagtcacaagaacttttttacatttgagcatggacgttacgtatacgttgacattgacaatgagaccatattaattaattatattatacctaaaaaagaacttattacctcaaaatgtttcagtctttagagaaatctcaataatatatatatatagtattatagtggaaagcttgaaagtgggtcaactctatgtattggctaataatttatcaaatatcaaagatttgatcttttcattttttccatttttttagatcaaactacaaagactaactaatagtactattttcagttggtaattggtaaatatataatgcccatgtgaacactaaatcaatttttaaaaaagaataaaagaaacggccgcaaaattggtattaatattatgcaggtgttatatatttttagaaaatatgtataataatatgctatctatcaataaacacgcttttcattttctctttgagctaggatttcggcttaatacttttcttgatgcaagctgacgagtcacaagtgtgctaaaaaaaaaaagaaagttaaattaatataatagttttgttgtggcttttagttttagagtatatgatttttctcaatattaattattgccaaatattaataaatttatgatgagatttcctttctttatctttcctacttttctatcgatcaaaaaaagaaataaaaaacgagagagatccctacccaaaaaaagagaaagataaagagagaaataagactaatttgcattagtattacttatacgtttgttattttaaccaaaatatgttcagttgtagacattttttttatttaaaatttgtagcaattgaaaattttatatttatctttaaaaataaacacatcaatatttgaaaaatcattatgtaattaaattcaaagctgggaacataatagtttaagctcgacatataaaacaaccattttataataacaatattggccacaactcacccaataaaagaaacaaacaacaataatctaatgacaaacacgagaataatattgttgtattgtattgatatactaatagtatatcctcatccaacctcaaactaatttaggcacaataaatttgtagtattgttgaaatttcatgcaatgacataatttgggtcctcaaagtcacagctagcgacctacttgaatgggctattgttattattattattattgataataaagtaaatgctaaacacataagtaaaactcacaataggcaaattacataattttcaaattgtgtaaggcataagataagagatccttgagaaaaagtaaagaagaaagatgttagatgtttcttctagattatttgatattgatgtatttctttatcacactattgattgaaaccaaagacaaaatcacacaccaaaatataagtaaaataataaaaaatgagaacaaaattaaaatacaaatataaaagacatgtgtcatgtaaataggagagactatgttcctggttccttaataacacatcaaagtcacttacatgccctcatatttcgtacttttgtagttgaaacgttgaacaaatgaagtagttcggtggtgttacatatttttgcaaaagcaatgtgtgaaaatccaaaagtagttctcccaactcctccatcacccatgactcgttttattttattttatttttcaaaaataaaacaatgaataataattcccaaataaaaaaggaactaccttgtaaaatattggaaccttcccaaaccggacttctcaacaacccaaccccaccaccaactcctataataacccatcttcttctttcctctttccctcatcatcaacctagagttcattctctcgcaaggcctttgtggagatatattacaacaacaacacaattccctggccagacttggattaaaggtttgttttttgattcattttgacacaaacccatctcagattaacaatttttaagtccctagccattttctttagggactaaaaccgaccaccatggccgggaaactcgcaagtctagtagttcttctctctgttttttcgactctgtttttatcatcctctgctcaaacatgtaagagctacaacttcgcaagaaaccaacagttccaggagtgcaatgaccttgccgttctgaactcgttcctccattggacgtttgactcaacaacagggaaactcaacatggcttaccgtcatactggggtaacaagttccacgtgggtggcatgggctatcaaccccagcaacaacttggcatcagccatgcccggggctcaatctcttgtggcttacccacgatcgagtggtggcccgagagtgtacacatctccaatcggccaaacttatcagacatcgttggctgaggggaatctcacttacccagttacggatttatcagctacttaccagaacaacgaaatgattatctttgcaacttggactcttccaacaacgacgagtaccatcacccaggtttggcaatcgggtcctctttcaggtaccacacttggaccacatcaaacatcaggagataatactaggtcaaaatcctctttgaatcttctttccggtcagtctcaatccggagggggcagctctacactcaggaaaagaaacgtaagttaaaaattacttttttttttcttctgagtttttggtttctattctgaattttgttctgttatatgttgttttgctctgttttcgttttttggttctttcttgatctttagattgatttcatgataataatattactaaattagttttctgtaaaacaaaattgttagaaattaatcattgagaatctattcatagtttgattagtgtctctgtttttttctttaaattgttcctgtttttataatttttttatttattgagtcaatatcattgtccaagtccaagtaatgaaaacaaatatgtatttaaataatgttgttgttgttaagttgtgatattaataaaatatttaatgaattccagacccacggagtactgaacgctgtgagttggggtatattgatgcccatgggagctgtaatagcaaggtacttgaaggtattcaaatcagcagacccagcatggttttacctccacgtcacttgccaaacctctgcatacatagtcggagtcgccggttggggaactggtctgaaactcggaagtgactcagttggcatcacacaaaaccctcacaggaacattggaatcgcccttttctgcctgggaacccttcaggtacttaaaatttttcttttaaacatttcttcaaacactttatgggcacttttgtgttaaccaaatgataatgttaattgggtttctaatgcaggtttttgctttgctcttgaggcccaagaaggaccacaagtacagactctactggaatatctatcaccacaccattgggtacgcagtcatcatcctcagcatcattaacatttacgaaggtttcgatatcttgcagcctgaagaagtgtggaagagagcttacacagggattatcattggtttgggcgctgttgccgtaagcttggaagcttatacatggttttacgtactgaagaagaagaaaacagagaacaaggtcccttatggtgctaatggaaatggggctaatggctacggttcacatgtatagagagtagttagttgggtttagttgccttaatggaggaggatatgggtcctttgctgctttctaaatcttcctctcttctctcatctttttcttatataaatatataacatatttttttttttttaaattgcaattttattttattttttacacccttttgtatatttagtgaatgatttatgtacttgagggaggtctgaactgggggttcagttttgaaggttattgttttggtagagtagttttttaggactttcattatgtgcttttgagagagtattttttatccacatctgtcttgttatttcagagggtacatatatgtcactatatatttatacttgctttaatatatacttttcatctttattgtctactctttcttctatttagtgtgttctccacttatagataaagcttccatggattcttttgtttaaatttgttcaatttgttagaagacacttgggtaatttgacttgctacattggttattgctaaagctattagtaaaaatctagtcagaaaagcaatattacttggcaattttgtctaaaacgaaaatagttgatttttaggtaaagggttaacgtaaagaataaactgatataacgtactggaactgaaaattgttcagttatatcgagtaaagctggctatagatgctgaaactgcaactgcaatgcaatatttattaccaatgatgtactgttttgaatgtgttctaaaataatttggcagacagataagatatttgaaaaattacatacaaatattatctgttcttacaaacaaatgacataactgctcactgctacaagagataaatttcaaatagaggagaaatatgcagctttcatctaataaaaaggtgtctcaattgggttgctttaagcctttaagacttcaatgaatgcatccttaagcagagggtttgaagcagctactcgttgagatgtgatgtcaaagtccttaccagatctgatacaaaataaccaccataatttcttaacttcaggttaaacttttcacacaaaatttaatgcatgctaaccaatgtaaacatatgtgcatatagcttccgtgtcaaacttaacaaccgtgaatgtcataagtttgaagattaagttgacattatagttaaacctgttctgatgctgattttttatttttttgagcaatattaattgcataattgaatatttgaaagaaaataaataaaattaagtgtggaaagaaaatgattaaatagaagttttttcacttacggatcatatacaagccctccagcttctttcacaataactgcacctcctgccacatccctgagcaaaagaagcaaataatttcacttttaattaatttaatttataaaaataatatttaaaatggtggggtttagaaacaatgttaagtccctgtaacaatatattatattttgcttaaataagtataagatcataccaaggacccccgaagccgagttcataaaatagatcaagtcttccacaagcaattccacagaggttcaatgcacaggagccactcatccgaagagatctcacctgatcaaaatagatactaatattaagttattaactattcacttcttcctttcttccttttgacctcaattaatggcaaattgattttaccttgaaaagtaagctattgattctgtttgtggtagcatctacagtcacctcatcacgtttagttccaacctgcattcagtaagacaaaagatctgattattttgttgtattctaaacttctaattgagctggaaggggaaaacgactaacataaattccatcataatttattaatcagaataatcaaaggtgtacatacctcagttgcaaggagagatgtcataagttcggactgagaagacactgccaaaattaagaacatgatcatgcagcttgtttaataatcataggagaaaaaacaaattttaatatgtacaaataaaaaaaaatcacctttaataggatttccattcagaaaagcaccttttccaagaacaccagtgaaaagctacagtattaaaaattcacaattatactatgcagtcaaattgtaattgaaaacaattagaaacctaaccttggagcctattcaggcataggcatatatcaacaactgcatgatgtatacatatctactatatataaatctagacctaaatgaaattgaacttgtggcttgttgatagtatatgagttgacggtactcacctcatcaatgattggattgtaaacaacaccaactgtgggaacctttccaattgtgagaccaatggagacacaaacaaagggaaacctatatagattaataatgcggtaataaattagcataattatggacttggacagtaataagcatcacatacaacagtaactagtaataggtacccgtgaacaaaatttgtggttccatcaaggggatcaactatccatgtaggctcatcagtcagctctgtaacaccgcatgcagcagtagtttcctccccaatgaactgaaaggatgtaccaattaaaatttgttttggaaaaaaaaaccaaaacaaacaaagaattactcaaacaacataaattgctataatcagggcacaagttttcaatttggttgagaaagagtaaaccttatgtgtggggtggagttgcttaagatgattgaaaatgagatcttcacatgccttgtcagtttctgtgaccaagtccacctgcattccacagccaaaagggaaacatataagattcaattagtagagagtctagaggcatcccttgcttctttcacattttaatagttttccagctctgatttgttttattattttagataaactgaaaaatagattacgaaggtcataaaaaccaaccattctcgaaaccaaatattgtcagttttccttctacttgtattttccctcaataactcgtctttacttaaaaaaaccttaaacagccccataatccaaggcatgtttttcatgttgcaacaaaaaaggttcttagccaatatcctattttgttaaaggttctcatggcatttcaatcacaagaagatcaactagaacttggcattctaagctgttcagtggcaatttagctgcataactacatgtcatacattgacaatttgtttcagcttattggcattccaaattacagtcacatgtaggtctccatcttaaggatttgaactacacaagaaaaaattcaaataattattctcatttaataattcacccgatttttctgtatattttgcctctttactaaccccagtcaactattcatttgttgccgtaacaaatcaattttaacgagcatagcagaagccagaaagcattaatagttcaatttcaagagaaaaaaaacattatttttggctgcagtttgctcccacatggtctgtggtttgaatcctaagggcaccttgataacaattgttacagtttattgtcctcaagaaggaagcttcttataaaaaacggaaaaaaacacacttcccattctcaaagaatactttcagtgttatatcaatatcactctgtactcttaatataccatctattactccacttaactaacagatttccagtgatcactttaaacacaaacagcatcacattcctccataaaataactttttccgaaaaaaaatctcttagatccctattgaaatccacctttttcagtggccttaactgtgaacgatacccaattgatacatcattgattcacataataatcaaaattttgcagctggcactgctatacccattaagaaaatgtagaagcgagagattccatacctggcccttatgctccacatgtttggttagatagaatcctttacgaattatctgcaattaaattaaaaattaagcgaattcgttacagacaatgaactccaagcatcgcaataacgaagttggtgttagagacagacctcgccggctttcttggctgcatcaacagctgaagcgaggaactcatcaagcgagcctaagatcacacaatggaaaagtcatcgataatccgcagattaaagtcaaagcacatcaatctatcaattatttaatcaagaaaagagaaagagagagtgaagaaagtgaagggtttgtaccattatcagccatttttgttagaatgagagaggttttgataatgatttgggtttgtgtttcagttttgtgagcttccacacttttcagttttcacgtaccacatgaaagcaagcttctcttgcctccccttattattttatactcaaatttatttagctaccgaatctactgattggttagaaaaaaaatgattaaagtatttaattaaaattaatccattttcaaaaaaaaaaaaaaaattaatcaaagcctataagttctttgactaatattattattttccacatttaatattttatgtattaaaatttaaggtgttatgacttgtgaggaggatttcggaactgaatataaaatattcttgatatgcctgaggagtgaagggttaaagtttggaaacaaattctattagagaataattatcaaaaaaaaaaaaaaatctattagagaatattctagtcatgttacacattttaattgattaggctttttgtccaaaaaaaaaaaaagattaggttttatcagcaagattgaaaataaattaataatataaaaatgtactcaactaatagcattttagagctttatgattagccacaaagccacaacttttagccatatttttataatgataaaaaaggaaaaagaacaaaagtagtaaataaaattcagatgtctgtgactctttgccaaccaatccattttctgtcaccatcgatgaagcttcgtttagcaactagaaaacaaatatggtaacataacattatgaaaaagtgaaatggaatctctagtgcaccaacattattaaacagcaggtcgcagtggaaagagatccataaaagaatatgccaaagtttatgctctactttaggctccaatcatgctcactccttagtcaagtaatcaataacttgactaaccggtcccactcccacacgaatttattatacaagcacagaacaagaaatatgcccctatcccaccacagcaagaatatgtcctgttttctagacctgcttcgtatgaaacagaggaattctattcagaaaaatattcacttatcatagttcctcaaaatcttcaggactaggacacaagtgttgaacttgttgagaggcataataaacattgaatagcaacaaaagttctgcgaatcaacaaagataagttcgcacaaaaaaattccttaagttgatatagccaacaatttaaaaaacaggcaggaacgttttttgatacaaggtatgaagctcaagtattaggttctttaataaattcattgtcaatttatttatctacgttttacacgagtgttttaacttaacagagatttagctaaataggaggaagatgagtaaataaagatgagggattttcaagtagtggtagtgtcacatgaacatgaactgtataaaaactatgaaattcacaattgaatcgagcagatatcaacgcttttacagaaaaagatacaccgaaacatgaggctgttttagtttccgggaagagactcgatttctttcaccactagagctttgtctgtctcaaactgctcgtcctctgcaaatacataaaccatgggaagaccgtgaacacagtgctaagccagctccttatagattgttggatacaaatactagtgtttctatatcaatttacattgtagacatatgcattaaataatgatacctttgtcggttttgaaatcagcaaagagccgtagaagcttgcttttatttgcaattagtatgctcacgatgtcagccggtttctgctgattagctgcaaagagctgtaaaatagaaccgtcttattaatagaagaactggagaagcccataaatctttaaatatatattgcactgagttcaccaaaataagatttcctaccttgaaaacgtgaaatgcttctatctgaatgctcttgctagactcctgcaaagggaaaaaaaaatcatctttttttagataattatacccacacttttcttgtgtagctatcaaatatttcatcatgacaattatacagggcgccaattggaaagaaacatttctagagcttgggcatgcaacacagttacacggtgagaggtctattcaagtatttttagagatcaaaggaatgaaccaaccaaaactaaataaacaaataaatgggatggaataaacaatgcaatattaacttaattaacataaaaagaaagagtagctagatatggatgctttaagctgtgataactctttcttttcatgtcaattcgcaaaatgtgtttgtgcctggaggatgcatggtccaaggaaaagtctgaaatggcatcatgatgctttgagaaaatatcatgtgtaggtgcacatatatgttaagagaggaaaaggaatgcaatgacaaagagtatcaagaaatctgtaaaattagatcatactctgaggagattcataagaatcctcaagttatcccttgagctcacgtatcgagtcattacagcagagtttgaccgatcaagaaggatatctcctaacagctgcaattaggagtcatatcattagacacgaaaacaatcaccattaagaggactgataaaagataacccgtttcaagaacttaaaccactaaagtgtttcaagaacataataacacttaaagtaataatgttataccttgacagcttgtcttctggtgatgtaattggaagattcaagtagcttggagttgtagtctgcaaagaactgaacccagagggaaagttgaagaaagtaaaattttggtcaatcaaaaatgtagaggagagatgcagatgccccatactaagtatcgtaatagatattctatattaataacattacaccttcaaagagttttactgaatgttctacttttaagtatgttcactatgacatgcatcatacatgctcattggcacctgtgtttcatgtactgaaaatccacgtgtagatactgacatacacattctatatggatacaatcttaaaaaaaaaacaagagaaaacatcgattacccagtcataatttttggtaagaaattccgctacagttgatttatgcctcgtcatgagttcctgcaaaattcatagaaattaagctgcaagatcatgaatcaaacaaggttgacaggaaaagtttgtaccaaaacaagaaacagaagtatgttataagcataccacaatctattttttgctattcattttactagaaaaacttttgtattacttaaattagagcatttagcataaggatccttaaaaatcaccacataaccttacatgaaaacaccagaactacagtctacagcaggaacaggggaaaagagaaaacattggcacgccatactatcccaacattaagcaaaagataattactaataaagttattaggttaacaacaaccttaaatgttgcagcagcatctgcagcaatatcaaaattaggaagctgtatgtaatcaaagaatttcttcatgtgagcagactccaagacatatctgcataaa

SEQ ID NO: 16131 - DNA, 1903 bp, Cannabis sativa
ctccttcaacaacaggccatggcggcagctctgcttttccggcagcaccagagaaacggcactggtgatcttccggcctcccttatgaaccgttcaacctctgtcgtctatccatctccggctccaagaaagcaagcctttgctaagagctcaagttctaggcaacgctctgggtcagatactctgcttcaccctcaggagcttctcgtttctcaggtctgttcggctcacttccctctctctctctctctatgtatacatgtgtatgtttatttgagtttcttagtatagaatgattgtatgccagaaatgggttcatttcatttgatggtttaattttccattttctatgaacatttttttcctcttcctctctatacatttcatgattagtttttggtttgaccgactcggtcaaatgctgagtttcagacacctcactgtagcaattggggtttttatttacttggtgtttaagttacctctaatttgcttttaatcttactcggtcaaatgacttaaagctatatgtttctatggttcacttctttagatgatggtttttggttaataagagtttcatagtgaaatgtactctaccactcaggaaaattatataaatgaatttttttccagtctagaataactgtgtagattataatgtgcccatttttctttcattaaactaatgaattttacttcattttgtgggcttataggaccggaagagtgttgagggtgtagaaaccaaacattttattcttgttcatggaggtggatttggtgcctggtgttggtataaaaccatgacactattagaagaagaaggcttcaaagttgatgcagttgacttaaatggttctggagtccaatcatctgataccaacagcattacaagtcttgcacaatatgtaaaaccattaactaatattcttgagaaactagaggatggaaagaaggtttgcactctctaatctttgtcttctttcttcttttggtcattgtaaggttgttttgatcaatttcacacaaccaacattcaattagcatcttgaatagaaagttgatatttgaattctttgtttatcataacttcaacttcagactaatccatttcaagttccatgagtgcctatacactaacatattattttgattaagtgcaggtagttctggtgggacatgattttgggggtgcttgtatatcttatgcaatggaattattttcatctaaagttgcaaaatccatattcattgccgcaacaatgttggctagtgggcagagtacccttgatttgttttcacgacaggttggttctcttctgtacttattgactcataaggaaaaggaatatataaagtaacaattattgttttatatgaaaagaatgtatagcttaacactcactcgaaaaagtatgcacctctacaaaaatgcaacaaacttaactaagcccttgtctaaagttgttttcttctttattcaaatatataaatgtgtgtgcttcctttcactttttcttagtttattgtgtcaaaacacccttctgacaccaaataattccattacatgttttagaatctgaccccaaagatatcaaatgaaaaaaacaattggtgccctctttaaacaattgtagtagtctttagcttgcattgtcagcttagcatgaattcatggtttattaactcatacaaagtgaactttactgtggctaaattatatattgatataaactcttttataatattttgcagtttggtgcaaatgatctaatgcaacaagcacagatattcttgtacgctaatgggaaggatcagcctcctactgctatagaacacaacaaagaattggtcaaagatcttttcttcaatcaaagtccttctaaggtatgcggcataa

SEQ ID NO: 16132 - DNA, 8241 bp, Cannabis sativa
ccttgtacatctccgtcgttttccaccacggcaccaccgaaggcggcatagcacggcaagagttcaacgaatggatgaaatcaacaattatagtaattgttgcatattgtaccggagaaactcaaatctttggagagatggactggcccagtcaattcaaagtcttttttaattatgaatctataaatgaggtgactaattttcttaattttcttctcgggaagattttgaattatgcaatattaggtacatctgttataaataataatatataagatgtgcaaatcttttcatttcatttaatactatgaattgtaattactatctcttttcttaattttctctttatcttgtttctcaaaattatattattttatgctgctaaaaaaaaaaactatattattttataatataaatcaaaaaatttctaaccatttagtttttaaataatagataagatacacagacgacacaacacaagctaactccaatcgacttattttttattaagaaaaagaaggaaaactgcataagacttacctcatcccaactaaaacaaacaaaactattcacaagaccaaaattaattacgtctcttgtttgtctctttgttctattgttctattgttcaatcatataatatcatcatcctcctcaatctaaaaaaaatatacactcattcagtctcaatagcaacaaaaccaaaacccaaaatcaatcatgccgtcttcgtcttcatcatcctcaaatccaccttcctccccttacttccaaactctcctagactccgctcgtcccttcctccgcggcgagctcgagtcagtcgacgacaggctcccttccctcgtcagtgtcctccgctcagtcggcgccggcgagtgctggcacaaacacggcagcttcctcgatcacctcgtcgagatgtaccggattctcaagctatggcgagcccaggactccgtttgtctcctcggtctcttccactctgcctactcaaactcctacgtcaatctcgccatctttgacccttccacgggacgcgaagtggtttcgaaacatgtcggagaagccgttgagagattgatttacttgttctgcgtcgtcccaaggcagcctctgatccacgacgatcttctcttccattatactgactctgaacttatcgaacatctgaagtgttcggagatttcggttcggaatgctaagggaaaaggattgttcgatgaagatgaagcgtggagaaagaagataaggggtattgttcctgctcgtggggttgttgtgaagcacataaagaccggtgaagacgtcctcgtttcaaggagacttgtggccattttcttactgactaccatggcagattttagtgatcagctttttagtttccaggattgtttgtttgagaattttgatgggaagctggcgttcaaggggaatgatgttccggccggtctgtggcccggtgacggcagaccagggctttggatgagctcgatatcgagaatgggtgctctttacaatttgttagtgagagaggaagagatttttggtgaagagaggaaaagggggagtggagagaaggttgatgatgaggacagagatggtgatttggagcttgtgattccccctgtttttgagaattgcacaagggttttagatgcaggggaacaaatcaaggccagggatttgtactgggaagctgtttgtgatatgtctaagagagggttggagagagtggaggagttgctgttgggttgtattgagaaaaacccttttgttggagagccacatgtggttttggctcagcattatatgtctcgtgggaggtttgaagaggctgaaaatgaggctcagaaagggctgaccctaatcttggagtggggtagtccttgggacaagaggatgtcctgggaaggttggattgcttggggtagagtcttacttatgaaggcaaaagaaagatcttggcctcaaaatgcttgggggattctcaatttaggccttgttaggtagaatcttagactgtgacgatggtggcatctttagaaacttaacactattaatgatattgaatgaagggtacaaccatagagggtagttaggaattactgttcttctcttttatcatagtaatttctaggcaccattgtcaaatttgaaaagttttattacaaataaagtacattgtgttgctgttcattatggtttttcgtctattttctatcgagtagggccgttgcgtaagattatacaaaagtacttttttgcttaattattttctgataaaaaaggaatcattccaccaaacatgtctgtatgtctgctgaaaaagccaaaatgtgctagtgtgcaacgttatttacggtgccatcgactaatccaaaatcataccaacgttatctctgcagctcatcaatcataaactaacaatatggccctttggtctttaataattaaaaattgggtctcacggtagtcaattcaatttctcatgtcatcttcaatttttataagcaactaatcatctttactcaaagtcggatcccagctgttataaattataacttctcacatattgctggggaatattctaattcctagtgggatgaggagattacaatcaaaatacttcaaaagcaagattacaagacatcaattaagagctgttgttctagaagtcttttattttcttccttacatgaacacttaaaaaaattctaaaaatgcagtgtttgattgtacgtaatagaaatgtaaaactaaccctatgtttactatgattttagtagaaggtttaagtttgtaggagttctatttttaagtttatttagagtaatctcaaattatttaacacttgagtttgagattgttttgatctcaacccctctcatttaaatttcactaagtgaaactctataaggatttatcaaacctcatatgcttaatttattatctaaggatgaacatatggtcactattataaaatttttattatcctcatttgattgacctatttttattgattatatacgctggatgagcattattttcatcaaatgaagtattaattaatgaaaacaccttcaataataataacaaccattgaaaaatatatatcaaccaacaaattgtgtgcaatatatctcggatgattttctcttaatatgcttacaagaattacttaatggtataccgacgtatatatttcagtggtaaatttaggaatatgttgtcttttaaaataagattttcaatcagttaaaaaaaaaaaattaacattttcaatttgagcaattatccacaaccaaagttgtccttttacaaaaaataataagaaaattatatatagttaattcagattatagtagaggtgccgtggttatcattagtttttatagtattggccatgaaggtaggctaggtagtcggcggtcggcacataattttaatttagttgatacacaaatttaaaatagactaatttactccgaataaatataaacagctaaacaaatatattcttcgaaataatatatatctgaaactcttgatcattgattatcgaagttgaagaatgggtaatacatgtgtatcaaatggagttattattgtttgtatgattagcttggttgtatgtgtagagtttatgggggtttcaaaagccaaaaggattataagttatgggacaatggacggagatcgaagaatctcttcatgcatacacagcaggtttctaaagaattgcagggatgatgttgtgggaccacctactaaccgttaccaaagaggctgcgaacaaggtaccagatgtcgtgaacgcaaggttcctagaagagattctaaaaacaaaaactttgaacatcacacttgagttgatgtggccttagtttgcattggatttctacaagggatgaatagccaaatgtaaaatagttcggctgagtagtttgtttgtgtatttggattgtagcattggtggataggattgtaaggctactgtctttgcaaaccgtgagtttgcttcaatcgagatggtttcaaattatagaagatgatcacaatattcaggggaaaattattgtctctaaacactcaaaatgggcccacaattttccaataaatgttgttgtcttatctatatccattcgatttgatgtacagtctcatcataattaacatattagtaatttaatttttaacttcagcaattgtcatatgtatatatataatttcaaagggtaaatatgatttaggatcctaacttctgctcaatgtatcacttggtccttttagctttttaaagtctttatgttgttaaatgacgcatcaataaaagtagataaacacgattctttctacaattttctttctttttgtttaaatttttttcaatgaatacacgactataaatagagttttagaatttgacggatggaagccatgatcatggctatgtactgctaacatagttttaattcatgtttaattgctcaagccaaccaattttggataagatcagaccaaaatgggggagagggacatgcatgtcagaattttagagagaaattcttgtgtcatttgcgagtgtttttcttaaagcatcagagagtgtgtgtgattctaagatttggatttgttgtgtctgcgcgttgtcttgctttgatgtaaacttagcatggaccgaacaaaataaaatctgtgttttcttggtgtttgtttatattttcttctgtttacttctttgttcttctcttatgtttgtgattgtctgtgctttctaatctggttttgcagggcgttagaacacaaacagcaaccaagtgatagttgtagaaaattttatagacattattttgtatatagtattagatcaattctgcactgcacgtagtcctctctcctcctaacataaccacattttgaatttcactggatagtttagacagtcttatattagatgttttggttcaaactttaaacaaaatcctctaatgttctttcatcgaccaaaatcaacacacactcctttcatttcagggtgctcacaagtcacgagctcatcaggttatccaatttccgcctcttcggccaacttcagttcacatatcttttgtgcctgcacagacaaatttgcataatgtaaagttatatttgcatggtgtaagtaaagtaaagaaaaaaatcaggtgaagaaaagacacctgaattgcatttgtattacaccctctacgcaactgatcttcgagcattttcaccctgtcattggtctaaacaacaatagagttagttgaaatatgatttagttaaataccaaattgtaatgagatgtttctgctgcttaccatgtaacacaagctctgtatatatgctttaagtcctgcaatccggtgacaactttgttgatatggttcccaaatttcctacagtagatggttcaatcatacattattatggttataataaatttggacaaatgtgtgatagatatagaaactgataatattaacatgagaaaatggagatgtttgccaattgaaagaaatttataataactacacttagacaagaattgtacttggatatcaactggtagaggaaggcctcgagccacaaatacttggtccactttatagaaatgaagtagtgataataatcttgttgttatgatgattttgctacccgtaccaaaccattttcggcttccaactagagcgtataattggtctaaattatcaatatcatcaagaacaattagaaccttcttacaactgagtcttttctgtagaacatctacacctcttgttacactagttatgtttatcttctctcccaacagaagatcagaaagaagtttttcttgcaagtgaactagaccatttggttttctcgatttttgtcccacgccgcggagaaagctgcggccatcaaaggcctcaaaaattccatcataaactgatttagctataattgtcttccccattttgttttggcctgcaatccccacaaccagaacttcatttgaccccatttgcaagaagagattaagatattcatagcatgtgtcatatctaatggggtatatagagatcttcagatttgaaggaattcttttatccctgatatcttgtgtaatgtccccaacaaacttggattcactcctgcaatggatcatccaattacaacacgaatccatgagctcacaagataattcatatttaaaagaaactgaaaacttgtctgcataaatggattataaattagacgaatatcaacaaaacaaaaggaaagactaaagagtttaagaatactaagattttctaacaatttaagggagggtgtgcattgtcacaaaagtgatttaattcaatctgttgttgataatacgtggaaactaaataccatatataagatgcataagttactctttttattgccaattggttttgagatgtaaccccatgcatacactcacctatccctacttcctcaaccatacacttccgcattcttaacactttccaagtccacgagaatactgaaaaaaaaagtaataaatagtatttttgctcacggaacattttacactactaagttgtgcccatatactatacaactcgttaataataccgattgaaatataacgtttatgaaaacgtagtcctttcatcatattctattcaattttatcgagaaatgagtgacaaggtagatgataattgataaatagatgcaaattatacaccttttattctctttactttagcgattaaaaaattaaaactataaatataaattattataataaaagaaaatatcttttattttattatctattcacgtaaaaatggaattatttaattgcattcatttatcaactagtaatacttcactcattttacaataaaatttaataaaatatgatggaaggaatttgttactataaaagttatatttcaagagttattattagcaagtcatataattaaagtgcaaaatttggtagtataaaaaattcaggacagaaatattaattattcaaaaaaaaaaaagatttttaaacattgaacaattatttgactttatttcatatgcagcacctgaagagtattcttaccatgaagcataatgcatggccaatcaaatactaatgatcatgaactaggatctaatttctttcttgaatatgcagagagagagagagatcattacttaaagatgtcaatatatgtggtgtgatcccaaccgcacaaatcagatgcctcttgaagagccaacttccaccttttccaccagcaccctccaaccctttgtctactcaaagcagtggcaacaggtcctcttgctttcctgaggtcagaagggttcaaatcatagaaaataggcacaacaatcattccccatctttccctacacctcagtatcaaaacaagttcttcaaggcaaaactcagaagagagatactcttgggagagcagaagaatggcaattcttgaagtttggatagcttcttttctctgttgctcaagttgaagtcctctttggagaacctgattttcatccctgaatgtacggatcccatcaatgaccaaagacttatttgtaaattctgttatatgtttttgaggatcttgtgtgctgaaactgaaatacacatcaaattctggtccaggttgtgaggaataatcccccatgaaaatgtctcttggtgatttaacaaccagcttgaaaaaatgaatgcatgtagcttcttcaacttcttcttcttcttactccttgaaaaaagattgtataagcttttctctgtcttctacactgttttcttttggctttactgttagtattcttttttttttctagtggttgagacactttatttatttattgtgtcaacttgcaaattccactcatttcgttttccaaaaatcgtgcaatggtcaaatgaagggcacatgattttgtttttaatacattgtggggacagtgtgaaatcaaaacaaaatcatgagtataattttgtttttaattttaatgtaattttagaaaacataatcccacttcgggcagttgtgtaaatgagtatatataattttagattcttgcaaatgatcttagttgtatttagttaaatgatataaatttttatttgtcaaatatgtttatcctaactttagaacttccattcttactaaccctctttaacgtttgtgacccgaattttaatttattccttatattaatggg

SEQ ID NO: 16133 - DNA, 3351 bp, Cannabis sativa
aaaatgagaggcatatagagttattgagtcatcgaaaatggcaacggaaaagttaatattaaactttaattaaaaagtcttgatttggagatataatccaataccagaagaaacagccataaacagaaataaataaaaaccaccaccacaacagtactagctctagctatagcagatgatcacaatatcatcaaatccaataagatttcacagtcgcatacatatatatatatatatcttcatttatactgcccatgtatttgttctccattggccaccgcagcctgggacgacccacctccagcaccggaagcagtagtagagccagtagcatctttgaaatacccaaagaacccgttatgaaacggtgccgtattgggtgcaaaacccgtggctgctaaggctgagtagtctaagcttccgagcctcttcatgaatggagaagaaactaaatcagagccactcccacctgcaccaccaccaccaccacccctgatggtggtacgatcgccttcggtctcccggtagcggtggaggtagagtgtgaggggctcgatgtagtcatcgaagcctagcttactcatggcccacagcacatcctcggcggttatggtcttcctctgctcccgctggcatcgctcgttggcttctccagtgatgaagctgatgtattccgaaacgcattcctggatcgtctcctttgcatcgtcagagattttggcgtgcggtggaagtatcttgcgcatgattcggatgacgttcgcgatgggcatgaaccgatcttgttctcgaaccgtacattcgttctcatcggcgctcgattgggtgttgctgatctcgtttactctgcttccgttgatttctgatagtttggtccctgctaattaattaaaatcataaaacacaaatctttcattctcatatatttaatcattggttgatacttagttgattaagtttaattaattgataatataataaaaaataaaaaatacactaattaggaacctaaataatttgagaaatgttaaaagatagtttcactgttatataactaaatattaaattgtatataatttaagaaaataattttgagaaattaatttatatattattttttaatttttttttttaatttacggtttgaatgcaataaagatttttatacaatttttttttgttacagtttaggttacagctctaagctatagttgcaataggaaaatctatgtaaaatttaataaagaaaatgttttaaaatgtaaaaattaaaaaagcctcgataaattaagtaatatgtatgagttaagaaaaaaaaaaaggggaaaatgataaaaacaaaaaaaaacatctgtcttgagaagcagaagatcctgccacagagggtgatggacccctcaaaacgcacgtgagtggcggtaacgcacgtggactatgaaaacgcagtatgtgggtgggccatagaaccagctccagctccacggtataaagccgttggacctacttaagccaatcagatatggtgatgacgtggtaccgagagagtaataactggtgatcagaggttcattaatatgaaactaggaagtcttttctttcttttaattaatatatacgaaaggctattgggcttttaggtgaatatatatttgaaattttataggcaaataaaaaagtaaaaaaaaaagaagaaagaataaagacaacgacaaagtttgtagctttcagaagggagctgacatagaaagaagaaaaagacaaaagaggtcgaaccaaccaaccgtattcatgtttttcgttccatttaaaataaaaacttaaaaagtttatataatttggtttcttgtaatgccattgccacctaatcgaatgaccgacccaccgagttgtggatgaagcctcattatgctcctattcctcttattcattagtttcacgtacttttgacttcgaaaaggaggagagaaaaagtagaatttattgtgatcactactaccttaggtagtcgctaggcaatactaacaatgaagaaacggctggaaatcatatatatatatacattacatgcatcatgtattgtgtaaatatatatatatttactatactagctttgtatgttaataattatcataaaaggtcaaatttcaaactattttatatgtatagagtgggggtgggtctaagagaaaagtattattggctgagaaagcatgcatgagtgccacttgtttatgtggggtcatgcattgcatgtagggtaaatgccacctgtacactctctggtcatattccccatacacagtgcactattattctacggttttcatcatcatagctgcaaacaaacaaacacaccttcttttgccatcttccttacactagtaccactgaactgatattgatcagtttttctaaaatatttttgttctaattcatttcaagaaaaataggaaaacagaaaagatcgaagcagttgtgtataccttcaagtgcattttagatatacagattaagtgaatgacgttattattaatgaccaacaagacgatatgtgaagaaatgcatgatttgtatgtaacatatatatacatatatacataattacaaaatcgtgagtatcactagccagaacaaaacccagctggtaagagatcacgatcacactaataaaaaaaggtgacttattagtttatttatatacacgattatattacatatatattaaaaactattgcatgcatgatggatgatatattcacaagcttatattctaaacacacgttaaatttagtttttatggtacgttgtgataaccgatcgatcgataatatgtaattcaagaatattgtataataatatgaaaaatgaatatcaaattaaattttgcctataaaatattctgtatatatatttatatatgtttaccagagcttgcattggagatcttgcggtagccatgaaaagctccacgttccatttcgatggatctctctgccgagctagataaaaataccaagatgggtttatgtgtttctctgtaaaaagttcgattttgaaaatgcagtaaacaaaaggcactaagttggttaataatggcaagagtcaaacttatagaaagtgaaaaagcacaactaatgtggcagccattagtgagttggacgaggaacccggcgtttgccggtacttattagctttccctgatggacagcactgtctcataatccacatggactttgatattaccggcagtcgtaggttactttgctccctcgtacttgtacaacgtaagtgggcttatttttattaatcttttagcccaagaggcccatctatttttatatcaacaatttt

SEQ ID NO: 16134 - DNA, 6003 bp, Cannabis sativa
  modified_base (1360)..(1368): a, c, t, g, unknown or other
gcatataaaattatacaaggactatttataacaagctgaatagattaaggggcataatagtatagtgtcataagtacagggggtaaaaaagataattattctttttagtttgtatagattggattataccttgtttgtttgactacagattttaccagatgaactataataaatggaaatcaaaaagcatttgaactattatactcaaaaaataatttgaaaaaggttaattataattttttgccattttaacttttcatatctttaaaatttttcttcaattattaagattgttggatttaaagatttttgtctaatttctttcagttttgctaatatgaagattatccatattctaaatcgtgtcccacaaattttaatatttacaaaattatgctccttgaattttaacatgtactgaattgtgcccctaaatttttatcaaaaccagactttttttttaaagtaaaattaaacaaaaattcttaaatctaacaatcttaataatatttagagaatttttaactatacatatcaaaattgaagataaaattccaaattagcctaagaaaaaaaaaatgatgtaatatagttcaacctagcaaatatataaagctttgataatatgggattttcaagaaaagtcaccatgtaagaactcaattttaatcatgtgtttatatatgtatgtatggcaatatattcatctaattgatatgcaaaccctttcaattttatggttagctcaattagtgttgtttatattagtatggtcaacaaatgttttgagtgacagagtttataggtgacttacatttctaataagccctaatatatatgggttagttgttttatattaatttttacgagtcattaaaatataccttttgaattataaaaatgattgcaaatattatttttttagttacattttgcttatttttgtatgtaatcataggtcacaaatataattaaaagtcgacttaattaatttaggcaagctaaaattaagtctatcatactaaacatacaaataattaggacaaataaataggagtgtttattgaatcatgtttttaggcttatttagattcgatctaattatacattagatgttagattttactttccgatccgatctaattaatttcagtcatcaatcgatccaacatccattgaatgttagattggatcggttctatctgttggatgtattatatatatttattggttcaatatgggtttattcaatattttacacttagtattttttgatcgaattagatttctccaataatttagatcccgtatgtattggattggactggatccatctaatctaagaaaaaaagagtaaaannnnnnnnntaatttttatatatacatatattttacgtataacattataaaatcttttactcatcaaaactaaatgaaaatactaattagtccgattagatgttgaatatattggatttttgaacaccccatccaacattcgatctgatccaattagatatttaaaaataacatccaatcagatccaatgacaactagatatccaatttttaatggtcggttgtaattagatgatagatcgatcggttgttattatattggatcgatttatgtaaacccctaacaatactataactctaagaatacaactatatatttattaaatgatcattaacaatttaatttatgcatgtgttttttttttctaataataaaataggccataaaatattcatcatatgttagattgaaaaattgagttattggtatttgatattgttattttaaataaagctgcctaacctcatattaataaataaaaaaaaaagtctttcttttctttttttttttcctctcaaatttaaaagttaataaatgaagaaaatatataacaaaactacctaaactaataagtaataaaatcatagacttaatatagtagagagagacattgaaatcaatagatatgatgccaatatattttactaattaacaaaaactatatatgcttagaataaattaatgggccctaatttgctacttattatcttttagattagattagccaaatcttataataaataataagttttacccaccaaacatttggcaattggtgatgaagaaacattagtagtttagtctactttttatttatttatttattttcctaaggttgagtcacaaataaggtttggtgcgttttaatttttattttttttgggtgaattaattatataatataataaaataattattactaacttatattgtaattaattatagtacttgatgatgattcttcacgcaataaccaatgatagaatattgattaaaatagaagtaaattgaaatatatcagatcaaatggaaaagtgatttgattctttatataaatatatatgtataataatgtaatatagggtaatgaaatcatagtaattaaaaactaattagagaattttaagtgagtgtgtgagtgcctttttatacttttaacatatgaaattagatgctataatagatatagtttcacatattaaatttcagattattcaataaaaatattattaaagattaaaaatatatcttgttctacatctattagggtgtgtaatgacatacttgtttttctcttatttgctgcgagtgatccctgtaaacagtatttgaaaaacattgatacaaagtttagaaatcatagaaaaaaactacaacaagagtctaaattggtactaaacacaacagcaggagaacttgaaatgaaaaaataataataataataaataaataaataaagacaacaaagctggaagaaaacgtaacacaatgttggcgagactaaaacaaagtccacaggcaaccacagagtgtgccaagcagactaaactggaaagtaattaactattgccacccttatttgttgtttactcttgtctggtagcactcatattaaaaccacccatttaatctttttattttcttattatcaaacacttctcatagtcataacaaataaaacactaccttacataaggtgcaagagatgacattgaataaaacaacatacacaatgattcttttcatatagattaaccaatgaggctctccttgatgatatatgggaagttgcttgaaatcttgaacccaagtatggagccgaggcaaagttttggggtccaagagtttgagtcctacaagttgttctatacattgatcaaaccaatgaggtaattaattatccatgtgctatgtccaccatgtatgtttatagtatctagctcctaaagaacttggtatttccaaggcttaattgctcttccaagattttaagtgcttctactacttttgtttcattttctcccttctctccgctacttgtaacttgtaagtgtaggaattaatacctacacctcagcaagagaaaaatcagaaaaccaagtcaattaatatctttatgactcagtcaaaccttcctttttgacctgtgcattaaattctaaaacgacagccttaatttcctagctacacgtcgtttaagccataccagaaaccctaatctaaatcagtcatatatatactctcttttgcatttaaacacacatacagcagctcacacaaacaaccctagccgtaagtctctctttcttcactgttcttctttgaagaacttgaagaacacaacacagtacccagaaatttatatcccctcaaacccgaacaccttcttcgttgttcttcactgaagaacacgaagaacagcccttttacacaacccagaacaacccagaaatttccctctctgcccagaaaaataaacccaaaaatagcatgaacacaatagtaattgcagaaaataaattggagagaacacaccagaattttatagaggttccccgaaattgtgtgggtacgtcctcttcgagctcgcctcgtttcactatgaatcttcagagttacaaagcttggattccaactcacaatggtaagagtggtaatccgaatatatacagtattttctagctctctattttctctctgtttctctcaaaaaatcactactaacaattgtgtatttttcttctttgttacatgaacaacaccttcttgagttgtggatctccaaacccaagctagggcttcaaggcaaaacctctgtaagcctcaaccacgaactccctccttttgttgctctgtttgatctctagaagaatatgaatatttgtctctgatctggttttgtaatgttctgtcttttgttgtgttgttactgatctggattttttttcttctccctttgatgttgtaatctttggctttatatatattagtggaatacagtgaatcagagagtatgttataaagttctaacaaactttataactgactttatgaactgtctaggtaaatagaggcctaaggtcacataggttttatttactgcctttgtaaactctttgtgtaatattctggtttttacagtgtggttaatatggggtttacttcaacagtaagtaccgaaacaacattttcaccctgccgtttatcgaatgaaatcaaatgaaaagtaaataattaaaactttacccatgaattataatgatgtgcttatattatttaatatcaaatatattattatgataaattaacattaatatttacatattaatagttaggtttgattaactctttaagaaatacttttatttcgaatttaactaaaagtggaaaagtattgtttagtaataattaggtctaataattcgtgacacgatatgataatatcgcatgtaagtatgttaggtaaaggatcctcttcgagacaggacaaatctcttaaaacatactctttaagtcagtgtcactccaattaaactaaagttctattttctcaatcccagtcatttacaccctttataaattactaataaacccctatactatttcatagtgtaacaaagtaactcaaaattgacaaaattctttcttcacaccatatcactatattttagccagtgttttattaccattattcatgtaatgaacattaagtaaaataatatgacaccaatgatttcattttaatttgatttaaatataaccaagcacttaaaaaattctcttattagcaattattcaaattattggctaattaccttattttttatttttttggttaattgccttattttgatagatagtgaaaggactaaaagtatcacagtcatcaccaagtaaaaagtgagaaaaaccatgtcaccaaaatggatcatgcatcactgaaatttggcatatatatataaaaaataattacaatactatatagagtgaaatatatatatataagtataaaaaataagagttgatattataaaaggtcatttgaggtgtacaagaagagtagatttagcaagacacgtaggcaagacgttgaaagttcttaaaggagcataaaagcaattttcacatttagaaaaaaaaaccataaaaaactcaacttggtagaatatttttaattaaaatgtactaaaaagttttatctttgaagattattttattagttatgatgtgctaaatatgtaaggatatggattaagtttggcaaaagagagaaactcaaagaataaacaagagtattataatttaggataaatctgtcgtgcattctcttaaatagtagatgtttcggtagatttttatttatttcagcatctagcagagttttttcgtctaatattttttatgatcacatatgttgtagctatataggactacctgaaaatttttagaaaattctgaataatttataatatcaaaaaataagatttacatattttactagacacatacctatttttcttatacacatggtacactacaaaaaattgcaacttttagtgacaattttttagttgcaatataatttttttacaaaatattacttgtaactaaaacatagtttttagataagttgtcattaattta

SEQ ID NO: 16135 - DNA, 3238 bp, Cannabis sativa
gtaaaatagaattttagtaaaagttaacctattttacaaattttaaatagttttgaattagtgaaccaattttaatttctcaataaaatatgtagataagataatagagattaggaaaatcaatatagagtagagaaaccattggaatgcatttctgtattttgaaactatacgtctattttacattacatgggcaataatgcacattcataatcgatacataaattatattaatgacaaataaaattatccacgttgcgccaaaggacctattccccaaatacctacacccttattctatgttattatctttagaaatcatatttttattgctgaagacatttaagaaaaaaaaaattatatatcttttttaatatattttttttttaacgacggtcataacatttctccaagcttaatgtagctgtagtcgtaccagttaagaccgctggatactaggttagttcaaggagagaagggaaggggaaggggaatgggaatgtacctaaaatagaaaactaatagtcgcaaaagattacaattgcagcacaaaatccttcttgcttatgataataatgcggaaatctcaaaacagcacacatgaatgaatgctcgatgggagcgtggaccctcaacatgaaccatcttgatggaagaaataattgctctgctaaaagaatagaccccttttctttccttttccttttcttctttcactagcctgctagttagtaccattatcaattaaaatttgattaaacaataatatcaataagcacaagcgcagggttgacatgatttcatgtccaatgataaaatataagcagaaactacaagacttaaagacagtaacacttaccctacgaacgaaaaatctcaaggcaagcacaattgtatctctagagctgcaacaaagacaataaaggcaactcttaaaatcattataagaatactgaatcaaaagtccaatctttgttgatatccaagaaatgtcgcacaatggtttcgaaaatctgagtttggtgtctcccaatagtactatttactttctttaacaaaacaattacatttaccctcccaactatagactagggtgctatttatataccctcccacaactactaccaacagaattctacttacaatagtatagtaagaaaataagttgttttagaacttcattttttttttttttttgaaaaagagaaagcagccattgtctggccacccctgttatgtattgagagccctcacttgtggtagtggaaaatcgtggtcacaaaatttaagcgaaaaattactcaaaagcgcaaaataatcaacaaaaatctcatagaaaaggagataagacaaaaacaaaagttccaatctctacatcagtgatttccaatccctaaaatctaaaaatgacaagtcctcaaaatgtttggttttgaaaacccaaatagctgtctagaatttgattttatcctagatatccgtttctgaactttcagatccttcaaatattctcatgtttctttctatccaaacagcctaaaatgttgccaggatcgcagtcctccaaagctttgtcttgcatctgcacccaaccaccttactcaatatcatttgtttaatagagcccgggaacacccaacacaactcaaattcctccaacaatttaaaccataatatacaaatgaaacaacaatccaaaaacaagtgatccacatcttcttcacttcttttacagcaaacacacagccaggggataaagataaaaaggggcatctcttttgcatcctctcagttgagacattttcttaactctgaccaccccttcgctgtcttcttttggtacaataatcatattcaccttgtttctcaaggcaaagttttagaaaggttcctttagcatttaaaaaacattccaaaaacaactagcaatgttgttcctaaaatatcttttaaagctgactatttgcgtcccagaattctgctgaagctcctccaatgtgtcaataatccaatccactgcatcaatggttacagcaacttcataccagaaaagccttgtcctttcacaactgcacctccatagttagacaaggtgaccataaaactttgtgtttggtgcggaagctccaatatctatggagttccttatcaacagagggaccagaaagatttttccagccaaaaccagtggggtaatgacctcatttcctcccaaaaccagtggggtttcagtgtattccatgaccagaagggccatggaaccccctcgtatgcatgggcacgtctctcagaaagaggagagagaagagagcataattaggagagagaaaactttcaagttctcttgattggattatgttttagaacttcattaagaaaggaaactttctttaaatctgatataaaattaatattttactatttctaacccttttaaaaatgatactaattgcaaatggaacttccccaacgactgcaaatcccacttggacatcatgtgacaataaaatttttgttgtactgaaaactgagttatggttagaactatcaacgaaaataatcaaatgattttgttgatatactcgagaaatttaaacgttttacagttagtaaattacatttattatcataacttacattttccaacaaatttgattttttttctattccaaccatgatcatgaacaaattgcactgcaactaacaaaagtaaaaagagtacttccgctgtcaattatgcctagaataagtcttaacttgtggactaaatactactacaccaggcccaaacaccttgtcctcgagatgaaacttaggaacaaatccagtaacgttgtaaatccaattccaacaactagaacgactagcttcttaagtgtatggcatgacatatcttgtttttgaacaagcacattactaccattatgtaggagcttccaagcatcgttcttggctgaatgaagactggagaaccatctgtgaagtgtaaatcaccaggtaacacctccaacatcaatccacatcctcacttccttattaagaactggccctcttgacaccaaaaatcacaatagatagtccaataacaagcttctaataaagagagaaatatgacattaacaataataaaaagtgaaaggaaccgcaatgttaggcaaagtcagcaagttgttggttaggtaaaccataaatttgtttatgaactctggaacccagcaagttgagtccctttgaaatt

SEQ ID NO: 16136 - DNA, 8844 bp, Cannabis sativa
  modified_base (123)..(123): a, c, t, g, unknown or other
  modified_base (6463)..(6467): a, c, t, g, unknown or other
caagcgagcaaaatggtactcctagccgcgaacaagaataagcgagtaaatggaactcccaaccgaaaaacaaacaaatataagtgagaaaatgacactacttatgataaggtgattcaagantggtgagcaaaaatagccaccattcagagggagaatattggacaatattgtcccacatgggatcaaatgtaaaaatattgaaccatatataagaacatggactactccactcatcaccaattgattttgagatggaaacccatgattctcaataccacaccataaaaagatacccatccaaatccagtttatacctattttaactctggacttgtgtttctagctagtttttctttcttttcttacctaaaatggaagatcttgccaactctctctatggatctcaatttgacagatacgaaaagcacagttcatacctttcaagattccacacccataaatgaccccaataccccatccccgaacatttttctggtggctaaactttttacagtaaaatccttcagtaggaaacacttcaaggaagccacgaccaaagactggaacaagttgtgtcaatttccagttactatagctggccgtccctccaacatttttctcgtggaatttggatgtgaaggagatcgaaggagagttatggttcaacaaccatggccttaccttaataatgttgtcattgttgatttcctaagttctttggaggctcccaatggagacagccttcaatcctagccctttgggttcaggtccataacactccctttcttaagaggagtgaagagcttgctggactcattgccacaaagatgggaccactcctagaggtggacaagccttctctgagggagacctggggacaatacttttgtgtgagagtgatgttgaatatttcccaacctatcctaaggggaattccaattgagttttagagcataaataaggttgtttggcttaatttgaagtataaaatgctcctagatatctatttttattatggccgaatgaggcatagttataacaaaggttgctttgagtatatgaaagcttctgatgaacctcaacccctagtacctttgttataatgaggacatccgaagtaaggtttgagtttttactaatcccttacttcaaagttctaacaattggaattttactccactcacagtggtcactttcatgtccaccaacccagctagtgttctatgtgtctctaaccaagctagccctgccactactgcccctctctatctcgctacatccaaagctttgactgcttccactcagtaagcaagtttgttcatgtctaataatgtcaatatggagcaagacctcccacattagagtagtgccagtcctaccttggattcctcaactgtgcccctacaagcttgttaacatgtaccaactttcacaacacttcttaatgccactatgcatactctatttggaaaacatgtcactacttcaagctcgagccattcgtcgcactccagtacccctggcagcttaagcaacaacatttccagtcgctctagggcccttcttcgtgcttccattcctcttcttgacactaataatgctcttgtggctgcgtcaaccacattctctttgggaattacaaattcttaaccaactaagcccacaaaaaagaagacttcaagaggaggtaaagagtcctttaaaaggcagtcaattttagttgaaggagtgtcttaaaaggtgatcaagcgtgcccaaaccagtctgcctcttgccctaaatgttgattttttagaggcgggtcctgctcaagaataggcctgcctagagccatgaagattgttagttggaatgcacatgatcttggtagtgattgtgcatttcgtaatctctcccaactgaacattttttgtaatcctgatattctgtccatttctaaatctagacttgcttcttgttgtttggacattgataaaaataagtattctaatggcttggaagttagtagaataggttgaggggggtcttttgttattatagaattctactgtaactttaactctttcgaaccaatctactaatcatttggattgctatgttcgctcttcttttttcaaattttcatctttttcatttaacttatttttatggagcttcaaacaattgtgatcgaccccacacttggagacttcttaactacattggtcaaaacattccctcggccccctggataattattggggactttaatgcattcattgacatggatgataaattgggtggtaacatggataaaggctcctctaatgattttaaaaattttatcacttactttaattaacccctcttgatttcactggtgacaaatgtacttggaataataaccaaccaaatgagggaaacattcaataaagaattgactggtgtgtcatcaatgacccttggaaagaccattttcctcaagctttgcttaaccacagtggtttttttgggtcagaccacagcgctatcatccttagtcttttccctcaaactcccacccttttccttaaccagcctaagcagttcttatttgaaaatatttggcttcaaaacccaagatgggacaaaaatttattggatttctagaaatcttctgctgatcactagaatctaatttaccaattattagatgtccaggacaattgtgcccagaaccttcagaaaaggagccacaaatcttcattctaattcaaaaagtatattgaaggacactccatggagcttgagctggcctgtactggtcaatcctggagtgaagatacgattagtaggattaagtgtcttcagatctaactggacaatctcttgctcaacgaagaaatttattagaagcagtgttccagggtaaattggctcaatcatggagaccgtaatacgaaaattttccataaatttgcctcaaacaagaaagctagaaaccaaataaaagagctcctggacgctcaaggtagaagactcttggaagaataagaaatcacgggaaaatgaaaagatattttcatgatctttttacaacttctaacccctcaaccgaagtcatcaactaggctctagctagtattgacttgactgtcaattctcaagactccctcatgttgcaaaatcacttcactagggacaaagttcaaagagattttttccagcttcccttgataaagccccaagaactgatggctttacacaaaattctattgaaaaattggggtttggtcaagttagatattttgaaggtagccctcaactttcttaactttggtggagatattgctaatctgaacaaaactcttattactttgatccccaaagttaaagcagccagaaccatgaaggattttatacctattagcctttgtaacatcatctataaaataatttcaaaggctattgttaataggcttaaatatattctcaattagctcatttgccttaaccaaagtactttcctctcgggtcgtctcatttatgataatattatagttgcccaagatgtagctcatgccataaaacaaaggaagcgtggcaagaaagcctggatggccattaaacttgacatggcaaaagcctttgatagggttgagtggcaattcatcacaaaaaatcatggataagtttggctttcctcaaggtttcactaacctgattcatcgttgcatcttctactgtctcttatcaatttaatcttaatggtaggatggtaggaaatgtgactcctacaaggggaattaggcaatgagatccactttctctttacctctttctcttgtgctttgaagaattttcctccctcattcgtaatatgagcagtctggcaattttattagcctgaaaatttctcgtaccgcccttaccatatcccaccttttcttcactggtgataatattttgtcatgtcaagcaaacatccattcttataatgatgtcaaagagattctccttcactatgaacaagccataggccaatgtgttaatcttgataaatcttctcttttttttctccactaacacaactctgagagatcgaactcttatctcagattacatgggaatgcttgttagaaatgagtttgaaaaatatttgggcctccctcaatgcttcagaagaactaaaaaacaagccttcaattataccagagagagagagagaacttggaatctcatcttcaattggactcacaagtttttcttaaaagggggaaaagaaatccttatcaaagtggtcttacagtccatcccctcctacgctatgtcttgctttcgactccttgtcaatatttgcatgtctgttgaatctatgagtgataatttttggtggggcactaatgcaaataagagacctaagactcattggcatagtttgacaatgctttgcaaatctaagaaaaatggcagtctgtgatttagatctctggtttattttaaccaagccatgctggtcaagaagtctttgcgtctctttacccaacctaattcattggttgctcaaattctcaaggagagatatcatcctcattccttcttcttggacgattccactggccatgcccttcttttttctagagaagcattagctaagggaatttttttttatttgaaaaaaggactcgttacaaaaattggcagtgggaacaatacataccctttgcataattattggattcccaatgttagacttgtgcttacaatctaaactcctcgtacccaagttactttatttataagtagaaacatgacctggaacatctatacttccctatcaatatagttaatgaaattatagatatccctctccccattgaccaatcccaagattctctcatctggtagcataccacaattggtagctacactgtcaaatctggatatcacctaagcttcaccccagacaagtaccaataaacttccacaagttcccaaccctcaaattggtggtccactttgtggtcctattccttaccctctaaactaaaatactttgcctatagagccaccaaaaacacattctataccctttcaaatctctataaaaggaaagtaatggcttcctcgatttgtttcagatgcaacaatgggctggaacatatttgtcatgctttattcttttgcactagtgtcaggcagctttggaaaggtacgatattctactcacatctcaaattttctaaaacatattaatttttttgatttaattataatgcatctctctaatatcttaactaaactagaactggagttgcttatttatatgtgttggctgatttggcatgacaggaataaattcattcataatggctctatggcatgccatcgtaatcttcttaaggatgctagttcttttatggataattatcgtcaagcaaggctaaataactacattagtagttcaatggccaaggatcaatcaggacctcccaacatttggatccctcctccctatggtctcgctaaactcacaatagatgctgcaattgatagacgttccaacaaattaagttttgcaggaattcttcgaaacaacgagggagccaccattgcacatttctacccctttttcagtagtgagggaagcccacattcaagaagcaaaatctctaatcatctccctccaatggttccataaagaagcattcccaattcacttcattgagatagattgtaaaactttagtagatgcaatggcaaacaccacgaacatcaagtcagtatttggagatctcgtttcccagctaaggtaacttctatccttcttcttaaatgttcatctcagtcacattcaaaggaaagcaaacactgttgcccataacatggctaagaatgctcttggaattaaagaagctacttgctggattggcgatgaggcttgttgttgctcttctgatctttcagtctaacagcctctttactctcaaaaaatcaataataataataaataatgtataaatatatgtaattaatttaataaaattaagttttccatcaaaataaatacttgattttcaagaaacaaggtatcaaaatcgtattatttgtacattaaaaaagatagctcctccttatttttgtgctgtctgtttgtctctgaaaataaaattaattaggtgttctttggtttagagaatacaaatgtttagtattgtagtgcctagagtattaatgttcaaaaaattgcttaaattggccttctcaaaccattccattcatattgtgcagttcattttgaactctttatgatgcgattgagttgtatgccatgttatacatttgttgttgttaagaaacatgaggttccatctcaaaactaattggtgatgagtggagtggccatgttcctatgtgtgactcaatttttttacatttaatctatgtgggatatttttctccaatatctccccttaaaatggtggctatttttgctcaccannnnngaatcaccttatcacaagtcatgccatttgctcgctttatttttgttcgaatctcaaatatctttgcaccatcttgatctttacttgtaaaaatttgagtcaagttgtattgacttaagtcatgtctcaagttatgccatatcctattcagacaacttattttcataaagacctagattatttgaataaaatttagtccatataaaacaaattagtatgtgtggaatgcatctaaaaaaaacagatagtctttgagtcagttgggtttactcgttctacattaagactcaagactggtggagttataaagctccataaacttccagttcgtactggaagaaaattgtgatgaccaaggatatgatcaaaggccgaatgaacatgactcggttcaatagctagaaccaaatttagtatctctactatgtgttttaaactctaactgcgagacaatgtggagaagaaatagttttctttcatttgggatagattgacgatcccaaaaacaaaattcagcagctagttagcatgctgaaagcgatttcaaactagggagaggctgtccaaattcggtattgttgggaatttatttatataggatcacaattgtatatataaaatgtgtgtagggtcatcgtataaatgagtcaaatatatgcggtctatttttgaataaagtttatgacttaagggcgtgattgtcatgattttaatatgataccatagggacaatttctaatttgatcagggtccaaattaaaaatagtcatttaggttaattattgtttttacagttattaataaacaagtaatggtccacaattcacatcgtatcttttcactcttgaattccatcatcaagagactaggttccagagaaagatttcactacaaattcagaaaactatacctttctaaatcgattctatagactctagtacgcttccattaattttttattctattgttagatttctcatgaattatatggtttagatccagattgcagtatatctttaggtatatcatcactgctgccaattgtatttgtctttgatgagaaattgaagacacatcaacatctctttttttggctgtggatatagcaagaaaatacaaaccattgtgtgcaactaggcaggtatgaatactcactctaataatgattcagaacactgtttgaaatgggtgagaaattgcaaaagaaactgttgttacagaagaggagtctataaggctgttctaaatactctcatttacaacattcgggtgcctcaaaataactctttatgaaatagccaaatgtatactgtaaattttattgtaaatagtataaagagagatatttatttgatactttttcattttaaaagaaagaaagctagtatagttaatttagattgattggagagattgagtacatcacgttagttgttcttgaattgtttcaagtgtaaaaattgttctatttgtaataaaattttcattgaattaccaaaaaaaacacttaccctttctaattttcaagatattagtttgtactaagaaaaagtgtaagtttttgtttaaattttagattcaatcttataatttataatttttttttttaaaaaaatacacttatcttatttatactttcaacaatattcattattcactttaatttaaacaactactaataactcacaaatcttaaataaatcaatatactttcaaatttacaatttaaaattatgcatgcatcatttattattatttaacataaaatcataaataaatatttataattattgtcaaattatcaagcataaatcaaattattcctcttatttttttctaattaattcgcctgtatttacatattatgctaggttgattcaaatttatatttttcgtatcatatcgaactcatattatctcaaaaagcgcaaccaacttttacaactttggtatgatttagtaccacatttaggtcggcgtgacaaacaatacatattttaatgagtaatcatgttgttataattaagaaattaaaaggcataaaacatatatcatgatgacttctccattaaattagaggaaaagcattcttttaggagccagccgattttgtagataatattaaatactaattaataattggtaagtttagataaacaataataataattggtaagtgtgatatattttattatagacttgaaattttaatgcatattcaatggtttttttccctcccaaattgaaaaaagtaattagattaatagtacctatagttccaatcaaagaaaaagaagaaataagccatcattacttcctctatttatgggtaagtgaagttagtgactgaattagtggtgttagacggcaaaataaa

SEQ ID NO: 16137 - DNA, 3897 bp, Cannabis sativa
cattttgtcttttaacaaaacagaaggtccaattggtaacttttgtaaaacacaaggtccaaaatggtatttaccctaatattaatcacgtgacatagtatgatataatttaaatttatatgtaacttacaatatttcttttcccataaacgttgacactactcaatacttcaacaaattattagataatgaaaacactaattttcttttataataataataataataaaagatgatatattcaggcttttattaaccaatgactttaatcatagaaaaagaaaatgccacaagcttcgcaatcaagaaataatggcaaagtgtccagaatattattgaaatgaaacggttagaattagtggcacttaaaaatgcgatgacaacctctataaatcgatacacaaataaattcatacataaaaatatatatatttatacatatttatattccacaaatttgaaagaaaagaaaaaaattggcttgtgattgtgatttgtgagtgactttttggctgattttagctactcactattagaccacgcacgccttaggttggtaactctagatttgcacatatcactacctcgtagaaaattttattttttgaagggtttttgtgattgttaaattggggactagatttgtggattttattgtttttattttttatatataatttttcagtgacatcggtcgactaatatgaggtcatataaagttgggtatatattttgtttgagtgaataatatttttcttatttggtgaatcacccaaaatttcattacttccattaatcatttacatataactcattattgctagaagatctgagataaaacaaatttactatacaaactctattttctcaacttgtcactatttttctccctttttacaatatagtatgtcaatctatgttcttttgagtctaattttttggccaaatactaaatattctacttttgagcgcttcttttgtgtgttatacaattatctctgatctagtcaacctaaacagccacaagacatcatttcttatgcacctgagatgttaaactaacgttgcaattgtagcggtagaaactttcctcttaaacttgttttcattggttctagcaatccaccaaatcaatgtatgcaaatctgtggtacaaactcgccaatcagatcttcacttgttaaaggcacctctagctgtaagagcagtcaaacaaaaggtgttctatatacgcttcctgcataccactcaacaagcaagtggtatcagctatgatgttatatttatgaagtctaacatttgtcagcttatcttggacaaccattcagagaataaaattatgtttgggaacatttagtctaccccatacttttttaatccaatgcaccctctcttggataggacacaacattttatagccttgagcaacttgataatttaccattgaaaattgatgttgataactaaattcttcatcttttttttaatctctaccactttctttcaataccaacttccttgtactggggccttataagcccaccacgcttcttctctgatatagacatggtaaacccatttgacccataggctatcaattttagtagcaattgcgcacacaaacttggtaatggcagcaatattttattcaaagatgtttttgaaactgatttgtccagcatacttggatctacatataagatcccaagccacactacccagaccaacatagcttgtttgacttttctacaagaaggcttgacatatagccattatttctttcagcatcttctttagaagcaccataattttgccctagtatgattaaattgccaacaataccaagttaactaaagttgcacgccctgtaaagaagatatttctagagcttcaacatttgatttttgctgtcattttatcaacaagtattctacattcatctgttgatattttttgggcacaaataggaattctcaagtaccaaaatgacatatccttcctgctgaaaccagatgcatcaatcattcgctgaactttgttttcctccatgccactgcaataaatggcagtcttagttttgttcggatgcagccccaaggtacaagagaatatcttgagaccttgtagcaaatggaggcttttaaagtctccatgacataagagaatggcatcatctacgaaacttagatgatttaattgtaatccttcacatctttcatagaatttgaaatcatctttcctccctaatctttgcataattcttgagaggtattccatacccgaaacaaagaggaggaaagacatttgatccccttgcctcaaaaaatccatgtattgagccattaaatataaggaaaatttttagaatttgaacacaagtcataaccagtttgatgaacttacttgggaactggaaggtagtaagcatgtccacgatgaagtcccattctaaattatcatatgccttctgtaaatgtagtttgatcatccagtataccttagctagtttcctcctataatgtcaaacccagtcttggcatatcatatattgtgagctatgaatctttctttgatgaatcctccttgattttaggccaccaattcagggagatcgaatgagctttaatcttgaaaaaatgagtttagtggtttccttgtatacattacaacaagcaataggccaataatgaatgacattgttagaacacttgcttttgagaatatgtgtcagtaccgttgaattgatttctgtaagaatttgccctgagtgaagaaacgagatgataccatcacagatgtcattgccgacaatatcacaattatcctaaaaaaagaagttgttatagccatctggtcctagggctttaaggccaggaatatcaaaactgacctttttaacttcatcttgggtgaattcttccagcaaaagattagcttgtcggttggtaactagaagaccttggtcaataatagctggtaacgcatctctcctctactccgaagtgttacctatgagtttcttataataggataaaaagacctctgttacggttcatcaatcctatcttcttcattaatttctatggaatatatcctattttgatttcttttttctctaatactagcatgaaatagagctgagttttcatctccctccttaatctaacctattttagctttttgttgtaagaaagagtagtacgatttatggacaacaacatacttactcctagcttcaagttcctgatgtattaaggtcgtagtcaaaggatttgactttaacatgtcttagaaatctgctaaagcattcatagcctggatataggctacttgtatttcattaagcacttgcttgtttatttccttcaacactattttaaggcttttgggtttacaaaccacttgatacatcttggtccctttatattgcatctgctaatgagctatgatatgatcaagaaaacttggatgagttctccatatacgaaaaatacttaaatattttttgaccacttggaatttctgaacccactattagaagagtaggaatatgatcaatgtaatgctcccacttcaagtcttcattgggccctaacaccccaagtaacgatgactcttatacacgagtacatcactttggctgcttcctggactgacgactggcctacagaccaagacgtatttctagtgtgctttgtcttcactcgcacgcttcctaggaaaactttccaggaggtcacccatcctaaaattaccctaggtcaaacatgcttaactgtggagttctttcgtgatgggctaccagaaaataagatgcaccttgttgatataggtagtacaaatcaatccatttaagccatcttccatcgtgtagtcccatacctacacagtcttaga

SEQ ID NO: 16138 - DNA, 8003 bp, Cannabis sativa
tttgatttcttgaaaaatttatacagctgaagttacaaagccaaaggattagaaaatagagtgagaaaagtaaaccttatccttgattccaccaacgggaagtaccagacccctcaacgtcatttctcctgtcatcgctgtatctgctctgactcgtcttttgctgaacaatgacactagtgcagtcaccaaagttacacctgccgatggcccatccttgggtacagcaccggccggaaaatgtatgtgaatatctctaccctccagtagactgattccctcagcagcagccaaattaagatcagttgatctcgctcttacctataacatttgaataattcttcaatatttatacatacaaataaaaatgattacattgtaggccagccaaagcaatttgatacccgtacaaaacatcacagacaaacactaccaattcaaaagcaaatatgtttaatttatcactgagaattaggatgtgtaagtttttctttttgtagagaaatttacccatgtcaatgctatttgtgctgattctttaataacatctccaagttgaccggttagatgtaattcacccttccctgccattgccgtggcctccacaaactggacctcaccaccaaaagaagtccaaacaagcccaacagatataccgggtgatgcaactcgctctgcagcttctctgtcatcaaaccttggaggctgcatgcagtataaacaaataaaaatatatcaaatctccaaaatatcatgatgaatacaactgcaaatgcataaatgataaaacatgaagcatcacaaatggcttgctctatttcctgaacagcaccataaattagaagcttacgaatttaatgatagacacaaccgaaagttgtgaggataaactcaagggagcgtactataatcaatctcaaataaaaaataatccagataataagaaagaaatataaggtaggaatcacaattacccctagaactttctccaacatagtctcatccacaattagtggtgaaacaaccttaaatgtggttgctatatcatgattattttcagtcattggaataacttccatttctacgtcagctccatcagcaagtctattttccaaaattggtgaagtgagctggtgtacatttttgtgcagccgagtagtttgtccttgctctgcaactcttactgctgcagcgcgagccaaagaagccaagcttctttccagattccgaacaccagcctctctcgtgtatctctgaatgactagtttcaccatggcctgccacaataatgatttagcatcaatgtatgtttcaaatgcgtaacataacacaatatcattaagtaaacctaatacctcaggtatttggagaaactcagaactcaacccgtgctgatcaagaactcgtggaattaaatggcccatagctatcctcagcttttcttctggtgtatatccaggcaactcaatgacttccatcctgtctaagagtgcaggaggaataggttgtgccctatttgcagttgcaacaaaaattaccttcgaaaggtcaaatggaacattcaaatagctatagaccattaattaaggaatcactttggatagagaggcatttatgaaaatgccaagagtagtcaagaaggcactaaaagacttccagaaaatctaactatctaccagatcaaaacaaccttctcactcccctttgggcaagaaaaacaacatacagcaacatggtatgtcaaaccttggaagttcataaatgatcaaaacctcatctcatataaaatctctatcacttggaaatcactgttttcctatggaacttccaaagtgggacaggggaaggaaggaaatgcaatgaaaaactgggcacgcattacataaagcatgttcaaataatgcaactcatcctggtgacaaagcaattatgtcaaccatcggtcgttgtatgagtttagcaaaatatacttccgaaacacctatcttaaaagcagtagctggatttctagaaataaagtaaaaggggacaacaacaaggtctgtgaataaagttgtcgaagaaacaatagaaataaaaataaaaccactttattgacaatcatgattcacaaagacatcacgaagtaggatactgatcattgaatgtcttattttgctcagggtcaagaacctccagtagtgctgaggctggatcgccacgtacatcagaccctgtcttgtcaatttcatctagcagcatgacaggattacatacagatactctctgaaattaaaattaattaaactaattacattatgttattgtaacacgttacttgcaactgtgcacacttcaaaacaaaaaaattaaacaaagaatcttccatcaattgtttttgggtaaattgaattcacaacagcaatgtcttatcaatttacctttagtccatcaatgagtcttcccggcatacttccgatatatgttctcctatgtcctctaatatcagcctcgtccttaacaccaccaagagatatgcgtatgaatttccttcccaaggctgctgcaatagatgaagccaaagatgttttccctacacctggtggaccaacaaaacacagaactgggcctctagcatcgggtttgagctgcaacagaatttgattgaatccctatgagcataaacttccaaacataaaacaccataaacacaggacaacaaaaattagaattctcaccttgcgaacagccaaatattctataatacgttgcttgactttgactaaaccatagtggtcaatatcaagacgttctttggcagctctcaagtctagttcaagctcctcagacgccttttgccaaggaagatcggcaaggagttccagataaacacgtgaactattatatccaggttgctggggttgcattttttttagcctcctaagacacatgaaaaaagaaggaaatattataacttttttaggaaaaaaaattctggtgtttgtttcctaaaatacttaaacaaagcctatttaagttaattgaggatagtttatcctccattagtcctcattgagctcctaaaagtttcataaacagatatccttttttcttgctctctcacatttctctgagataccaaactcagagcaggaaataagagagattgtattagaaattaatccccataattataatttttttcaaacaaaacatcgaagttgtattaattgcaggagaatcacaggaaatagaaaatggattactaagagccacaaacagagatgcaaacgttgattctcttgtctctggaaatcataccttaactccctctgtgcatgcttccatatattcgaaggcattcctgcactttgcatttttctttctagtgtgactacatcatcttcatcgtcatcattgtccccaagctcttccttgatagctctcatctggaggaagaaaaaatcattttggtcagataagatactaaaatatatatatttgaaaaaaaaaatggacaacaataatttagcctaaatttaacaggataaagaataataaagtagaaactgcaccaaattcttacagttattaaataattaaagatcattatgaacaaaatgttctatactgatcatgtcccaaaagatcaactcttatgcaaatactttaaaactcttaaccaatcaatagagcactgatgaataactgattaacagatatacgaggcagattaaggtagaaaaggtacataaaacatgtattctagatgaaatgtggggtggggtcagtctaagacatgtggcccttgtctcttttttactaaaaaaaaatagctacgcattctagatgaaagaaaaagggtgcaaaaactatatgtttcatcttggtgggtgaggggaacagagatgggaagaaaacttcgttgctcatctcgttggctccctacggattcacacgaacggtaaatttttacctcaatctaaaggaaattcttgcagtaatgagagggaggaaatgagaggacactatagataacctgagattgttatctacagccagaaaaaaaaagcttacacctaatgcagataggattatattatttacattccacattcctttgcaaattcattatattatgtgagagctaacctgctgtcgcaaaagaaactccttctgtgatttcgacagctgaccctcaactttttgtgtaattttctctgctactcgtatggactgtcatgaggaacactcatatgatcccatgaaagtggataaaagcataaggaatgctggatgtcatattttaaccaagagtaatttaaggttttacctgtaaatgccgatcaactaattcagtagcttttgaaagtctcactttcaggtctactgaatccaacatggagagttgctcctcaaaacttatctcaaagctagcaacaaatatatctgccaatttgtgaactggaacagtctctagaagaactttcgttcttccaccagttttttgtttctgtaaatagaaataaaattatagattaattactgttcaactgtgtgtgtgtgtggtgagagagagactgacagagttctgcgatcgataattaatttttttttccctatttcaaacaaattgcaccccactcatggagccaagaccactattgtccacaacctatggtaatatgcctgactataatactgtgccacaaagcccataactcatagtacaactctaccatgacaaaaagatattgcagccaaactttacagagcaccctagtcccaccactaaagcaagttagtgccaaagaggttgtatgacacaagcatagacagaaattaaattaaacaaatcaatatatagcaaatcaactgtctccaacattgttgacagaacatattatgcaaacagtgttatatcatacatcatttagaaaaaaaaacgagacatcagtctgagagttaaattgagatttggccgtagaaggatcgaaacaatcttaagggttcattcaaggagcaaagaaagaaaaagatactggttccaaaaatcccaggaagatagccaagttacaaactttattctctacaaagtatccccataaactggtgtcaaagcttttacctgctcaagaacagatatcagctccatagcagttgctttgaactgacgagacaatgttacaaactctggatcttgctccacttgctccatctctatttaaccaatagaaacaaggggagaaaaagtactaataagctgaagggcctaataatagtactgtcattttcttgataaatgcagcaaaaatatcataaaagttctcaaattggaaactaaatcaacacaagtcatttgaaagaaggaactaaaaataatattgtcaacgagaataagaagcgtatcctgtcaaagtcaatgtgatgaagaaaggaaaagcacacaaaaccacatgaacagtagcaaagatcttctaagccagtatatacaacattcaactctaggttcttctttataaacagaataattacttatgtattgtctagctcctttcatattcttaatgcataataagcatgagaacttttaattttcatttatatttcatgctagagccttcaattattataaaagaaacagtcatttgcaaatacaattcggtcacattagttgttactaagaccgcatattctaaaaagacagtaacatataacatgcccaatccctcatgactagtcagccaactgaaaaacctgatcaagagcatcttctaattgaaagcttaccagtctttgtcatttcaagaggagatatccttgcagtataatatgtaccccttgtgctaagttcctgtacgctgaatctgcacaagccttcaaggacaactgtataggtaacccttccacttggcttctccactcctcttgacaaatgcaatgcacgagcagcaactcccctaagaatacatatgaaatattaccaccacaattggtaaggaaccaaccaccaggcacacactcaagttaagtgataggttaattttgcaaccaggtaacagaacgaaagtaaatgtaggaggaacccaaaaaatatgataacttactaaaatgtttaaaggccatccaaaacagattaaaagttatttgatacgaaaactataatttgcaccaattacatggagtgcctcgtatattttatttgcaaacgatgtaaactaaataaacccggtacaaatgtttgacctggctatataccttgtatgccaatgaataacttcctgatgatttttcccatcaagcttgtgaggctctgatgcaccaacttgaattcttgagcttctctctcctgaatcacctccaacacctattcaaaattactccatttaatacactgctagcatttcccaatgccaaataaaataacagctcaaatttcaccttgagatattacagtccccactgctgccgcctcagcagcatctcgaacaggaagaatgccaattaatcccttctcttctcgctgccataactcttgctccaccaatttcacactgcattaataagaccacttgcttcatctcaattccaaacaaactatacaaaatttcacatatttaataactaatcagcttaacaaactaataacatgacactccccacgcaaaataaaaatatattaactacgatcattaagaatctttcaccaaaaattaatgttgaggagttcacaagaaaaataaccatgtactgtacgatgacggagaaaaatacaagaaccaaccaaacatagtattcccgtacttgtttcagaattcgcttctactttctattatccaaccaattcaggaaacgaaacgtaaaaatgctttaaaacaagctaaaaacaaaaactcctgactccacgaagaaatttcgttaataaacaaactctctcatcatttttttttttcaaaatacaaaaaatcagaccagaattcacacacaattctcaaacacaacacttgaatttcatccgtaaccaaacgaataatcaattaacgatcgcaaacataaagttaataagcacatcagaaaatcgaagaacaaacaaacctgctaggcgaagtacaacgaattcgaattatggcgccaggtaaaagcaccttattcctaaaaggaaggatcccaagccgagtaggaagctcaacagattccgccatgattagaattgagaggagaagaagaggaaagtgaggattactggaatatgatcggagtgaagttggtttggttttggtttggtttggtttgggtttaggttgggtatatatatatatggtatagtagttatgggtggttcaattcaatcaatattatcaataaatgaacttaaaaagaaaaatagaagaatgaatagacgattctcaaaacgaccacagccttcactttttcaatcatcttcttctaatctctaattcattttcttttgtttttctacttatttatatataaaattttattttcatacaaacccctcaatttccccataaatccttttcactgcctttattatcttatatttcacttattgcctctcaacttagattttgagaaaattatattttatatttaatttttatctttattttattactatttattttgtttaattttataggtcatattttcattagctgcgttagagactctaattttaataatttatgtgaggttatatttagtactttgattataaaaaaaaagtatttattaattaaaattattttagagttatattttattaatgtgtaataaaaaatagtaatttttaacttattcctaagattttttgcccccaaattttaatacgcgccaaatcatgagttaaaaaatttctctaaattattgagattgttatatttcagaatttcatccagttttatgcaattttattaatatggtgattgttttagtaccaaattgtgtccccgaactttgatatatactaaattatattcccaaactttaacgtgtacaaaatc

SEQ ID NO: 16139 - DNA, 10921 bp, Cannabis sativa
caaatgtacttgtttataattttttagattgctataagattaattttgcaaagtcttcgatatttgatagtttcaaatacacaagagttaaaattgaaatattgtgtgtggattcccgttaatgaatgaagttcttactttcgtttacctagtataatagagtgaaatatgacaactatattaaggttcttgaaaaggaattaaggaaattaatttaacgtactagagtaaattattgtctcatgcgagaaaataaatttttatttttatcaaaattattgcacaaagctttaccaaactgtgtaatgatgagtaattttccttcttcctaatgaaatttataggtagatggatgaaacatatgattttacgaagacttaaaacatttagttgggatgagttttcatagcttatgtgaatttaattggctctttcggaaaaaacaagaataattttattcaagattgtaaaaacgttataacaaaattaaatgtttcgttataatttctaaaacactgtaacaatactacttattatcgaacaataattgttcgagttgcttattttcatgccaattgtatgtttagtgaaaattgaactcttaatttgttttaataacgtgatctaaatcacattaagatattcgcgagaatacttcaacaattagattatatagcctaaaaacatatttaaccaaaccataaactgcaatattatttttatgaaacacattagataaaactgccttaaaaaatttaaacaataataaattaattactttcattgtaatcaactccaaatttaatatctaatgaaatggacgatttatatcattaatgaaagtttaaatttattattattttttttaaaaaaatatcaataataaattaagtaccttcattgtcattttttattttataaaacccagttttacaaaataatataattaagagaccttaattgcaaaatagcaaagtttaataaggcagcttcgtctccaaaaaccctaaaccccaaaacctctcacctgagacaaactcttccaccaaagacacaaactttatctctcagttttagggtttccactttctacgccaacaatggcgatcgatgctggagccacggaccagtctcacaagtctcacaggactagtcaggctggtgcttcggcgaagaagaagaaaggcggaaagtccgggaagaagaaaggcgaggtttctgaaaacgataagaagcaaaaccctaaggttatcttctatgattctctttttacttcgattcaacactgttattttgtattttggggttaatttgaatatatatatgtattatcctgtttaggcatttactttcaattcatcggtgaaagcgaagcgattgcaatcgcgtactgttgagaaagagcaacgtaggcttcatgttcctactattgatcggagctatggtgaacctcctccttttgttattctcgttcagggacctcctaaggtatttgaattttgttattgggttttgagagaatttgccaaactaacaactgtaaaatgttaaattagcaaaatactttatttgatatatatatgtgtgtgtgtgtgtgtgtgtgtatgttctgtcatctgtgttatagttcttggaattgatagcatatgtatatactttatttgatgctatttataaaagataagactatgacatgatttgccttgataaattttctgatatgcttatatatatatctttccttaagctagagaagtagttaaatgagtttacaaatacaaatacgaaagaagattagttttactttaagttgaatgattaagacagctcttggtgtttttcataaaaggccattgagttcggctgatcacattggtttaatttgtctgtttttcataaaaagccattgagttcagctcttggttgcacaaacacagttattttgctattggtgtgcttttttatttattggttgtggaatttgtaggttgggaagtctcttttgataaaatcattagtgaagcattatactaaacataatctgccatcggttcagggaccaattactgttgtttcaggtttgtatctatctatattgaaattattcttgatgctaaccaaagatttgagctgattaattttatttgaattcgttaggtaagaataggcgggtacagtttgtggagtgccctaatgatatcaatggcatgattgatgctgccaagtttgcggatttggcattgcttcttatagatggaagttatggtttcgaaatggtgagtcgaattatttgtaattgttttgctatttttttcgtttctaattgattgattttaagctcttttttagctttaaggattaaaaaaaaggagtgtttggataaaacataaaagttgcttctcccaaatggatttttgagaagctatcttttaagatatccaaactttttgaaaagagcttttcactaaaaattgatctttatataatagttacccaagctgaaaaaaagttaagccaaagttttacttattttatacttttagcaattagcaaaagtaaaagttaagccaacctaggccattatatgcttgcatcttttgcttgcgaacggtcttggatttatttatctgatttttgcatatggacttattaattagtttccttgatgctgattggtcaatttagttggtcgtatgctaatgattttaaattggttttatgtaggaaacatttgaatttctcaatatattacaagtccatggctttccaaaggtcatgggagttcttactcacctcgataagttcaacgatgcaaagaagttgaggaagacaaagcagcagcttaaacatcgattctggactgaaatatacgatggggctaaattgttttatttatctggtctaattcacgataagtaagtatcacctgaccattttgttgccaaggaccattcatgtttatgcaaaccaataaagcctatttagcatccttattctttacacgttttgtaattaacattttctcttttgatgagtaggtatcttaaacgtgaagtacataatcttgcacggtttatatctgttacaaagttccatcctttgtcttggcgagcttctcatccttatgttttggtagatcgttttgaagatgccacacatcctaacgaagtgcatcagaatagaaaatgtgacaggaacgtcatactttatggttacttgcgtggctgtaactttaaaaagggaactaaggtatgtatatacttaaaagtctgtcattgttacttcaatttgatttggtgaaaactcttctattcgttctaattgttttatattctcttggtggggttacttttaaatttttgtcacttctgttgcaaagtttatctttattgttctatgtatatttattatttgttttgtcttgtcattgagaatcagaagttgatttttttctctctcacaaaagaaatatgaacaaattattgccatgttttctcgagacaggttcatattgctggcgttggtgattatgctgctagtgtttctaacttgcccgacccttgtcctttgccatcagctgcaaaaaagaagggtttacgtgacaaggaaaaattattttatgctcctatgtctggacttggagatttagtctacgacaaagatgcggtatatgttaatataaaccgtcattttctccaatactccacagttgatcaagaagaggaaaataaagaaaatggggaagcaacaaaagaaggtgacttgtttaaagactgatagaaaattttccttcattgttgcaagtactaaaaattgtaattactaagcatttgacttgacatattaacagaaaaggaagatgaggtgggtgtggctttggtaaaatctcttcaaaaggcaaaatattcagttgatgaaaagttagagaagagcttcatttcactttttggtcggaagcctgaatcagaatcacgagaagataatgaaaagttagatcaagctgaagctactgaaggagatgcagtgatggatagtgaagcagaggtttcagatgaagataacgatgatgatgtttcagagcaacaaactgagcaaaacgagcaagtgaaggaacatgttgaatttcatggaggaaggctaaggagaaaagctgtttttggagaagacattgctgatgataatgggaaggtgaatttggtgaacttatttatagctttgctaattgaaaatatgaattgaagaatgtccaatttaataacacaagtacttgttaaaaagccggatttggtgtatcattaagggatttgccctttcttgtgattcctacagatgggaatgaggccttgaaataagaattttgcataaacaattttatggttatgtatgttttgatgaggttaatgatgttattatgttgatttgattgatatattgattgatatgaattataaatggttatgtcatttaaattagaaaaatgttcttcattttatactaaggttctctacatttgtgtcgttgtaggatttagatgatgaggatgatgatgaggatgaagatgaggatgatgttggtggtagtgattcagaaaatgaagcagcttctggttcagatgcctctggtgatgatgaagagattgatgaagcagagggtacatttctatgtttcttttgaatttataatacactagtgttcttatttttcatatagcagtgctactcattatcaaaagtgtgtaaatttttacatgatcattaacttgatggaaaatggtcgattagtatgctgtttttgtttattgaagttagtaaattgtaagtcaggctgcttaatatattatcactttctgcaatattttggtcctgatttcagagggcatgggaaatatttcgagatggaaagagtctataatagaaagaactaactcgagacaaactactagccttatggaacttgtatatgggaagactacatcaattaatgaagaagagagtggtgaggaaagtgatggagatgagttctttaagccaaaaggtgaatggagcaaggtttgtactgcacagttttttttgtgaagtcttcttgatggttctttccctgacgttttaacatgcaattcttgcatttgttttcctttataacaccaaacaacatgcttttttactttttttctttgctttcgcgtttctctttattctttagaagaaaacaagtgatggcgttgatggtgagaatctgaatcccgaggactgttccaaattcagaaatcgttctagtctcaaggactggaaagaggacgacaagcttattgcaagtattcgtgatcgctttgttactggtgactggtcgaaagctgctcaaagaaataagacatcagaagacaacattgaagatgatgatgtgtatggtgacttcgaagatttagaaactggagagaagcatggcgggagtcatgcagatcaagttggcaaaggcactgatcacaaggaagatgagttagcaaatgaagagcggaggttaaaaaagcttgcacttcgtgcaaagttcgatgctcaatatccttttttaagcaatatacttatagtttttacattatctatccactcattgccttccaaaatataacttagaaatttattagacaaagggttttgaaaattattcttttagttatctgttatttgtaggctcgttatagtttctatattgagtccattaccctatagtatttgggagcaaggaaatactagcatgggaatcaaacctcagaacttccctatgccattattttcactctcttaggtatttagaacctgtgtgaaatttctgtgaccttaacttcgatgtacttttgaagaagctgaattatcagaagaagaattagatggtaaacatggagccaaggttcctagagatcagcctaaagaaattggatattttgacaaggtaaactctctgacataatcctagtaagtttatctgcaatgtaaactgtaggagggcactaaacttcttagctgatgcatgttttccagttgaaggaggagattgaaattcagaagcaaatgaacatggctgaacttaatgaacttgacaatgataccagattggagatagaaggatttcgaactgggacttacgtcaggttggagattcatggtgtccctgttgagatggttgatcactttgatccctgccaacctattttggttggtggaattggtctcggggaagaaagcgtcggatatatgcaggttgacttacattacaaaaagttattctctttctttgctgtgcttattttcttctcgatgttgtataatttgcctattatcatttctcactaccaggtttgttgagacataagaggtttttcttacctgcatttgttccataccattcttattctgtttggtttctctctaactatatttagaggtgttggtttttgcttataagaagtttcgtagacactttggcctgttggctagagaaaatcgttgcttctttaaatcgtcaaacaactcaaatataaattagtaatcttgtatactctccctagttaataatttacatgtcatttgtataattattaaaactgaatcatccatgttcgtgaaaaagttttgtgatcaactgaacaagaatgaaatgagtgcttttgtataattattagaaagtattgatttagcttattttgtaagttgtggctgataggttccatcttaggaccaaattgacatacttattagaagcttgaataggttttactaagaattttcaagaacacatgagcttttgatgattttttttctcttcatgttaacaaatgcaaggaatctttatgatatattgtcattcttcacaggcgaggctaaagcgacacaggtggcacaagaaagtactcaaaacaagagatcctattattgtttctgtagggtggaggcgataccaaaccatgcctgtttatgctattgaagatgccaacgaaaggcatcgcatgcttaagtatactcctgaacacatgcattgccttgcaatgttctgggggcctcttgcccctcctaacaccggagtggttgctttccaaaatttatctaacaatcaggtatgcatatgctcttttgcgcttttcaactcaaatgaggatatgatctagttcatgtataagatataagataaatcataactttataacataaggttgttgtttagtgttcatatcacgactaattgattggcggttttgctctaagtggttccgattctcttatattttgttttatttggttgttcaggcatcgtttaggattacagcgactgcagttattctcgagtccaaacatgaaaccaagatagtgaagaagctgaagctagttgggtatccctgtaagatcttcaagaagacagcatttataaaggacatgtttacttcggatcatgaaatagctcgattcgaaggtgctgctgtcactacagtctctaagattagagggcaagtgaagaaggtatgcctcctgctgagtgcaaagtcaatatcttggtggttatcatatattaacgaacaagtttaattttcgtttatatgaaatgttaattaatttttatttgttttaacccgaccaggctgcaaaggaagaaatcggtaaccatcccaagaagatgggaggacaagtaaaggaaggaatcgttaggtgcacttttgaagataagattaaaatgagcgacattgtctttttacgagcttggacccgagttgatgttcctcaatttttcaacccgttgacaacatctttgcaacctcgtcaacaaacctggcaaggaatgaaaactctagctgaattgaggagagaacacaatcttcctatccctgttaacaaggattcactctataaggtaactcaatctcgttttgatattctttttcttgttctgtttcgccactgagtttcttaattatgtaattatttttttttctttctcaacagccaattgaaaggaaggtaaaaaaattcaatcccatggtggtacctaagtctttacaagcagctcttccatttgcgtcgaagcctaaggacatacccagccgaagaaaacctcttcttgagaacagaagagctgttgtcatggagcctcacgagagaaaagttcatgctctggttcagcatcttcggcttatcagacacgagaaggtataattagtttttataaaattatttacagattgaatatttgagttgtgaaaatcttgattgttatgtgtttttgaattctgcagacgaaaaagcggaagatcaaagatgacaagaaaagaaaagaactcgaaactcagaaagccaaagacgacgagatagcaagaaagcggcagagagaggagagacgcgagagatatcgtgaacaagagaaacaaacaaagaaacttaagagaaactcagataggtgaaagtagtaagtgggatttgtctactgctcacagttaactttattcacattgcaattttgctttgatcttccatttttgattgtattttcttaccttgctcacatacaagcctcaattttgtccctttgatgtattatatattaagttaatatataaactatgtttcactttcaagttgtggattagtaagaacactagttttcgtgtaccctcttataaaactaattataataataatcaaggattgttttactaatttttgtgtgtatataataaatacaaaattattagtggctgcaaatttggtataagatatatttgaggcataattcccaatagtttgggagtttgaaaatttcgggacacaatttagtacatgtgaagtggtttagggtacaaattagtacatggggaagttttaaagggtttaaaaagtacgaaatataatttagtatatgtaaaagtttaaagagtttttaaaggtttaaaaagtttggggcataatttacaatttagtatatgtgaatgttccactgaagtttttaatggtttgaaagatttaggatacaatttagcacatgtgaaagttcatgaaaagtttttaagggtttgaaaggtttggatttggggcacaatttagtacacttttatcggcaaagtttgtaacagcttgaaaagtttggagcacaatttagtaaaggggagaaaattgtaatgaatgttttggtgttatctgtatgtgatagatattccttggcatgagtatgacattcacatgtatggaaatgtgtatatgtgagaaatgtttgagtgagtcatcattgttttcgacaaagcttgtgcttgatacgacgttggattttgtccaccacccaaatcatgatccatcctaacttctaagtcctcatcctttattcattcattctattatatcattttatcatttgtactttggctggctctcactgtccttatcttatgccattatgtgaacccaatcatacacatatatgctcaaactttaatgtagtgaaaagaaaaaaaataaatagaaaatgttaaatcttgtttatggtatggtcacatgtaatcttttttctatttagcaacaagtggtatttatttaccaaaacaatgaaataaagcttctaacaataacaatagtacttaatatgaaaaaactaacaacaaagaacaaagttaatatttttttggacgattattatgttatgttctaactaccctaattatattttttggatactatttttcctcaaaatttttcttagtgggtgtactcaagtggttttaatgaaaaaaaggtgtagatttttctttttttagtcataaacctccaaagtaagaactttttgatatgaacgaatgtttttttagaaagagaggacattgttgtgcttgtgccatgaaagaggaaaattattgattttgcatgcgatcaaggtgaatgaatgggtggtcatccttcttagaacaattcgacttaaatcgacttgagagtcattggcggcggacttagaattttattcaagggcaaaataaaatattaaaacaatataatatataaatgtaattatatatatttatttgtgaggggtaaacacctatttattctacataattaatttaattttaattttgtgtacatgaagaacaccacttatctattattgggtttgccactattgagagcaaaatcttattcttaaattaatgatgtaaatgtaatggaaagtgtgattatatgtttgataaaaggtattgtattaaaatgaaaaattagattttagttaaaaacaataaaaactcaaatacttttgttcaaaaacaaaaacaaattttcattaattttttaatttatataataatattttattatgttatttattaaatagtttggaaaaaaattaaaattattttattttatttgcataacttaaaaaagataatcaaaaggttaaaatttaattaaattatcattataaatatacttcttttatatatagtttttagaatgatatatttattttttaattaataaaataaaaaaaaagtaagttattttaatttttaattaaaaatattatcttattattatggtcgagcacgactactttttcaagtaaaaaaaaaaaaataataaaaaaggaagtgcatttaacggcgtcgttttttgtcaggccacataacggagttagtcgaaggaccaaactaacaatatacgcaaacttcaaggacttaacagtaaagtaccaaactgcaaatatctacaaactttaagggcttctttattaataaaaagagacccgagtcaatcgggtcgagttgaaaaaaaaggttaaaacttaaaagttagaaaagaaaaaaaaaactccactgtcgtccactttctctctctttctctttctctctctagtaattataattataataattaaaattaaattaaaataaaaataa

SEQ ID NO: 16140 - DNA, 7507 bp, Cannabis sativa
aagttcagggggtacatttagtagatgtcaaagtttagggaggaaaattactaattagcctaaaaattataatacattaaaaaaactatttaagaataacttttaattattattaaaaataaataaaatatcgatttgagctaattataaataaaattaacctctcaattataattagttatacatgttaacttcatttttagtcaacggtgcaaagtcaattaaacaacaatgaaaatgcttgataattaataacaagaaaaaacaacaaacgacacaaagtgtttatagaggttcggcccaaatttagtaatgacctactccccttacttagtatttctttgaaatataccaagatcgcaagaatatggtctaacgagtttcctaatattcttttataagtattacagataatatttttgtagtgtaatagctaccttgaaagtctagaatatggccccttaaacagtgaatatgatccactatttatagggttataaataattacagaatattcaataacggttgtttattccctgaatcccttgattgcagtgaaccattatgacctattctttagggattcaaaggctgatttactggatcttgaatatactcagtcaagccttactagtcggtagggccaaccagagtattgccctacaaatacttagcaatagaattttgtgaaatcttaccaattgggtgccactggttggataacgtaattagctaagcaacgtgatcacatgatatggttcaaaatgaccaccaattgtgcattctttgccacatgtcactccaactaatgtcacgtcacctgggtaaatttttgggataacatttgccctaaatccttgtaagaccatttggtcgtatgtggacttctgatttctttcttggacagccaagtgactagtgtctccctcacgtgatccaaatcctaggggtttgtgcctacctaaagaaaatctcctcaagttctttcaaatctccagttataataattattcacacagagaatcgtgtgtggggaaatgtgtctaacggttacacggattttgagacaattttattgaaagtggaggcttttgggctttttggagggaaaacataattatttcaattttatttcccaaaaacccttcttattatgttatttttcctatgaatacccttctcatgttccatttaaccttttagaatttttaaacatagcaagaaaaatatcccattcttgatttcaaaatatttcccaaattgctctaaatttccacacaaatgacttaagaggctttattcttcaatatttctactcaaacagtgagtaagtcttctgctctctttcttgcataaatttattataaattttgaatcctatattttgctcatttttttggaatatgtgtgtaccatcgtttctcatttgaacttagagattctttgtgatgaatgactttgagatgacatcatcatttattagggattaaatcagacacgagtagtttaactttgcacgatttgtcttcttttttttttctacaccgtatgaatttggattttccttaaatccagaaaccctttttttcgaaatcccatcatagagacaagaattatgtggttagatcttcatttttcctggtcagcgtattgaaagtgttttcttgagaaaatgatttccgtgcaattcagtgcttcacctctgtccttcctattttgtagatggactatgctaaattatgggaaggagaacatcaaattgacgacgacctactcaaactattgctcgaaaataacatgactcttcgcattgatagtctgtcatcatcttcgagtgaatcttcagtttcttctatatcatctgaggaaggattgtcaagtgactcttcggagtttaactttcgacatcataactattttgaccagatcaatggcgagaattatggttggcacatctgggaattgacaaagggctagaggcaattcttccgcacttcttggacatatattgtccgatcaggcacgcaagatacccttccttctaggaaaccagttcaacaccaaggggttagccgcgattgacctagcagtaactgttgtgcaacataagtccaagtctatcccttcatgtagaagaaatcttgctcagacaaaataaactactcatcaagttcttgccaaggatcctcatattggtcggcacatggcaaccctcaaatatggtgatctagaaatttaggaaatttctaaggaagacgaggaggaaggatctcccccaaaaatagatgggggatttaactctgaagggatgcatctttctccctctggatggtgcctcgaactaggggcgaactatatggaggaggaccttacgaaggccactggtccttaagccaacttccaagtcgaaggtgatgtggcagaccgagtcatccaataatagttaagtggttgaacaacatccatgctagtggcctttctggacgtcaccatcttcctctcgctcccaactcaactagccaatgaccccaagggtaggtctttgtgcatggtacaagcctaatactgactaaggggtcattcttcatctcaacccttactttagaagggtggttgattattatagcatctgcccaacccaaattaacctgaaggatatgaaatacttgttggcattatacgtcgtgtatgcacattaaggttgggggagccttttcctcaagagatcaactggttttttgatcccaaatctaacccttgtaaccacaactcggggtacttttgcttttcccttcttgactgcaagtggctgactggcacccaagacatcactaagatcgaagggtttgcctaggattattttcttgcaaaagacgtttcagcgaggcatctttagttttagcataccatgccattatttgaccaccacccaccttagagcttatgagtagagctcaccagatgctcaaacttctagaggagggtaggaatctttcaactttggctatggaggaatattttcacttgtacggtctctatccctccgcgacaagcaaaaagaaatccttcaagtcaaaggaaaaagactcatatccatccccagactagaaaggaaaagtccaactcaaaggagtatgctcctctcgttcactttgatcgtcgatataacatctagatagatgaaaatttggctgaggaggtacaccctcctacgcctatcgtcgagggtaaaaggaagaaagtggtagaggtaaatttggtggaagtgtctttggatgatgaagagctcacaatatgctttacgatgatgcccctcggatagttgagggtgtggatagtacgaacactctcttgttaactttcttacattttcatctttatttaattgaagtttttaagtcttgctcattttctatgtagttatgtcatccaagatgtttgtaaggattggcaagagaaagggtattgagtcctctagtcaggagtctctagtaaaggttcaaaagtggggctcaccaacctaaaaagagaaaatgccctgtcttctaagaaggatcctcctacccaagaggccctgactgtcgactcgaccactggtgcccagactgctgcagacaaggttgtggacgagggtgctctgatcccccttcgaacaaatcttttgccaagcatagtttgaaaacaccgtccagcactaagcctcccatggctaccgattcaactatgaaaatagttgacccatcacctctacaaactcaaactttgaatgaggactgcacttacaaaaaattccataacttctaggtgtattcctggttctttattatctatgggttttgacaggatgggaggttaagctagttgcttttttaattcttgaaaggcaacactcctctgtccattcaaacttcttatttccctagaggatgttgaagaaagaaacacacttatctgtagactttgatacagatatgcttagtgctattattcagccaattaaactttataccttcttaatattcgtgggcggtttcatgtccaaaagagcttgaatctcctcaggattaactttgattccctagacattcactatgaagccaaggaacttgaccgagttgactccaaacaagcacttaagggggatgagcttcatgttgtaccctcaaaggactttaaaacactcgtttaggtcctttatgtgcccctagccttattggacttgaccaacatgtcgtccacatagacttccatgtaccaatacaagcctacacctcttaggacacttgtgtgttcctagttaggcagatacatcttgatctgactgtaacttaaataggcatccatgaagtttaggatctcatgagcaactgtggtgtccacaagttggtcaatccttggaagtggaaaataatcatttggacatgccttaatgaggttagtaaaatcgatacaaactcgtcacttgttgtttagtttgggcaccaatacgggattggaaacccaaacatggtagaatgcctcaatgatgaagctatttgcaggcatcttttcaacctcatccttcaatgcttgtgctcactctttatgtaggaacctccgtttttgttgtactggatggaagtttggacctatattaagggtgtgagaaactattaatggatcgattcccactatgtcttcatgcgaccaagcaaaaatatcaaggttaacccttagaaatttgatcaattcaaattttatttctggcgctaaactgcgattaattttgagtttctaggccagcatggggggtcgatctctacttcttctaattcttccactagtttaaagttatttgtaggattcctaaagtgaggatctatgtttgtctcctcgccttgggcggaccctcaatgcccttagccaaactcactatttgagctcttggcaggcagttcctcctttttttgctttggacagaacgatgctataacattgtcaagcagactgttggtatccccttaggcacctgccaccatgctttgtttgaaacttgatgcgtatgtggtaaattgatgtgactgcttttagccatacatggttggtcgcccaatcatgacattgaatgtagatgccacatcaataactatgaattgggttatgactgtctatgcgggactttcatcgattgtcaatggcaatcatatgtattctagaggagccagtccttggcccaaaaactcgtacataagttgtgtatagggtgttagatctttcaaataaagctccatcttctcatacacagtcttgaagatgatgttggaagaggctccatcatccattatgcagtgcgctaccgtcatattccttatttgggtagttatgattagagggtcattatggggaaatctgacatgggcaacatcttcttcagtgaaggtgatggcatgcttttctacttttggctgctttagagttctttcctctacatctaggacttcatttctctactcgtgcaaagagtacgagcatatctatccaatgctttgtttgaatccccaatgatgtggggtccactgatgatgacgacctataaatggccagcaaccggtgggggcaacatgtcgttattttgttggacatgtgcctagttttggtcgggttaaacataccaacatagttgggcattattccttcttatcaagaactcgatctcttccttaaagttcttacattcattagtgtcatggcagaaatctttatggaatcgacacaacttggtgggatccctcttactgatgtctttttttcattggaggggcttcttatgcggaacaatggcttgtgtggtcattatgatagttttgggagtgtctgttaggacagtgaagcatgtgaacttctcttccttttcccgaggatactgttgtgcagggggattattaaatttttccttcttgccaattacttggttggatactgtattattgtgctttcatccattattgttgttattttagggttgagcagcattactagccccagttgtggcaggtgtgttgttgggagcagttgttttctgcccgctaatttgcacttgtcagacagcttcttcaagttttatgaaaccgtcagcacagtccaaaaactctctcatattgttggctgatatttttttggtgtctctccaaaggtcgcccaaggtaggatacctcctaaaatggttgtatactgcccttcttttgttagacctttgacctttgtgacttcagtcatgaacctttagatatagtctttcaaagattctcccgacctttattttatttcaaccaagtcctccaattgagacgatatttgtctagaggatgaaagctgagtgtaaaagtcaatagtgaaagcatcccatgaatcaaatctccctggggacatcttaaaatgccactgttgtgcggtgtcaaataaggtcgctggaaaaatctttcagtggacattgtttatcaccctttgcagatccatctagatctcaaagtatttgatatgagccaaaggatcttctttccagtatacattttccaagttgaaatcttgaacttggttggtaggggcaacacatttatgcacgtagagaaaagcgatccttgagccttgtcaagttccagctcagaaagctttgggctggacaggccttgtacaaggctcttgagttgatccacttgtggttgcattgtaggatcaactctggctgtcctttgtttggccaactcttctcttaggttgacaggatgttggctgtatgggttggcaagaattggcctatcctgcgcccttgattgatccttttagggcaggatgaatctatcttgattatttattcttcaatttaagttattacaaagatcttctcctactcgaggacccattctatcaaacacagaatccttgagcctcgagtcagaatgtgttcgagtgtttcggagaagaacgtcgttattgcacccggtgttattatgagttctccaattagtgcactcattaatagggtggctagttgattacggctcaaaaaatttgtatattttaagttcttttatttatgcacatataattaatataaattaaatattccttattttttaatagtaaaatttatttaagtggagatatttaatttattttaattttgtgatatttttcagatttgagtacattgttataagcgaaaataaattcttaagccccaagtgtacaaaagcccaacatgaaggaatgactttgtggccttttacttgaagacatacatatgtatatgcacatacatacctacacccattaattttcaatctaaagttgggtttcactttcttaagatattttatgggactacgtgagttgaagccaaatgttgaccgagtccaacacaccaattttctccatcaacaaacgtgactaactattcccacattctccatctgttaatgcgcggatccatgttctccttttgctgagaaatccatgccactaactcaat
